United States Patent Application Publication US 2025/0205292 A1 - sequence listing, part 18

SEQ ID NO: 29 - DNA, 2945782 bp, Lactobacillus rhamnosus (residues 1-1,472,891 of 2,945,782)
  source 1..2945782: mol_type = genomic DNA
atgcccaatttagaggagctttgggcttacctgaatgataaattccgtgaagagttgaccccagtcggttacagcacatggattcaaacagccaagccggtcaaattgacccaagataaactcgaaatcgaagtacctgcatctttgcacaaggcttactgggagaaaaatctggttaccaaagtggtggaaggcgtctatgagtttgcccaattagaagtcgatcctgtcatcatgaccaaagacgagttgcagcccgcttccacgcatcagcatcaagtaaccgatgacgatgatgaccaacaactgacctttaaggcaaaaacgcatttaaacccgaaatatacttttgaccgcttcgtgattggtaagggtaaccaaatggctcacgcggcggctttagcagtagctgaggcgcctggtacgacttacaacccgctgtttatttacggcggcgttggcttgggaaaaacgcatttgatgcaggcgatcgggaatctggtcttggaaaataatcccgctgccaacattaaatatgtcaccagcgagaattttgccaatgacttcattaattccatccaaacaaaacagcaagaacaatttcgtcaagagtaccgaaatgttgacttgctgttggttgatgatattcaattcttcggtgacaaagaagccacgcaagaagagttcttccatacatttaatacgttatacgaaaatatgaagcaaatcgtcctaaccagtgatcgcctgcctaatgagattcctaagttgcaggaacgtctggtatctcgcttcaataaaggattatccgttgacgtcaccccgccggatcttgaaacccgtatcgccatcttacgcaataaagccaatgcagaagatctcagtattccggatgacacgctttcatacattgccgggcaaattgaaagtaacgtccgtgatcttgaaggggcgctggttcgggttcaggccttttcaacgatgaagaacgaggacatcacaaccagtttagcggcagatgcactaaaagcccttaagctcgacgatcgcagcggtcaactcaccattccgcagattctcgatgcggtcgccaaatattttcaagtcaccgttcaggatctaaaaggcaaaaagcgggttaaacaaattgttattccccggcaaatcgccatgtacttagcacgagagatgaccgacaatagcttaccgaaaatcggccaggaaattggcggaaaagatcacacgactgtcattcacgcccacgaaaaaatcatggctgccatgaccaccaacgaagatttaaaagcacatgtggtcgaactacgaaatatcctgaaaaatcgtggttaatccacttgtggacaactgccagaaacagaactttttgtccctatcacttatccacaggtgcataacttcatgatttgctgttccgcaaagttatccacagtttgaacatgccctattactattactttaaaagctttatattatatatataaaacgacgtacaggaggctcttatgaaatttacgattacccgatccacattcttgaaaaccttgaatgacgtttcccgggctatttcaaccaaaaccacgatcccgattttgacagggttaaaaatcgtgctcaatgatacagggctagtgctgaccggtagtgatgctgatatttcgattgagtcaaccattaacgctgctgatgaaagtaacgatttacaaatcggcagcactggtgaaattgtattaccagcgcgcttcttcagcgaaatcgttaaacggctgccagaaagcaccatgacagtagaagtaaaggacaattttcaaacggtcattacttcaggggcttccgagtttacgattcgtggagaagatgcgaacaactatccgcgtctaccggaaattaccgcagatgaagccttatctgttccggctgacgtcttgcgccaactgattaaccaaaccgttatcgccgtgtccactcaggaaagtcggccaattctgaccggggtgcatttaacgattaccggcgatcaactcgttgccgttgcgaccgattcgcatcggttatcgcaacgtaccctaactttgccagcagcaagcaatatcgattacgacatcatcattcctggtaaaagtctgacagaactaagtcgcatgttaggtgacgatgtgactaaaatcgaaattcgcattgccgagaaccaggtattatttgtatttggccaaaccgccttttattcgcggttacttgaaggcaattatccagacacgagtcgccttattccaacatccagcaatacgcaagccgagttcgatgcgccggcactgctagcttccattcagcgggccagcttgctgagtcacgaaagcagcaataacgtcgtgcgtttagtcctcaacattggcgagcaaaaagcaaccatctatggtaattcgccagatgtcgggaatgtcgaagaagtcttaagcttcaacaagctgaccggtcaggatctggaaatctccttcaaccctgattacatgaaggacgcgctgcaaggctttggccaaacagcgattgaagttgactttacggcaccgctgcggccattcaccttggttccaaccgaagataaagagaagtttattcagttgattacgccggtgcggacgttctaggcaatagaaaaacgcaaatacagggccaattaaaaaagattctagagtgtgcaaagctctggaatcttttttgatagctttcaacgatatgccgaggatcgatgaaatttaatatttccgctcgccaaaacggtaatagagactcgcagcaaggcaaccaattagcaagctgacaagtattaacggtaaactcaaccaattacggaaatctgccatgatgttaccgtagacatagatagttacagaaaaggccacaaacattccaaaaactgatttcatagtgggcgccataatttcctccttgtatagacggtttccacgtggcaagcaaaaatataaaagttaattggcgactttataattattgtatttaataaatagtttatttactgattttccctgccaaccatggaaatatcaaataatttaaaataaaaatcgtaaagctgaacgacatttttacgatgatattgtataaaagcgcttgcaaatagtcaatttaggcaccgctattttttggatgtcgatggaattaacaaaacttagcttgacgtctaaagactgagcttaactgtcttttggcataaagcgagacctaatccagagaatagacagttattcataagcagaaacggctttaggctaggctaaaaacgataaaactaaaaatttggctgtttttggcctttctaagtgtttttagtctaggggggcgtcttgggcttaaattgcctcagagccgcttaaatgcccgttttgaattgttttttacttggtataagggtataattaatttgtgttcgttagcggcaaatcacggtttctggtggtttgccgatacatttcggattggagggcgacgacgatgacaaccatcaagatcaccaccgcatttttgacattgggccagtttctgaaagaggcaggtttgattgatagcggcggtgcggctaagtggtatttgggtgagcacccggtaaccgtgaacggggcagctgaagaccgtcgtggccggaagctgtatccggatgatcagattaaagttgccgatcagacctatgtgatcgtgagcgcatgaagctggatcatttaacgttaaaaaactatcgcaattacgcaacggttgatacggcattttcacctgagatcaatgttttgatcggtgaaaatgcgcaaggcaagacgaatctgcttgaagcgatttatgtattggcgttagcgcgcagccatcggaccaacaatgataaagagttgattcgctttggtagtgattttgcgcgcgtctccggtcagatcagtcgccaaagtgggacgcatcagctggaattgattattagtcatcaaggtaagcgggcgcggattgatcggatcgaacagtcaaaactgtcgcaatacttagggcattttaatgtcattttgtttgcaccggaagatttggcgattgtcaaaggcagtccggctgggcgacggcggtttatcgacatggaatttggccagatgagtcccaagtatctttataatctgagccaatacaaaacgtttctaaaacagcgaaacgcatacttaaaacagctgaaataccatcaagccaaggatcttgtgtatttagacgttttgactgattcgttggcggcgtttggagccgagctgatcacggcgcgggcaaaattgctgcagaccatgtcggattatgctgctgccattcaacaagacattaccaagggacgcgaaaagttgcagtttgcttatcagactcaggttactgcggatcttcgacaagatagtgagcaggtctatgaagcattaggtgccttgtttgcaaagcagcagtcgcgggaaatcgagcaaggcaccagtttggtcgggccgcatcgcgatgatgttttgtttattgtcaatgataaggatgttgctaatttcggcagccaaggccagcagcgcaccacggctttggcagttaaattagccgaaatcgacttaatgaaggatcagacaggcgaatatccggttttgttactggatgacgttttgtctgaacttgacgctattcgccagacacatttattgaaggccattcaagccaaggttcagacgtttctgacgacgaccagtctggatggcattcaaaaggaaatcatcacggcgcccgctatttttcaggtgcaggatggcgttttgacgaagcaggcgtgagcaactgtaaacgatacgaggaggataaccagtgacggacaagaaagaatcggccgaagaaaagaaagaagaactggcagcagaatatgatgctagtcaaattcaggtgctgtcaggactcgaagcggttcgcaagcgcccaggaatgtacatcggctcaactagcagtcaaggattgcatcatttagtttgggaaatcattgataacgggattgacgaagcgttggctgggtttgcaacgcgaattgaagttgaagtcaacccggataacagtgtgaccgttaccgatgacggccgtgggattccagtcgacattcaggcaaaaaccggtcgtccggcgcttgagacggtttatacggttttgcatgccggtggtaagtttggcggtggcggctataaggtctccggcggtttgcatggtgtcggcgcttcggttgtcaatgcgctatcaacgaatctggacgtgacggttgttcgcggcggcaaacggtattacatcgactttgtgcgtggcaaggttaacacgccgatgaaagaacttggcccggcaccggagcatgagcatggcaccaaggttcattttcagccggatccggatattttcacggaaaccacaacgtttgatgataaagtcctgacaacgcggattcgtgagttggcctttttgaataaggggcttaagctgacgtttactgataagcgtgcggcgactcatgaaaagctggtgtttcattatgaaggcggcttgaaatcttatgttgatttcctgacgaagaagaaagaaaacctgctgcaggaaccgatttatgtggaaggtcaggataaaggcattacggttgaagtcgcgctgcagtatacgaatgactatcacagcacgctgttgacgtttgccaataacattcacacctacgaaggcggtacccacgaaaccgggtttaaaacggccctgacgcgggtgattaatgattatgctcggcgttccggtgcgcttaaagacagcgatgatccgctcagtggggatgacgttcgggaaggcttaaccgcagttgtttcggtcaagcatcctgatccgcagtttgaaggccagaccaagaccaaactggggaactcggatgcccgcacggtggttgatcgtaccttctccgatcacttcaacaaatttcttatggaacatccggctgacggcaagctcattattgacaaggccatgcttgccagcaaagcccgcttagctgctaaacgggcgcgtgaagtaacgcgtaagaagagcggcttggaaatctccaatctgccagggaagttagctgacaacaccagtaaagatccggaaatttccgaattgttcattgtcgaaggggattccgctggcggctcggctaagtcgggacgcagccggttgacccaagcgattttgccaattcgcggtaagattctgaatgttgaaaaagcctccatggaacgtattttggccaatgaagaaatcagaacgttattcacggcgatgggcaccggttttggtcaggactttgacattagcaaggcccgttatcacaagttgatcatcatgaccgatgccgatgtcgatggcgcccatatccggacgttgttgctgacgctgatttatcgctatatgcggccggtgcttgatgctggctacgtgtatatcgcccagccaccgttgtatcgcctgcgtcaaggtaaaatgatgcgctacatcgattccgatgaagagctacaggatattctggggcaactgccgcctagcccaaagccggatattcaacggtataaagggcttggtgaaatggacgccagccagctttgggaaaccaccatggatcctgacacgcgccgacttttacgggtatcgccaaaagatgctgaacaagcagatggcatttttgaaatgctgatgggcgatcatgttgagccgcggcggaagtttatcgaagaaaatgcggtctttgttgatccgaacaacattgacgtatgatagatcgcttttaggatgcagacaggtaaaatgagaacttttgagaggagacttttcgcttaatggatgatcgccaagaaagccggattacgaatgtgaatctcggcgaaacaatgcgtaaatcattccttgaatacgcgatgagtgtcattgtggcgcgggcattgcctgacgtacgtgatggcctcaaaccggttcagcgccggattctgtatggcatgaatgaactcggggtcacaccggagaagccatacaagaagagtgcgcggatcgtcggggatgtcatggggaagtaccatccgcatggtgacagctcgatttatgaagggcttgtgcggatggcgcaggactttagttaccggtatatgctggttgacggccacgggaactttggctcggttgacggtgacggtgcggcggcgatgcgttacaccgaagcccggatgagtaaaattgccgtcgaaatgttacgcgacatcaacaaagacacgattgattttcaggataattacgatggcaccgaaaaagaaccggttgttttgccagcgcgcttcccgaatctgctggtcaacggtgcgaccgggattgcggttgggatgaccaccaatattccgccgcataatctgtcggaaacgatttcggccttgcatgtgctgatggatcatcctgatgccaccaccgccgacttgatgcaggcattgccgggacccgattttccaaccggtggtgttgtcatgggcaagtccggtattcgccacgcatacgaaaccggtcgcggaacgattgtgttgcgtggtaaagtcgacgttcaaactgaaaagtccgggcgcgaacggattgttattaccgaaattccttacatggtcaacaaagccaagatggtggaacggattgctgatttggtccatgaaaagaaaattgacggcattgtcaccttgcgtgatgaatccgatcgtgatgggatgcggattgtcattgatgtccgccgcgatgccagtgcttcagttattttgaataatctctacaaactgacaccgctgcaaaccggtttttccttcaacatggtggcgattgtcaatggtgcgccaaaggtattgagcctgaaacagatcctgcaatattatctggatcaccaggaaaatgtcattcggcggcggacgcaatatgacctgaagaaggccaaggcacgggaacatattctcgaaggcttgcgaattgcgcttgatcatattgatgaaatcattacgattattcgcagttccgaaaccggcgacaaagcaaaagtcatcttaatggacaagttcaatctgtccgataagcaaagtcaggccatcctggacatgcggctggtgcggttgactggtctggaacgcgacaaggttgaaagcgagtataaagatgtggaggcagccattgccgactacaccgatattctggctaaaccggaacgtgttcaccagattatttatgatgaactgcttgatattcaaaagaaattcggtgacaagcgccggactgaactgctggtcggtgaagtgctgagtcttgaagatgaagatctgattgagcaagaagatgtcgtgattaccttgagtcataacggttacgttaagcgcttggcaaccagtgaattcaagacgcaaaatcgcggtggtcgtggtattcaagggatgaacgtgcatgacgatgatttcgtcgaacacctgatctccacttcaacccatgatgttttgctcttcttcaccaacaaaggcaaagtttaccgcagcaagggttatgagattccagaatacagccggacggcaaaaggaatcccgatcattaacctgctaggtgttggtgcgggcgagaagattcagacagtcattaacgtccacgaaggcgacaatgatgaccgctatttattcttcgtcacccaaaacggtgtggttaaacggacaccggtcaaggaatttgccaatatccgcagcaacggtctgattgcgctcaacttgaaggatcaagacgaactgaacaatgtcattttgacgtctggacaggataacatcttgatcggcacgcacttgggttacagtgtggcctttaaggaacaggatgttcggtcaatgggtcggacagccaccggggttcgcggcattcgccttcgtgatcacgattacgtggttggctccgatatccttaagccggattccgaagtctttgttatttccgaaaaaggctacggtaagcgcaccgctgccaaggaatatccaattaagggtcgcggcggtaaaggtatcaagaccgcgaatattactgagaagaatggtccgctggcaggggtcacaacagttgacggcaccgaagatattctggtaatgacggactctggggtcatgattcgcttcaatatccaaaatgtttcgcaaactggtcgggcaacactaggcgttcggttgattcgggtcgacgatgatgccaaggttgcaaccatggctaaggtcgaaccggaaagcgacgatccagacgacagcagcaaaccggatcagccaaccgatccgcaagccggaccaactgatgaacatgcgcaaccggctgacgggcagtatgcaggcaatgccgatgaacaggttaacaaactgttagatcgtgcggagactgataaacctgcacctgacgatggcgatgaagcctaactgaaccaagatgcgttgaagcgtcaatgaaaataccgttcgaatgggtagtttgccagttcgaacggtatttttgtgcctcgtttttcacgcggctcgtagcttgctccccaaaatttttgatcgctaatccatttacgttaaacatcatagttttgacataatgtatagcagacagtgaaaaatagagcgatgagatttgaggggaagagttatcatgttaaacaatgtgagtttaaccggccgtctgacgaaggaaccagaagtgtttaaaactgctgctgatttggaaccagtgcgctttacgttggtagtgtgagcaattttagttgaaaagcacaaaataaatataatgatttttagttattttttcttttaaccatatgataaaacaccgctgcagcgattccacctatcataaggctaacaacgagcgcaacagggtttaaccagttgtttggactgacgaagatgttaccatataaatagatcaggattgaaaataaaataaatataccaataacggaatttttgttttttgcatttttcatagtgtttaatctcccttattagactgtaatatgtattatacagatttttttggaaagaaaagcgtttataatattttattaagatattagattaatacataggaaaactagttttctaaaaaataaagaaatggagcgaatatgatgacgacaactcttagtttgtacgatgccttaggtgaggatcaactccaaggtatcaatggtggccgtggtaaatgctcagcgaacgaagctaataaagcaatgggaaatgcttttgttggcgggttcgttggtggacttcccggtggattcctcaccgctctgggcgcaggtggagcaggtggtttagctacgggagcgggttactgggcgacatgctggtggtaaggtagtagacctgccggatgcgaaaaagctgacacgtatttgtgtcagcttttttagaagaatgattaaaaaattcaaaaggagtgaaactcaaatgaaaaaaatcattaaacttgcaatagctggatttatcggaataataacctttactctactgttgaatcctataagggtatctgcacacgaagatgccgacataccccaggtaacagaaaaagaatatttaaacaatataaatggtgtgaagcagattgactctgatcagtacttggaattagtcaatagtggggatgcttcttctgattttgtcgtttattttggttttaaggagtgcccatactgtcgagcagtttctcgtacgctgaagcagtttataagtgaggctaagcacccaatatactatatgaatatggacgagagtttcacggagacgacagctgatgactataaacaaattctggaatcactcagtccgtttaagtttcatggaacaccaactttcgcttatttccataataacaagatacgtaatatgttagttggatatccaattacacttcagcaattcacgcaaacagaagtaagcgttctgaataagcaacaataattatgctgggtggtatgaaaggctcactggaaatatagattttgacattgacttttgttttcttgattatttaggttctcagttggtctcaagatctgtgctaaggttattgcttaattctttagaaccgtttcaaaactacgtgggttgcatcagcatgtaaattagtatggtcaatcatgcgactgaattgatctaacgtataagcgggcatcgtaatccctccaaaaattgaattcgcttacatccagcatagcactttttgcgtaatgtatagcagacagtgaaaaatagcacgatgagatttgagggggagagttatcatgttaaacaatgtgagtttaaccggccgtctgacgaaggaaccagaagtgtttaaaactgctgctgatttggaactagtacgctttacgttagcggtggatcgggtttttaaaagtaaaaccggacaacgggaaaccgattttattgagtgcgtgatctttggcaaacgcgcactgacatttgccagctcgacaacaaaaggctcgttgatcgggattgccggccgaatcagcaataatcatttcgagaataaacaaggcgaacagcagtggcggacttcggtagtcgtcgataattttgcctggctggagtcgcgtgccatgaccgagagtcggcgtagtggttccatgcaagcgaccggaactgacggtatgccaccgggggcaccagctgaaccggcagaaattgctacggatgatttaccgttttagcagtagtaatccccggagatttatgctacaattttaattcgtgagtatccggctatttttgtagccttattactccttgctccggcaaacgatcggggcctaaagtccacaaggaggtgaatcgtcatggctgaaaccaaatatgaagtcacttacatcattcgtccggatctggatgaagctgcaaagaccgaattggttgaacgttttgacaatattttgaaggaaaatggtgccagcatcattgattccaaggattggcaaaagcgtaagctcgcatatgagatcaacaagtacaacgaaggtctctatcatatcgtgaacttgtctgcagaagatgacaaagcgatcaatgaatttgatcgtcttgccaagatcaacaatgatattctgcgtcacatgatcgtgaagcgggaagactaattgtaactttttgaaaggggcgctacggcatgcttaacagtgttgcattgacaggtcgtttaaccagagatgttgacttgcgctatacgcaaagtgggacagctgtcggttcattcactttggccgttgatcgccagttccgcagtgcaaacggcgaacgagaaaccgacttcatcaattgtgtgatctggcgtaagtcagcggagaatttcgctaactttaccaagaagggatcattggttggtgttgaaggtcacattcaaacacgtacttacgataatgcgcaaggacagaaagtttatgtgaccgaagttgtcgttgaaaactttgcgttactggaatcacgggcaaccacccaacagcggccatctgaacctgctaatccagcaggtcagggaaatcagaactatggcgggggacagcagtttggtaacaaccagccgcaaaatccgcctagctttggctctcaaggcgccccaagtaatgcaccatcatcgaatccgggacaaagcccggcagcaggtcagaaccaaggtaacaatggtaatgctgctaatcctgatccatttgccaataacggcaaaccgatcgacatttccgatgatgatctgccattctaacgtgtgacttttggtcatactatctagggtaagggatgcatgttaacccctttactcgcttggaatctttgatagagaaggaggaattctcatggcacaacaacgccgtggtggccgtcgtcgtcgtaaagtcgacttcatcgccgcaaaccacatcgaatacatcgattataaagacacgaatttgttggatcggttcatctcagaacgaggcaagattttgccacgtcgggtaaccggcaccagcgctaagaaccaacgtaagctgacgatcgcaatcaagcgagcgcggattatgggtcttctgccatttgtttcagaagactaatcaagtatttaaaaaggatgttcccgctaaaaagcaggagcatcctttttttggtgagcgcgagccggcgcgggtagggatcggagtgtaagcggccttgagcgtgatggccgggctttggccattgcgctcaaggtccttacacgcagatccctgcgccggggagcgcgttatgggcgtaaatcagaacataggtggccttgagcgtgatggccggggtttttgaccattgcgcccaaggtccttacacgcagatccctgcgctggcgaacgcgttatggaaaaatttaaattattttaactgggctaacattgcctgattgaattccggcaagtcatccggtgtccggctggtgaccaaattgtggtccacaacaaccggttcatttttgacaatcgcacctgcgtagtacaagtctggacggaccgtggtgtaggctgtcatcgtccgccccttggttaaaccagtctgaatgaagaattgtgggccgtggcagatggcgaaaaccggtttgtcatctaacaggaatgctttgacaaagttaacgaaccggtcgtcggcacggagctcatctggtgagaacccgcctggtagcagcaaaccatcaaagtcttcaggtttaacatcggtaatcgttgtgtcaatggttgccgttgcaccatgcttaccggtaatttgtttgcctgcttgtgtttcaatcaaggtcacatcatgcccctgatctttcaaagccttaactggtgaagtcagttctgcatcttcaaagttatcggtaacgagtacagcaatttttgccatcgaaatagctcctttcaagatatattactaatttagtttaacggattgaaggaattcatgcaaaatatagaaatattaatgaacatcgaacgtctggcagaacgagatgcttgttatagcgaacatgcgttattttggaaagacgttaagaacaaacgatagctaatatatcagtattcggtagcgcttcaattgaatataaaatcacaagcttatcgttatataaaaatttgatttggttctacaatgacggtgatcaggaggacaaaatgccatgatattaggattttgattatcagaggtgatcaaaatggggctcacattagcgacggttccactagcagttacgaatttatcgcggatgcagtttgcggtgaccgccatcacgcattttctgtttgtcacaacgactgtcggcatgttgctgacaaccatgatttttgaatttttatatgcttatggccgtggggatacggaaaaattcggtcggttgacgctgttctttagccgaatcttcttctttagtttcggtactggcgttgtgaccgggttgattatggaatttcagtttgggatgaattggtcggcattcacacggttgatgggcgatgtcgctggggtaccgttggcgattgaaagtatgatttcgttcttcatcgaatcaaccatcattggcttatggcggtttacttggggtaaattgccaaagcgcgcccatgcttggttaggggttggcatgttaggggcatcgctgttttcagtggtttggattattgcaattaatgccttcatgcagaatccctatggctttcacttggaaaatggccgcgcgcggttgaatagtttgattacgttgctacagaatccgcagtaccagccggaatttttgcatgttttatttgccattctgatcaccggcggctttgtcacagcaggcgtttctgcttggcagattctgcataaacgggatacagcggcgtttaaaattgccgtgcagatcgggttgctcatcgcgttgccagctgcctttttacaaccggctcaaggcgatgatcaaggagccgccacggcagcgctgcaacccatgaagtttacggcgattgaagggcgctacaacacggaaggcagcgccacaaccggagcgccatgggcaatggcagctttgatcaatgaaaaggatcggacggttaaggcagtttctattccgaatttaggcacttattttgggaagaatacttttaccggagctatgcctgggatgaacgtggttgctaagatgtaccacgcgaagttcgataagacagttgctaaatcctacgacgggcagatgaattattatccgccagttaccttgctgttttggacgatgcatctcatggtttatgcgggctatttcttcacgatgtttgctctttttgccacggttatgttgcatcggcgcaagtctagcattgaagctcaccctaagacgttgcgtgctttggggtggacattatggcttccgtacctgacgtttacttctggctggattgtggctgaagttggccgttatccgttcgtggtttatggtttgttgacgcaatacgatgcggtttcaccaagtctcacggttactgaagcggcaacgagtctagccatgtttttcgttgcggatgtgttcctggttagcaccatgatttatatttcgcatcgtacggtaacgcgcggactgccggagattgacggtaattatctggaagaacaccaaattccggatccatttgccaaggaggcgttcagtcatgcctagtctttcgaatttacaagtcatttttcttgggattattgccactgagctgatgttgttctttgtacttgatggcgctgacttcggggccggaatggcgaccttctttgtgggcgatgatttagcaaagcgtcaacaaatcatgaaggtaaccggtccggtctggggtggtaacgaaacttgggcagtcactgcctttgccgtgatgtttgcggcgtatccgggctggtattcggcattaacatccggctattacccgctcatcttcctcatgttgttctttttaatctttcgtggggtggcgtttgattatcgcaatcaatggcacagtcgccactacaatcagttttgggactgggcactgtttgttggcagtttgatgccgccgtttttactcgggatcgtgtttagctcgacagtcagcggcgtaccgattcgtaatggcttcgtctatgccgggatgggcgatattctgaccccgttcagcctattgggcggtattttagccgtcttgttaagcttgaatgtcggtttgacccgcgtgattaaaaaagtcaaaaaagacgttgcggttcagttgacggtggccttgaaacgcacgacctgggcactttatctggcggttggtgggtttgtggtcttgttgccatttaacacccgttttttcaccaatcggccggttatcgtctcactcctgttgctattactagttgcgtttcttggtgttgaaacctgggccatcttccgccagcgacaacggcttgcgttttggttaagcgttggaacgatggccagctttatttacacgattttccttggtgtctttccaaccttaatcgttggccgcacaccggggacttcggtaacagccttaagcgccaccagcggcccggtttcgttgctgtggacggcatggttattcggtttcaccatcatcttaatggtcggactacaagcgacggcctatcatttgatcaacaaatattatcatgaaccggcatcgccaatggtttaagcgagataataccgcgttcacggcaaggaggcgcgagggatgaagaaaatttggatcaacgtattttggggtctgttggtggtcagtttttggctgtatcaagtcttctggccgttattctggaacccgattagtaagttttatggcatggtcgttttatacagcatcgcagttgttgcattaggattggcgattcgcgcaacgctgaaaggctatggacgacaaaaagtttgaatgagaatattatcgacgtcagcaaaaaaggtcgctaactaaatagcggcctttttgatagcgtcacacagcgatatgttagccgagttgatagtccttaacctgacgatgcaagtctttaaattgctggcggtaatgccaagcgacaataaggataagcgaggtgaacagcagcaatgtaatattgcttcgctcaatgccgaatgtgccaccggttagccactgagtagaggtggttggtactgacctgaagaaaaggtttgtttcagaaaagcctaataccgatgtgccaaagaggatgcctgcagagatgtgccaagttgcatgaatagcactgcaaagccaaacctttccggaaaggagcgggatttcagacatcaaaatactaaacaggaaaagattcaaatcggcgtgccaatcaggttcaaagtttacggaatcaaataagacaacaaaagaacctttatcctttacggaacgaattgataaaggttcttctttcaagaaagatgaaagggtgtagtaccttggaaaatttgatgaggatttcccattatttgtactcgtttaccccttgtagcaacttgctcagggaaatagttcgtcccgtacaataaatctaccccattctgcttgtttttggtgaaagtttatttaaacgtcgcgaattcggcgataatcgttaaaatttcgcccggaatgacgtttaatggccgtttcacgacgtttatctgttagctattgacaaaagctgataaccattcgtatcatttggcaagcgtatttgatgccaagcgtgggcgctgatagatgcttgcagttgttgcggtgaaacatctgccggtaccctccaaatacgaaccaagcccatcaaccgattggaatattgacgtccgctagatagccgaatccatacatgataactacctggaagcagagcagaacaagcgcggaaagtaccagactgagacgttgccaaacatgagtggttgggaaaagctgtcgaatgaggatcaatattatgacgtcattcttgttccgaagagtacaaatataattattataataattttggatatttttcagaaaatattcatttgtgacagaggttgaatgtgtataagaagattcggcaattgtaataggatgtcagttgcaatgatagctcttgtttgctatcaattgccaatgtaaaaaaacagcgataatccctgtaacgacaaggatagaaaaatcttcagaggccttgtcttgatattaattctttttttaactattttgaatggtagatttatttaatgactgaatagttttttgaaattaatgaaatagacaaaggagcgctaatttgtgaaacatcaagaaagttcccttatcagaagaagcttttatatgctcgtattatatttgttgagtccatcgcccctactttttttgctgatcatgccttacacaaataatgtagtatcatcgctttcgctggcatttgcgtgtgttacgtcgagtgtcgtagtaatatatatggcctataaattatttcataaatacaccaatcaaaaaattattcagcgtgttaaactgagagatattttttacgtgattggtggctatctgaccattttaattagcaatgaaatcctgtcaaccttgaattatacgatttatcagcgtgtacaaacgtcaaataatcaggtcattgaatcatctctgttaagtcacaaccaacttatggttattcttcttgctattaacgtgattgtattgggaccaatcacggaagaattggttttccgaggaatcttaatgcatttattctttaagcaaaatcagttattttttaaagtgctattgagtgctctcatatttgcttctgcacatggtggagatacgatttttggattcttgatatatgttgttaatggagcagtgtttgcagttgtctacttaaaaactgggaaaatacaagacacgatcgcccttcattttgttaataatattgttgcggtatcgactatattatttctgtaattggtaactggctatttttaaatatggggttaggatggtcgcttaagtcaatacataccaatatctgcaaagcgattcatatgtctcgaaatcttaaaattttagactttgaaagatcgctgagattcatatctttcatggcgtaaaggtcaagtgagtgaaattcgagtaaaaaaagaacaaattcattcgtgccagaataccaattgcaagacaagcacgacagcagtaagaggcattcgtccttattgtcactcctagtacgaccaattatcctagtaagaattgtcaataccagacttcttactggatcgataaattctttgaaaagcgagatggcctacatacacgtaaataagggactgaacacagagcagtaagaaagtgtttattgaaacgctgtgctggttgattaattgctttgagagatcgatcccaagggtaatcggcaacattcttccagaaatctgaacaaactcaggtaattgcgttaatgggaaaattgaacctgttaaaaataataggagatacgaaataaccgactgaaaagaggcggtttttgtatacttcagtgttaaagcggcgagcagtaaggagaagccaaaaattccaatgcaagtaatgaaaaagatcggtagtagtccgatgtgaaatcctatgttcaagtgaaatatcaaggcaataaatgcaagaacgatgaaaactttaatgaaattaatgatgatccaaacagttgtttttacagtgagaactaattcgagtccggctggtcttagcaagagctggtctaatgtgcccatttgtttttctaaagaaatactttcagaggcttcaccgataatcgaactaattaggtaccaatatgcatacccgatataaaaagccgaatttccagcatcaatattaagaaaagtaaagactacgaagatgattatggtgacgaccatactggtaatttgatccgggaaataagttctaacttctgccagatatcgagaaaattcggctttaaataaatgtatgatcaagtctttcacctctcattctcgatcaaaagactaaacgtaaaagttcatcaagagatggataacgattttgcaccgcatgaatggtaatcccatgctcaagaagctttttaaggaattcttgttgatctttcaatgttttgaaagttgtcgtcacacgcttgccgtcgtcgcttgagttgacggttattgcattattggctttgaaagaaaaatgggatgaaaccacaacgaaaccaaaagaagaaaaggttttttggaattcttcataggggccgaagaatcgtactttctggttatcgataagaagaacatcatcgacaagtttctcaagaacatcagcttggtgtgaggtaaggataattgtcttgtgcaactgttgattgatttcctttatctgcctgattagcgtgcggctagcaacaaaatcaagtccaagggtcggttcatccaagaacagtaagctggcatcgctgactaaacaggaaatgagtgctagtttttgtttcattccccgcgagtactgaccaacgcgctggtcaatggcagatgaaagatcaaactttttgaaaagtgaattaatctcggaagttttgctggctggagaaataccgctgagattcaaaaagtagttgatattttggcgtccagttaaatagtcgtatagattatcaacagattcaagaaccgctgccacgttacgataaagcgctctgtttccgtatgcaatatgcttattttgaaaagtataatctacagtaccgctggttttatcaatcaggtttaataatatttttaatagtgtggtttttccagcaccatttttaccgagtattcctgtaattcgcccttcttgaatcgaaaaactgacatctaagagaacggttttgtcttggaattttttgtttaaatgattcacattaatcatgttcatttgtttaatcctttatcgtggcgagaatcagtggaacagcatttctttcaaattcatttttaggacaatgaagtgttccagacttttttatagggacaactccccaagcaaactgcaagggaattaggttaaacactaatggaaaagggataggatgttatttgagttcgttgagaagttcagatatttgggatcttctaaataattttccgctcatcactaaaagtattttatcaaatatataaaacgctttcaatgatattggcggcggactgtaaattttgctcatttacaataataatgaaaatcagaattttgataacaacaataaaatcgataatgagaaatcaagtaccgtatttttataactgctgagaaacccaataagggcgggcttcgtatccaacaagaaatactggtaagcatacctgcgtgcgacgtatcttaacatcctcctaaaatattaattgacaatgatgttcaacaaatgctaaggtgaaaatcgcttcataaagcgtaatgattacgatttaagaggcgagattgcttttatatcaaccaagcgggtactaactggcgctgtatatctatagaagcaatgaatccttgttggccgataaagaaacacacccgttgatcagttcgctagctttgtttgaaaacactggttaggaaccaaggctactcagactgaggcggcttatccggattggttgacgctaatgagggggttattcatgtttgcacttgtttgtttcttgatcatgttgccgatgatctttagtgtgccactgctgtatgtcgggatgatgccacgggttcgccagcaatcagcacttttaaccatgagtattgcgttaatgattgcgattgcctgttggttggtttttggtaaccgcctggcatttggttttgacttattacacgcaacaactttttcatcattatctgctggcttggtacaaatggatttttacttatatgcggttgcgatgttgatgggtacgatcgctggtaacaggaacagccgctacatgtttggctttgttccggtgtggactgtgttggtgtactgcccgcttgcacactggctatgggctgatcatgggtggttgcgacaattaggtgctttggacttttccggcggcattgtcgtgcatttgacggcagggttgacgagtttggtgctggcaaaagcgttacttccaggtgatcagccgagtatgccaaatgattttcgaactgattacgcggcaacgatcatgattctggttggctggttagggtttaacttagccccggcaggcagtttgaataagcttgccggacaggtgctgattaatacattcgtggccgtgttgatggcgatgatcggttggtattggctgacttatcggcaaaatggtgtggtgcagttaggcgatttgttgaatggcgtgctgtgtggtttggtaaccagtaccgctttagtcggatatgtcggggcattgagcatggccattgttgctgccgttgctggcgtgatttgtcggcagatggtttcaaaaatgcagcattcaaaacatttctatgatgtggtagattcttttgcgatgaatgctgtcggtgggatcacaggggctgttggcttaatgattgtccaattctttaatgggactcatgcaatagcgaccgcggggaagttcgcagtggttgaacttttagctgtggtggtcgcggctgggttgacggttattggcacaatggttgcgcagttagttgctaaggcgtgtgaagctggcgtaacacgggtgatgaatcttgacagtgaacggttgaattgacaaaaggagcgatttggatgaatcaaatgacgattattggtggtggagcagcgggcgttggtatcggtatcatgttagaacaacttggctgcagtcaatttcagattcttgagcaggaagaaattggcgcaagtttccgacgttggccaaaagaaacgcgattcattacgccatcctttaccagtaacggattcggcatgccggatttgaatgccgtcagtatggagacctcgcctgcgtatacgcttggtgcagagcatctgagtggttcacaatttgccgattatcttaaattgttggcggatacttacgcattaccgatcgctgaacatacgcgcgttggtgcaatttcaccgactactgaaggttatcaactcgaaacgaatcacggcgtcgtgaccaccaagtacttgatcatggcagtcggtcagtatgctttccctaaattaaccgatcatccggaaaacgtcattcactatcagcaagtgacctcgtggcaggacttgacggggaaaacccagattgtgattggcggaaacgaaagtggagttgatgcggctatcaatttggcaacgctaggccataaggtacttttgttgaccaaggaaacgggtctgaatgcggcatcggccgacccaagtattcggttggcaccgtacacacggcggcgattcttggatttgccagcggaagttgctaacagaatcacgttacaagagaagattgcgttgaagaccgtcacgcgcacccaggattcccagtatcaattgtggtttacagacggacgtacgattacgacgccgtataagcccgttctatgcacaggttttgatgccggcccgttaaaactctggccacaattatttgaaaataatgatggcgaaattgctttgaatgacgttgatgaatcaactcaggcgaaaaatgtatttgttgccgggcctgatgtacgccacgaggatgcgattttctgttacatttacaaattccgccagcgtttcggagtgatcgttaatgagatcgctaaacgggaacaatgggacatcggggactttgttaaaatcagccgcgccaatagtttctatcttgatgattgtgcaacttgtgatgttgcttgtgactgctgagggagcgggcatttagaggaggaagctttcatcttaagtcagtaaaatggcaacgcccacttccattaagttacttttgcgtcaatacacataaaaaataaccctctgaacatgtcttcaaatgacagttgttcagagggttatttatttcaacggtatttttaggttgggattcattggtgaggtcccaagacgtgatattaagggtgggtaaaaattaccggtggatgtaaacgtagctgctggcaccagagatggtctgggtgttaggaccggttggtgagctgaagcccataccgccttgagtgatcgtaacgctgtcgccagaaacggattgaacataagcaacgtgaccataagagccatcagctgtccattggccgccaacagattgaccagcagcgaagacgatgatggaacctgctgccggggtgtggttaaccgtgaagccggctgctgcagcggaagcgccccattcagcaccgttgccccagccattgcctgcccatgaagcaacagacttaacgtaccatgtgcactgaccccaaggataagtgttacctgaaccgctgtaatcagcatggctgccactacctgaagcagtgttgctgctgatcacagtagatgaggcaccgctgttggaagaagtgttggttgatgaggtaccagtcgaaagaacactgctgttggcactcttatttgaagttgagctggtagaacttgaagcagttgatgcagccgctgtcttcaaggcagcctgggttgctttggctgcttctgattgttcttgagcaaattgactttggagtgcaaccaattcgtctttgtgatcggcaatttctttgttcaaagcatcttgcttatcgcttgcggtcttttgaagggtctctagctgtgacttttgcgtttcgagggatgctttagtcgaaaccaaggtctgacgtgccgtttcctgttcactcttcaaagcggctaacttatctttggcgacggttaccgcatccaaagcgtctttgctggcttgacttaacttgccgactgtcatggtacgggcaatcaagtcagatagactttgtgagttcaacacgaaatcaatatagacattgccgctaactgaactgccggctttcttttgaagggaaatcaattgatccttcaagttgttcttccgggctgcgacgttcttttgagcagcggtgatttcgccactcaacgatgcgatcttggcatccgttgcactgatcttggcagtggcgtcactgatttcgccattctttgcatcaatctgcttgttgaggttgatcacttcagtgttagctgcttcgatttgctttaataaatcgttggtttcgctcttgttagatgcgatgctggcacttgtgtcagcgaaaaccggtgttacggcgctaacagaacccgctaaggtaactgctgcaaccaatgtcatcattgctttattgaatttcatgtttgacctcacccttaattaattaactaaaggctactttactgtgtcaatgttacgtcaccattacaggattgttaggagttgttctcaatcttcatctgggcgtcaaatttgcgtcattttgagcatttagtggcgatttttcgtgaattttacatgaaaaaagcagccgcgatccgcgactgcatgacaaaattgtaagttactcgtttgatttcagtgcctcgaccatatccacacgttgaagtcgccggtgcgtgagccaggtgacaataccggtaaaggccatcatcaaaagcgtggccgtgagataaccgatcatactaatcgtcaacgggaagacaacggcctcggtttcggcttggaatagaatataggcggttaaaagattacccagtccatagcctaacaggatgccgacaatggtaaggacgatactttcgcggctgatatacatcgtcacctcacgatcaaagaacccaagcactttgatggtggagagttcgcgaatacgctcggaaacgttgatgttgtttaggttatagaggacgacgaaggataaaaccgcactaagcaaaatgaagatcaggacaatcgggtttaacatgccgctcatgttgtgcaaggtctttttcgcggtggtggtgaagctgatgcccacaatcgcatgatgattcagcagacgtttagctaagcgatcgtcctgctgctgactttgcgagcgcagacgaacgagcagcgagtttggtgcagactgtttgccgactagttgttgatacgctgtggcagagagatagccaaagtgaccgacataatttttggcgatccctttgacggtaaaacgatgagcctgaccagcagtcgtcgtcacctttaaccgatcaccggtgttaagcttcagtgcttttgccagtttactggtaatgacaatgccggtacttggcagggttaaggcttgattggtagtcgttgaacgcagactgacgtaaggttcaagctgtttgccggttgtcggagcaaaaagattaacatcgctaatttggtgaccgttgctgcttaatttggcagtggtactgctaacactgacggcactacgataagcacgacttttttgcagaatcgttttggcagcggctggttgcttaccatctgccagtcggacgatggcttggtaatgaatcacgtcgccatattgtaaagtgccggtcgcggtaatggaatcctttatgccaaatccggtaagaatcaaggcggttccgccggcgatcccgagaatggtcatgacaaggcgtgacttatagcggaaaagattgcggtaactgactttttgattgaatgaaaggcgtgaccataaaggggtgatgcgttcaagcaggatccgtttggcggacttgggcgcacgcggacgcatcaaagcggcgggtttttccgtcagttcattgcgcaccacgatgatcgcagcgccaagagttgcgattaaggctaatagcagcgacaaaaagatcagtggccattgcagcgaaatcacttgcttaagcgggatgtagttcttatacaggcttaagacgatgcgcgggatgctgaagttgccggcaaagacgccgatgataccaccgagtaaaccggctaaggcagcataggccagatagttacgggcaatggcccatttgccatagcctaaagctttaaaagttccgatttgagcgcgggcttcttcgaccatgcgacttacggtggtaaaggtgattaatgccgcaacgaggaagaagaatacgggaaacacattggcgatggcggcaatgcgatcggctgaaccgccataatcgccgaagcccggtaaatcatcgcgggtttgccatgtgagactagtggtcagttggtggcgggccgttgcggttgcctgctttttgaaccctgcttggtaagttttgacggtttgcgtcgctgttgcagtcgctgcggtggcaggcatgccagctgcaactgcctgattggtggctttggtcatcgccgcctgggtcattttagcttggatggtcttggctaaatctgcttgcgcctgcgctttaacgcgttgcttgacctgtttcattttcgcagttacggcgtcttgataggctgtgctgaaagtgtcgcgggtttgtaagtttggaaagcggatgttgagctgcgaggcaacaggcaggttcatttgctgatcagggatatacgcaaaataacggaccgtgccatccccgatatttgccgacccgcggctagtgtcttcgatataggctggtgagtcagcaaagccggtgatggtatatgttcggtccttaagcccgctgctacgtgcaaacgtgtaatgctggccgagtcgatagccgctctttttagcaacggtgtctagcacgatttcatcacggtgcgtggggaggcggccactggtgaggtggaggcgattgattgtggccgttttttgatagccgtataaagcgacaacatcacttgagcggccaccgattgcatatttgaatttaaccgcttcggcttgggttcccttgactgactgtgccgctttgacttgggcagagctgacgccagtagttgccagcaattgggcatcggcgaggtgatcggctttaacggtcgtattcagtgagtctttgagagcgggacccgtggctttaaccccgacaaataaaagcacgccaagcataataatgatgacaatcgcaatgaagcggccgagtgaatcgcgaatgttacgccaaagatttttagttaatggtttcaaactgatcacctaccactcgatgtccgctaccggtgtcggtgccggctcgtcgtgaatgctgcgaactcgagcatcattgatttcaacaacccgatccgccattttggcaatcgcggcattatgggtgatgatcaagacggttttatggtctttgcggctggcatcttgcaacagctgcaagacctgtttaccggttttgtaatccaatgcgccagtcggttcatcacataaaagcagtttcggattcttcgccaaggctcgggcaatggccacccgttgctgctcgccaccggaaagctgcgaaggaaaattatccagccgggcacctaagccgacttgtttaagaaccgtggtgggatccaatgcatcagcgacaattgagccagccagttcaacattttccttagtcgtcaggttaggaatcagattataaaactggaaaacaaaaccgacattgtgccgtcgaaaagctgtcaattggcgatccgaaaaagttgcgatatccgtgccgtcaatccagacctcaccttctgttggcgaatccatcccgcctagaatattcagcaatgtcgatttaccggcaccgctgggaccaagaatgaccgtgagcttaccttgatcagccgaaaaattaatatcgtgattggcggtgatgacggtttcgcccatttggtaacgttttgattcatgttttacttcgatatatgccatggtagcctcctgaaaggtgttgagatagttcgcgcttgagtcaaacctacgctcaacacgttgttcatttaataacattatgttagattaaaaccagtcgttcaagcacagaatccggatatctgttgttaaatgaacacgttgtacagatcatgttggtttggaggttatgatgacaggcataagcaataatcggcgggtacaatataccgtgagccagtttaaagcggcgttgttgcaaattctggcaacgaaatcactggatgaggtgacggtcactgagatttgtcggcaagcggatctgaatcgaggtaccttttatttgcactttgcatcaccgctggcattatttgaacaaattgaaaccgatttattaaatgaaattcaaccgtatctcagtgttaaaatagatgacatgaccaagatgctagttccgattctcaaggtcatcacacagcatccgcaagcagccacgattattctgaccaatccggatagtacggtgttggagaaaattgtccgtccgattcagacgcagacgcaagcacgctaccaggcatggtaccgtgaagccgatccaaaacagctcgcttattactacgcatttttcgtgcaaggggcggagggcatgttaacgatgtggttgaaacaagggatgaaagaatcaccggaacaaattgcgaaggtgatcgaaaatgtggtgacaaaaggggcgccgcattgagcgagagccgccaagcgctagttaattcattaataggagaaagaaatgcaaaatgtaaaattaatcgccagtgacatggatcagacattgttgaccagtgaagggacgctgccgccgcactttgatcgttatcttcagcggctcaatcaagccgggatcgaattcgtggctgccagtggtcggccgctgtataccttgcaggaaacctttccgcattttactaagcaaatttcattggtttgcgataatggcgggttggtcgcctcacatggtcagatcatcggcaagagtttaattccagccgcagcgtatcgcgagattgtggcgtttatctgtgacaagaccgatggcgttcccgtcttatgtgccttggacgctgcctatattaatgcggcagatggccagtatgccccggcactattgccgttttatcatcaactaaaaaaagtgcctgatctgatggcggcttccttggaagtggacaaagtgacgatttacttccctaatgccgatagtcgtgtcaatgcggaacggtatttccggccggcttttggccaaaattacacggttcaagtgagcggcgaaacatggttggacattcagaatctgggggtgaataaaggtcgcgggatgcgcattttaagccgccattttgatattccaaccgcacaaatgatggcgtttggcgattatgataatgacattccgatgttagagacggtcggatacagttacatcatggcgaatgcgactcaagggatggcgcagcacgcgaagtatcggacgcgcagtaacgatgagttcggggtcttgcatgtgatggatcaagtgttgcaggcgcaggaaggctagtaacaaatatggcggagattttgattcgtgtggtgatcgggttttatggttttttgatgctgctcacaatctggcaagcgggaaaaacgaaccagaacgcctcttacttaaaccagctattcgcactggccgctgcgctagtcctgacagcggctgttattcctgacaaattcagcgctttggtcatacttttgatcgggttattaggtctgtcagcggtttcgtggtttaatggcatccgattgtatggcaggccgcatataaagcatcatttgattaggttagtcgttcacttaatcttatttggattagcaatgtggttgctgtgagcgtgatggctttttgtgcaaccaaggtcaatgcaggtataaaaatacagggagtatgatgtgttctcacaatacttccctgcaaaatcgtgattacaagctaaacgccgccagtactcgctaaagttcatgcggcgtttttgcttgcccggatgaacgataaaactaggaaaaatcaaagataagcctgcgcaaataactttgccgccagcaggaaggccagtgctgcaataatgacgcgtaataattgaaccggtaagcggcgggcgatgatcgggccgatgtagccgccgatgaagagtccaatgccaagcggaataaccattaaccactcgattttagtggtgaaagcataaatgacggtggcaatggcgttagctgcaaagccggtcagattcttcatcgagttggagacaataaacggttggtcaactgtcagggtcaaagttgccagcatgaccacgccggcagcagcgccgaaataccccgcgtaagcacccgttacgaaaataacaatggtctgtgcagcttcttggcgaaaggttaaggtcttcaccggctcgcctggacgatgctcctgagtcggtagtttaccgctgaataagagtaaaagtcccgccgcgatgatgaaaaatggcacaatcttttcaaatgtcgaagccggtgcaatcaatagaagagcactaccgaaaatactaccgagtgacacaatcagaatcagacgccaaagaaatttaccccggccgcgcagttccggcagtgaggagacggctgaaccaaccccagtgaagacgagtgccgctgtattggtgacgttagcaatgactggtggcacgccgattgcgagcagggctggatacgagaccagtgaagctaaccctgctaacgtagcagtgagtccggcaccgatcccggcaaccagtaaaaaggcaaagatcgaaaaagtcataattgctgctccttcaggaatttgtatgaatgtcagccaacatagtgcgcaacaccatgtatcaggattgcataggtacttataagctggcaaacattgctagtctcatcatacgctaaagcacgactatttgggggtatgataaaaggtaaagaagggacagatgcacatgtttgaaaatagcaaaagccggcttgatgccatttcggatggcgtattcgcggttgtgctgacattgatggtattagatattaaagtgcccaaaacgctgactaaagtggacctttacgcaaccgggttttctgtcgtcatttactttatcagttttgcggtggtcggccagtactggatctttcaccaagaacttttgcacactgttcagcagccaagcaccaattttttggtattgaattttttctatcttgtgttcatctgtttagtgccgtttgcaaccagttttatcagtgaccatccaggtagccgtattagtgcgacattatttgcagttattatctttatggttgatctgtttcaatttattttgttccgattagtcattggcgagcgaccgaaaaaagaaaatttaaatgctcatgattgggaggaatatcgcgctgcgtcactaatggtacttgttgccgttatttatattcttgtaggtttactgttgcctaagtggattcttgttgtgattgcgctcggtttaggcgcccgaacgttgaataataccattggacatcgacttcaacatcaaggcaagactcaataaaacgacgcctttataaccatatatttttaccaaactaaagatcgccccaaaccatctgatgagtgttttgctaggatcatcaaatggccgattttttacgttgcgtaagtctgtgatacgatgaggcagaaacgaggtaactacgaatgcatgtagcaaagagatgacggtcgttaagattaggtcaaacaaaactggctaattcgaaaacagtccaacattgacacctattaaaggtaaaggagcgatttcatgacgattcaagataaaatgcatcaaggggcgttgtatcaaccgatgaatgcagatctgcaaaaagaacagctggcggcaattgatcagctggcgatttacaaccagattccggcgagccatcaagcagaacgatttgcccaactcaaaaaaatgttcgctgaaattggcgctaaaagttatattgaggcgccgtttcattcaaactttggtggggcgcatgttcattttggcagtggtatctatgctaattttaatctgacgttggtggatgatacccatatttacgtgggcgatcgcaccatgttcgggccaaacgtgacgttggtaactgcgactcatccgattgatccaactctgcgcgaacaaggctatcaatataataagccgattcatgtgggtcgcaattgttggtttggtgccaatgtcacggtgatgcccggggttaccattggtgataatactgtcatcggcgctggcagtttggtcaccaaggatattccagccaatgttgttgcattcggttccccttgtcacgtggttcgaaacattacggaagaagaccggaaaacttacgatcacggtaagccaattgacctgtagcgaggcttagtcagcccaggttacttccgcaaagctcaaaataaaggttttgacggcataacgatttagccgagcagtcgtctgcttaagttccgcctgcgaaacaggggagggcttgacgtaataaaccgttccttcatcgtcatgactatacgcaggggcataagcattttcagaagaacgctgaatgcgggcgcaaaacgcactctgaaaataaccgttcattagcagctttgtcctgacagccattattggggttagatggccaatgacgaagagcccgataatggtataaataatggtcgcaagtttctgattaagtgtcatcttttttaatttggtcataggttgtcctcgctagcatgattttagcggcttgatcgaataggagaaccagttgtgaaagcaacaaacgatgatatgggtatgtattggtcagctaatatgtgtcaagagaggtacacgtataaaatagcgccaactcgaactagcatcaaggcgaagttttttggtcaaaaacttttaacgcaaaatgggcatggattacaaaaaatcactagtccagccccagcactcggccctaccagtgctatgataaaagcaactgaaaggaagcgtgtctatgaatcagtttgtgaaccatttgagttgtacagcattgcttgttggtaagaaggcgtcggttgatggctcaacgatgattgcccgcaatgaggatgcggcaggcgggattaatccgaagcggtttatcgttgtgaagccggatgaacagccgcagcggtatgtgtcaacgtttaacggctttcaattggacttgccgcagaacccgctgcagtatacctgtaccccagttgccgacacgagcgatggtacttggggtgaggccgggattaacagcgaaaatgttgccatgagcgctacggaaaccgagttcacaaacaccacgatgctgggattggatccacttgagccagatggtatcggtgaagaggctatgctgacggtggtattaccgtatattcataatgcccgagaaggggtgcagcggcttggcgaattactgacgaagtatggcacctgtgaaagtaacggcattgccttttccgatgctgatgaagtctggtattttgaaacggttggcggtcatcactgggcggctgagcggattcctgatgatcgttatgtattggcgccgaatcaaacggggattcaggagattgattttgatgcgccggatgatttccagtacagtgccgacttgaaggcttttgctgaaaagtatcatctgaataaagcgaagaaaggctttaatttccgcgatattttcggtgaagatacgcaggcagatcatttttataataccccgcgtgtctggtatgcccagaagatgctgaatcctgaagttgaccaggatccggaaagtcggaccatgccatttagtcgggttccgagtcatttgctatcggttgaagatgtggcgatggttttaagcagccattatcaagcaaccgagtttgatccgtatgggcagacagggacggccgaaacgcggcatcgttatcggccaatcgggatgaatcgtaatcaggaaatgcatattttgcagattcgaccgaacatgcctaaagcccatgcggcgattcactggctggcagaaggcgtcaatatcttcaatagtccggtgccattttttgccaactgcaccacgacgcccgagaatttccagtacaccccgactgataaaagttcgactgacagcttctattggctgaataagttgattgctatggtggcggatccgctgtttgccgaacataactgggatgccgaagtggcggtttcagaaagtcgcaagttcggatttgcggccggacgcgcggcggtggctaagggagacgcagagtttgcagacgtcaagcctgaagatctgccagcgtggcatgacgaattgaatgccgaaaccgcagccacgatcaccaacgacctccaatacttgctgcatcaactggtttgcatccgcgcagaaaagatgacgccgacttttgaaaaaggcggcgaactatagcgctaatctgacacacttttaaaaattgaacgcccggccacactgacggattttcatcaatgcggccgggcgtttataatgatcaagaaatctatcaagagaatagaaagaaggtcttctcattaagaatacaaaaacagaacgctggatcgggttgattgtcggcttgatattaaacgcagcgggtaatggactttgtatcgttggggcgatgggaagtggtttgtggaccgccgcggcgattaatctcaatgactggcagggatggaatatcggtgcggttttgtttacatttggcgtgctcaatgccatctccaacttaattttgattcgacagtgggactggccacgattcatcggtgaggttatttatacgctgttcttcagttactttgtcaatgttttcacgtggctatttacttggttgggtctgggaaattggcctgtcatcgcccgaatctttgtttcctgctttggcgttttctgcttttgtgttgcgatttcgctgtatcaacgcgcgaatatcatcatgcatcccaatgacgacaccaccaatattttgcgcttcctgtactttaagggtaatgccacggcgtcacagttaaccgatttcatcccaccgatcattgtcacggtaattgcttgggcggcgactggcaaactgttagggattaacattgccacattattctcgtttcttggcaatggtgtcatgattgcgtgggctgacgagcatgtttggccgcaactgcaacataactttaaggttaaagctactcgatagaaatgacgagatgaggccacgagggttaacttaattcaaatagcttttatggattagtcaactctaaagatttgtttcaaaagatttgattttaagcaaaaatggctctaaattggcatagaatttggagttcagagggagctacaccgtttttggcacttattgttgcagacttacaatcacgtgattaagcacggctacagcagaacagtttctctgagtttgtttttgttacaactctaattttacgttcacaccaagaagtttcgggatttgaagtaagattatatagttcgcttaatttaatataactgatcttgctttgtttaaacacgggagatctccacaacgattggtataattggaggctggatgaggtttactgctttatacgctaggtgacacaacttgcaataatttagggagaaaatatggattacatttatatcgtgccacacgtacttgtgatgttagttttttctatcacgttaagaattaagaatgaaatgtttaaaaaagagcgaatagaacgaatagcggcatttaaacggattgactctgacgggagtgtcggcatggagaaagacggtgatgagagtttgaacacgctcgttggtcgaaatttgtatattgaaagaatgatgaattctcaaatgattgggagctatttggccgtcattttcttttctgcaggggttatctatgggaacacatctacagggcttcttcttttaccaagtatcggggtcttcctcctctttgctaatgtgatttttctgggtgaagaacaagttttccgcgtcatcaagcagagaaaattggaaagactctcggaaaggtacccaagcttaatgtgtgttcgaaaggttgggtcaaaatggtattatcgctaccttttactgcttgtcgtagttgggggactcaacttcgctatattttatgctgctgccgttgtcttctactaaagcgttgaatcagtcgcttctcagaatttgatgcctattggaaccctaatgctgttgtggaacaagtaagtaaaacagttccgagtcgtgccaatctccggccggatggagtgagaatgcggaaccagagcggtgctgacaaaaaccgggtcgctgcgttgtttcgtcggatgagcctatttggtcgctatatcagtctcaacggacacttatcttgacctgtatcgacttacataagcaatgcttgatacggaattgtatacttcatcttggaatattcgtcagagagagtctatagtgatgagatcgggagtgactaaggtatcactgaatctgagacggttctagtcagaacaacgtaattttgtcacagtaaaaaaggctttcagattttcctgccaagatacttaaatgtgttttatctgagtgattctgaattttttagccgaggacagaaaatgtttaaggaaaggaatatcaaaaatgaatgtctatataccctttattgagatggtttgtatctgggtgggcgcttctacaattatttcaattctcagaggaaaacagaaaaacaagttactccaagaaggcaaatatacaaatgaaagttactcagaagctagaaagaagatgcaggagcttaccacaaaggcgtcaaatcagctttttaatcgtgcttataacatcattattgtttggtattttttcatcgttgtgttttcgttaggagcaataacggcgaatttttcaattgcgcctgttatttacttaattgatgcgatcttcttttttgcttttgctgttattaatcttggcgcatcatattatactcaaaaagtgaggagaaaaataaatactgagctaccagaaattaagtgtgcggtgaagatactactttttatttttcgggattttggcacggcgttagtatttttggtttcttatttgcaggcttaagctgactatataagtgttgcatagcgttcatttggaatatttttgtcagcgttttttacatgaatgatattggtttgctacatgaagaggacaggtcgtaattctatctaaaattttgacgttgtttaaaacgcgaaaactggggtggaataaactattaaaaatagttccaaacctcgcaaaactgcacatgtaatttcaatgcgctgtcacagcgttccagacccagctggccagagattgcgaaggttggcacggcctagaacgcttttgtcgaacgatttttcaataattcggcgtttcagagggtacactgcacggtcaaaaattgtggtgcggcctcaaaaaaaaggcacgccagctctcgtcggtgtgccttcctttttaaaccttgacctagttagtcaactgaaacatcttaggaatcgaaagagaacctcacataaagaatgtttccgttaactgcatctgtatatttatttacctgttaatcgcctatttggtctttttcccctttaatgccgcgcaggaacgttcctacagccccgcggtctacgcctctagatatacttggtgagtaatagataacctcatcgttaaggcgttggaagaacaagccttttcgtccatacaagttataaaaatagacagttcttggaaatgtgctttttgaccagatcaaatggtaggtcttgccttctaaatgaactatcgtatcatgctcattccaaaactggataacgttagtctgtccaaacgtagaaagtgatgtttgatggacactcatattaaacaaaaacaggctaacatagatacaaatataggttaaaataacttgtagtcgaggtcgctttacctgtttagaatttagacgaatttcccacagagtcagagctaaaaagagactaaacatacttagacctaagatagtctgaaacatcgtccaatttgcaaaggcaagtgacaggaaaaaaagcacaagaactatcgacattgcatataagtgtctccagtaaaccatcaaaatcgcttcctctagcaaatttcgtgttcagtctcacaatttattttcattaatgttccaagtgaccctggatcatatttttaaatacgcttgctgccatcgttgcttgatcaggcgaatacgagacttcgaatttatccttgaaagcattcaatgcattgccaaactcagccgtctgagccaactctccatcgggatttaaaactcgaagtgcatctgactcaattttatcatgattgccggagaaccggtttgatacatattgattaaagcgttctgtattccccttgttgttgtaatatctgtcaataatcgaatacagggaggcattcccattttttaagctggcatagatattgactgcatccgcatcagctaacaagtcgcctactccaaatgagctttttccctttgatgcatctttgccaatatgatcttccattgcaacaagtaagttggcatatttatcagccgacttaattgaatccgaaatcccggtcaacaaatctcctgcccatccagcaagatcttgtgtcccagttgctgaaacggcagcattaaaattcaataagctagctaatgctgcaatcatatgaataaagtcagtcttaattcctgtcgcagtatcggtcaattctggaaaatcatcgtcgcttgtaatattccattttttgttttcattgtatatccatgtgtcattcagtgccccggtcataattgtccatggtaagcttgcatacctaaactgccgatacaattggcaaattaaacgtgctgccatcagtgaatctggcacagtgttaccatttttatccatattcttgacaaatgcatcggcgtcatcttgtacctttttcaggtagttaaagaactctgtatttacctctttcacagatgaactaacatgcgaaactccttgatctttgcccgagcttgcatcttggtcaatgctaacgccatatattgggtattctacgaactgatcgaatgcccaattacttggcatcttaaatcctaggttaccgctccagccatatgacatattagccacgaaactatattgaataccatgttcttcagcatgtaaacaaacgtttcgcgtgccgtaaatcccagttttataaatagacccctctaaggcattttgtactgcagtaatatatgggataacagtcccctcaatgtccccttcctgaaagtcaacatcaaccgcaaaataaacaacagttcctgatggcaatcctaactccaatgctgccgcaactgcaatctgggcatctttccgtccttgactcgcagtgaagtatgtttcaacgtatccaccgtcttcataaattggaaagaacttcataccgccatcaagaatcgttttgatttctgttggggttaggttcttgggtttaaagtcagtaccgactgtgcctgttagataacgaccgacgatgctaaaaccatagtctcgaaaatgtttaacatcttctgcggtcaattgcgttgctgtgtctaatgcgattgaatcacgaccggtatcaccattgctggtaactaggcccttaataacagtgtagtcagcgatgccggaagtttcgttagggtatttcataaacttccggaagcgaatgatgctggtggcgacgtcgcttccaaagctttcactgaagtcaccgctgtacatgctatttaaatacaagccatatttgacgattttgactaacaggccggttgatccgactgatagctggacgttctttaatgcagcattggtggcatcaccgaaattaccgtttgcaacatcagcggagatacccacggctcgctgtaaggcgtaaattagcccaacatttgtatcgcgctgataaataccatcacaaggcataataccgagataagtgctgtactcggcatttagccactgttgcaattgacgaacatttgcatcgccgccagaaactaaaacaaaggtactcatatcgaaaagtgcagccattaagttcacagtcacagtgccatcagcggtcagtccggcatcttgttgaagtgatttaaaagcttgttcggtttctgcagagaaattctgattcaattcggttccaggattgatacctttgcaccaaaatgctccttgaatcagttgagcaatgttacctttatagcccggttttagctggtcaacaacaccagaaagagcggttcgagttgcggtgccaaatccttcaccgatgctgctaatacctaattcgtgttgcaatgcttctcgcaaggcatagattgttgcccaaccagtatgcccatctgttggcgccggttcaaatcccggaatacctgtataagtcttgttgagccagttttgaactgctaatactgcttcatctgccataatgcagacctccttaaagtttgtcgttgaaccaaacacatgttcgtttcaacaatctgagtatgttctgactggctttataaatcaactattattttttaaaataaccataattgttaacagacatcgacttgtttatataccgtgtagtgtttttttaaaaaattaaaaaacgaacacacgttccgtatagagccgcggtatttttgactgtctaattttttggctgactaaaattgaaataattgaaagatccgccacaactttttagattagattccggttgcaacccgcttagtaaatagtacactaacattaatatactaaaagcggagggaacaggatgaatgatgagctgacgattcgaagcgggattcgcgatgtgatgccgacagtgtttgggtacattactgtcgggatggcttatggcattgtggcgaaaaccgggcatttgtcgctgctgatgatcgggctgatgtcgctgatcgtgtatgccggatcagctcaatttgtgttggtgagtatgttggccactggcagtccgattggagcgatggtgatttcaacggctttgattaatgcgcggatgagtctgatgtcgatgacggtcgccccttatttaaaagatgaatcgatgacgcaaaatgtgctgatcggtaccttgctgacggatgagagctttgcgttgtcgatgaacaagcttaattacaccggccatcatttaaatgctccctggtttcataccgtcaatgttggcgcctatttagtctggtttattgccagtcttttaggagcggtgattggtggcttgattcctaatcccgataatttcgggttggatttcgcagttgttgcgatgttcatcggtttgctgtacttacagatgattacggatcgatcgaagccttttttgcggcatttaagtgtggctggtgtggttgcggtcgcgatggtggtgctggtgcgttacttgccggggacaacggcgattattgtcgcaaccgtgattggctgtctgtttggaatgggggtggaacggcatgcagaatcctgaaacatttgtggcgattttgagttgcgggctggcgacatggttattgcgggtggtgccgattgtcttggtaaaacgcatgacgattcctaagtggctgctgcattttcttagctttgtaccggtggcgattttatccgcgatttttgttgaaagtctcctggtgattcaccccggacaatggccaggcgtcaactggtcgaatttactagcatcgctgcctgcgatagtcgtggcgattataaccaaaagtctctttgccgtcgtggtcgcgggcgttgctgcaatggcgattttacggctgctagggtgggcttagccagcacggtcatcttttaaaaagatggctttttaaattttattgatagcagcaaaactctgatttaacggcctcaggaaagctttcttttagtaaaaataagagcttcatattgggttaactcatatatcagaatttctagtgccaaacaaaatagccattgacaagttttactaaaataagtacactacaaggtgtaagcgatttcagaaaacgtactctttaaaacttgaaatggaggctttttgcatggagacatcgttgttatacccagtgaccaatgatcagcgcacggatcagaaactggatggactttggcaatttaagtttgatgaagctggagaaggtgaaaagtccggctgggagaccggttttcacgatggcgtttcgatgccggttccggctagtttcaatgacttctttacggataaagcaagtcgtgaatataccggtgatttctggtacagtcgtaacttttttgtcccttctgcggctaagggaaaggcattgtttctgcggtttgatgcggtaactcaccgggccacgatttttgttaatggcaaagaaattcgaacgcatgaaggcggctttttaccatttgctgccgatatcagcgaggccgttaagtatggtgctgaaaataccgtggttgtcaaaggtaataacgaattgtcgcgggaagcattgccggccggggatacgattacgctgcggaatggtaagaaaatggtacgcccgttctttgacttctataactactctggtttaaatcgctcggttcacttgttgtccttgcctcaagagcgggtgttggattacaccactacttttgcgttagctggtaacgatgcaacagtgaactatacggttgaaaccaatggcgacgcgccggtaacggttagtctggcagacgcggatggccaggtggttgcgactgctcaaggcaaacaaggcgccttacaggttcaaaacgctcacctatggcaggttcgcaatgcctatctttatacgctgacgattcagcttggcgatgatacccagacaccgcttgatacttacaccgatcggatcggtattcgcacgatcaagatttccggaaccgatattttggtcaacgacaagccgatttatctgaaaggctttggtcggcatgaagattcaccatttgctggccgcgcgtttgacttaaatgttgaaaagaaagactttgccttgatgaaatggattggcgcaaactctttccggacatcgcattatccatatgacgagcaggtttacaagatcgcggatgaggaaggcttcctgctgactgatgaagtgccggcagtcggctttaaaatggccgctgctgcttttcttggcgggctgaaccagtccttcttcaaagggccatggctcaagaagctgcatgaacgccatattgaccagattcgtgatttgatcaaacgcgataagaaccatccgtctgttctggcatggagtctgtttaatgaaccggatacaattgatgaaaatgcggtcccatacttcaagcagatttttgacgaatctaaagatcttgaccctcaaggccgcccgcggacgtttactttgagcgaagatgatacgatcgagacgtcgaaagtactcgacttcccagacttttacatgcttaaccggtatccaggctggtatcattttggcggctatcagatttccgatggcgaggctggcttgcgcgatgaaatggataagtggcaaaaagcaggcgttaagaagccagttgtctttaccgagttcggggccgacaccgaagctggcttgcataaattgccaagtgtcatgtggaccgaagaatatcaagtcgaagtgctgaaaatgttcagccgtgtcttcgatgattatgacttcatcaaaggcgaacaggtctggaacctggctgacttccagacggttgaaggtaacatgcgggtcaacggtaacaagaaaggcattttcacccgcgatcgccaacccaaagccgcggcgttcttctatcatgatcgctggaataagctgccgctggattataaagcgaagtaagttttgggtgaaagtatcagcagtaacgaaattctaataatagcgttgttggtgtagacgcagaataccaatcttggctgtccataacgggcggtaagattggtatttttgcgtgcgcgtgaatgcctaaaggatgtcctgacttaatctcccaaaaatatcagcaactattttaatcgacagaaaattgacaaaccctgcttaaataggccgtaatggcaaacaattggcctaaaccattaaaaaacatgcgacaaatttggcaaaaattattgttgttaatccttaaacatgtatactaatatatgagtttaacaagtaagcgcattcagtaagtgcttttatgcacggttactaaagggggtgccgcgttcaggcaaagaaagcaaccggtaaacgcagacggaacaaagacatgggaggcaaatactcaaatgaaagcaaagctgattggctcaagacctaaaagcagtagatacacattgctttggtccggtattgtcatggcaatgatggcggtatcactggtaatgttgctgacaatacccgctgcaacccgcgctgcatcgcaaaacccggaagacacggttgccgttcatctcgatgggaacgacattgcttccaacaacaccaacggcctgacttttaagggcttcggtgtcctgagtgggaacggtactagtgcgctgttgatggattataaatccgagcagcccgatgtttacgccaagatgatgaagaccttgtttggcggcagtcaacccattatgaccaatctcaaactggaaatgggtaatgaccgcaacaactccactggttcggaaccggccacccaacgtacggaatcagaagctgccaatgtgacccgcgatcaagggttccagttagtggcagatgccaagaagattaatcccaatctgaaggtgacaattttacgctggaacgctccgggatgggccaaaacaaacgatcagatttacacttggtacaagaactcgattttgaacgcgtatcgtacatatggctatatggtcgactatgttaatccggggttaaatgagcataagccggatctggcgtgggctaaagaatatgcaaagcgcgttaaaaccgataacaccggcttcaagaatgacacagaacgtcaactttataacaagatcaaagtggtcatttccgatgaggtcggcgttggtagttttggtaaggatatggtcaccgattcatccttacgaaacgcggttacggcagccggctatcactactcaaccgaagatgacagcgctaagaacttcacggcacttgctgataagtacgacaaggaagtgtggaatagtgaagctcaggccacttttggcaactccgactaccggcctaattcgggcaccggaatcggtggagcaggtagctcattagaaatggccaacaccatcgtgaaaggctttaccgattcacggcggacgaattttatctatcaaccggcgattgcggctttctatgaaggcggtcaatactcatctaagagtgtcctgcaggcaaccgatccatggtcagggtggacgaatagtgatgttgcgattgatgtgcttgcccaattcagtaaatttgccaaacttggttgggaaaatagcgacaatacgtctggtatctggcgcgccgtatctcaggcaagtgtttccacggcaacgggttccaataatgtcaacggccgcaacggtttggctaactatttaacccttgcttcaccggataaaaaggatttttccacggttatcgtcaatgatagtaagtacacgaagcactatcagatctcggcttccaacatggcttataaaggaactccgacccttgaggaatgggaaacacgggcagctgatacgactgcaaaagatgcgtatgacagcaattacctcaaacatgttggcgatgtccaagctgatagcaaaggtgtttataccgttacggttaaaccattttcaatcaagacggtcaccacgcttgataaggcaaaggattccgatttaaaccaaggcatatcggcttcatcgaacaagcagcggacggtacttgataccgatgccaatggtaaagggactgacacctcagacacgaccttgtatgcagataactttgaatatggcggtaagaaagttgccacgctgaatgctgatggcactagcaacaccgcaaagactgaagacttcataacatcgcgcggtggtgacgaaggcttctatccgttgtatacatttaatcgtaatgggacacttgaaggctacaagacgacaaatgccaagtcaggtcattacgttttacgccagcagttggactcaacggtggtcgaaccgggcggggcttggaacgatggcgatgcgttggcatggatcggcgacaatcgctggatgaattacaaagccagcacggatgtctcatttgaagataaaggcacccatggcagcgcaaattatgcttcgatcggtgcacgtcagcaggctgattcaggcccggcagcctacctgaaattctggcaggatggtggctggtcattgcatatcggcagtcagtcagttgcaagcggcaatgtcgccaccggtcaaggcggcaccaagatttccggcttcgatacaacgaatacggcttggcacaatattgccattcaggcagcaggcaataccatcacggcttccattgatggccaaaaggttgctgatggcaaggtcacgtctgagctttccggacgagtcactttaggcagcggctacttccacactgactttgataacctgaaagttgaaactgtcaaaggctataccccgtactattcgcagcaaatcgatgacttagagatgtacgacacatctgccacaccaaaacaacaactggtttataacgatcactggacgcacgaaaccggacaaggtatgtacttgcgggaccggacagtttccaagaatacaggcgccggtgctacccttacgtatacgttcactgggaccggtctggatatttgtggcaacaatgatggctcagcgaagttggatgtgacggttgatggcaaacaagtcgcaacagatgctgcaaccaacaaggctgacaatctcgggcagacctacacattacgaaatttgaagtacggccagcataccgtgacgttcactgtcaaaagcggtacgttagcagttgattatgtcggtgtcgtcccaagtgacaccattgccgatttcagcaagctgcaaacggcgtacgataaagtcaaagatgtcacgaacgctgataacaagtacacgtcatcaagttggacatcgtttcaaaaagttttattagcagcaaaaaatgtccttgcagacacgacggcttcgcaaaacgatattgatacggccctcaaaaatctcaacacagcatatgccgccttggcgcttaacccagacaagacaaaactgcaaacggcttatgataaggcaaaagctgtgactaacccaagcgataagtacacggacgccagctggaaagtattccagaccgcattaacggatgcgcaggacgttctcgctaacgccaacgcaactcaaaatgatgtcgacagcgccttgaagaatctaaatcaggcagcctctgacttagtgctgaacccagccaagccagataagacgaaacttcaggctgcatacgataagaataaggcggttacgaatccagacgacaagtatacaagtgaaagttggcaggcattacagacggcgttatcagatgcgcaaaaggttcttaccgacaccaacgcaacccaaaatgatgtcgacagcgccttgaaaagtctgaaccaggcagccactgacttaacgttgaacccggccaaaccaggtaagacgaagcttcaggctgcatacgataagaataagacggttacgaatccagacgacaagtacacaagtgaaagttggcaggcattccagaaggcgttatcagatgcgcaaaaggttctcgctgacaccaacgcgacccaagacagtcttgatacaaccttgcaaaagctgaataacgcttatgctggcttaaagcttaacagccaaaaaccagataagtcggcactacagacggcttatgacaaagacagtacagtgaccaaccaagctaataagtacacgaccgcaagttggacaaccttccagtcagcacttgctaatgcgaaaaaagtgctggcagacactgacgcggttcaagcagatgttgatacggctttgcagaagttaaataatgcttatgacggcttaacccttagcccggataaatcggcactgcaaacggtactcacagaggcacaaacgctcagtcattcagcagtaactggcgaccacgaaggtaactacccagcagatgcgcttaaaaccctccaagttgcgatcgacaccgccaagaaagtcgcggataaccctgatgcttcaaaagatgatatcgacactgcagcatcgacattaaaacaagcggtcacggccttcaaacagaccgttgtgaccgttaaccgcgaccagctaacacagctcgtcaccgagtcgcaaaccttgcgtgccgatgattacacccagaacagctggacgccttatcagcaagcagtagcagcagcacaaaaactgttagcaggtaagccgagtcagcaagaattagatgcagccgcaaccgcactgaagaaagccaaaaccagtcttgtcgcagcgccaacaggtaagctgccatcaacaggtgatgcttcatccgaaagtgccagttctagcgaagaaacagcttcctcatcaacagccaagtatccaagtacaggtgaatcacagctgtcactggccgttacgatggcagcagtcgttttcctcattggcatcagcggctttgcatggttcttacaccagaaggggaaagctaaataatcaagcacgtaaagtgaacgactagataagcttaagacccctgactatggaagatcaaaactaaataaagaggctctagggacgattgaagtgtccctagagtctctttttggctgatggtcaaatatagagatgaaaaatactggaaaaagtgtcgcagccatctccaaggtaatgactacccaaaattgtcagcaaacaacgcttaacataccaagaatagtatttggagatataactaaaaaacacttgccgggagtgtccttcatggcaagtgtttttggtagttaacaaaagtagatcagtcttttatagtgatagatttttctttacttaccagcccgaatggcatcaagcttggcccgatacttcttagctgtagcagtgacgccagcatagtcgccggttttggctgcggcggtgaggttgctgccggcaccgactaaggtaacgccggcatcgaaccaggtttcgaggttatcaagcgacacaccaccggttggcataatggccagctgcgggaatgggccgtgaagtgctttgaccatagccggaccagcaacactgccagggaagaccttcacgagatcgacgccagcttcaagcgcggtttggatttcggttggggtgaagcagcctggggtgtaaggaattgagtaaaggttgcagatcttggcaacgtcagcattgaagcttgggctgacgataaacttggcgccggcaatgatagccagacgcgcggttgcaggatcaagaaccgttccggcaccgatcaggacgtcttcacggtcaccatacttttcactgagttcatccaatgccttgtcagcatgcgggacggtgaaagtaagctcaatacccgtaacgccgccagcaatcacggcatcaacggttttgaccgcttcatcagcatcgtcaccgcggacaacggcgacacagccggtgttaattaagcgattaagatagtcatatttttgcatggttgtttttttctccttagacgtgttctgtagtgaagaaaatcaaatgggatgcttaaaagaattgagtgtctcacgcgcgctcagttttattaagactggtttgcatgaacttgtcaagctgttgtcgcgttgggtaaccggtgttgtcgccgggtgattgaatcgctaaggcaccgatagcattaccgcggctggctgcttcggccggtgagcgaccttccagtaaggcgctgatgacgcctaatgcaaagccatcgcctgcgcccaccgtatcgacaatgtgttcggccggaaaacttggcagtaactgtccaggcacatcacggcctaacagatacgcaccttgtttaccgactttgacaatgaccagttgcgtttgctcactttgattgagatagaagtgagcgatggtttccggatcatcactgccgacgagaatttttccttctgcggcacccggcagcacgatcgatgcacttttggccaacgaattaatcgttgtcaccatggtgttctgatcaggccatagtgctgggcgcaaattggggtcgaacgtgatcagaatgcgattgctgatcaaacgtttcatcagccgcttagttgcagccagcgttgatgccgaggcggctggaaagataccggtaatgtgggcaagtttgacgccggccaagtcaatccgatcaatcgccgcgggatcaaaatgcgctgccgctgatcctgcccgcagatagtaggtgttaggatcgccatgcgtcacacgcgccttgaactcgatgccggttggataacgtgaagtcgtggttacattgtcggaaccgatgccggctgctgtgagttgttggcgaatgaaaatgccattcgggtcttcaccgagatgcgtaatgtactcgacggaatggccgagtcgactcaatccaacggcaacatttaactcagcgccagccagatacttggtaaaatgtttggcggccgctaatggcacatctgcttcttcagcggcaaagacgactagcggttcaccgattgtcaggcattcattcacgtgtgatcgtactcctttaagcgtttaatcgttgttattgtcgtagaaaccaaagtagtcatgcgcgttcccatagctgatattcttgacaatccggccaagggcatcaaggtcatatggcactcgaccctgttcgaccagttcaccatagaagttgcacagtacccgacggaagtattcatgccgcggataagacaggaaactacgcgaatctgttaacatgccgacaaagtttggtaacaggctttgttgcgcaaaagtctgaagctgccgatgcatcccttcagccgtatcattaaaccaccaggcagcacctaattgcaggtgttgtttatcgccttggccaacgaagctttgtaacatggtgatgagtggtagccaatcatttggattcagggaatagaagatcacttttggcagtgggccacgcgcgtccatcgcttggaaaagatcccggaactcgccgaccaaatcaggttgactgcccatcgcatcgaagccggtgtcgggaccgatctttttcaagttcggtaagctgagactgcgatcaacattggcatggaactgcatcgtccagttgaactcccggttgagatccatcagcatttcaacgagtccggtgagatactgatcattttcaacatcgctgactggccggttttcaatgcctttcttgataatggtatcaagtgcttcttgatcgactgggcggtagtggaagctgttgaggccgtggtcagaaaggtggccaccatgctcggcaaagaaggtgaagcgttgtttcatggctttcttcaaagaagcaaagtcggtgatttcaacgcctgctgctttgccaagggtttgtaagtagtcgccgtaagtattagcacagatcgccattaacttatcagggcgcatcgctggcaaaaccttgaagccattggtgtcttcatcgttagcaatgagttcgtggtagtgcaagtcgctggctggatcatcggtggtgcagacaacttcgacatgactgcgccgaatcaacgcgcgcggcgtaaactcaggggtagccagtttggcgttggtgagatcccagacttttttggcggtgtcacgactcaataccagatcactgccgaagaaacggcgcagttcgagatgagtccattcaaacacagggttgccccaagcattttccatggttttgcaccaggcgacaaacttctcgtagtcatcgccatcgccagtgatgagttcttcagggacaccattagcccgttccaggcgccacttgtagtgatcgccgtatgtgccttcgtttaaccaaatgcgggtgatgttcttgaagttacgattttcatagatttcctgcgggttaagatgacagtgaaaatcaataatcggcaggtcagcagcatattgatgaaatagttgcttagccggctcattggttaagagaaaatcatcgtccaaaaaagccattactttgcgctccctttttctaatgcttcccagaggccgtttagataggtgatgcctaaagcacgatcgtataaaccatagccagggcggccattttcgccccagatgttacggccgtggtcaggacggatgtagccatcgtaatcaaggtcgtgcaaggccttcatgatttcgtacatatccagcgaaccatccttggaaaggtgatcggattcgtggaagtcgccttctttgttgatgaactcgatgttacgggcgtggataaaaggtgcccgatcttttttgacaaattcacggatgatggctggtacatcgttgtttggattttcgcctaaggaaccggtgcagatggtaaacccattgtaccgagattcatgcatgctttcaataatccgcatgtcttcggcgttcttgtaaactcgcggcaagccaaagagctcgcgcggcggatcatccgggtgcatggccatgcgaacatcatacttttcacaggttggaatgatggcatcgaggaagtacttcatgttttcgcgtaatttagcggcatcaacgtcagcataagctttgaataagcgttcgatttcagccagacgttccggttcccagccaggaagaacatagccttctgagttgttacgaaccgaatcgataatatcgtgcggatcgtcttttagatattgatgttgaaaagccatgacattgctaccgtcttctagctgatagtggagattggtccgcagccagtcaaagatcggcatgaagttgtagcaaatgaccttgatcccatattcagaaaggttcttgatggtttccttgtagttttcgatatacttgtcacgtgatggcaggccaatcttaatgtcatcgtgaatgttgacggattcgatgacttccagttttaagccggcatcttcaacttgtttcttcagtgcggcaattttttccttgggccaaacttcacctaccggaacatcgaaaagcgcaccgacaacttgttgcgtaccgggaatctgacgaatttgctgtaaggtgatggggtcatctttttcgccgaaccagcgaaaacccatttttaaatctgacataaattaaagctccttttcatgatcttgacgaaattgttcaagggtcttagtcactgcacctgggccggcaatgagtttcttgaagtcggcttctacttggtcagccaaaccgatttgataaaggtcgtggccaaagatctgggcattgctcaagattggcttgagtgcggtgtggacatcggcatcgctacctaacttgatgtcggcaacatatggctgcaactgatccaataatgggtcgcggcttggggtgaagtcgttacctttatcatccactgccatcaggtaacggcaccatccggcaagaatgagcggaattgccttaagctgcttaacgctttcaggatccttgtctaagtagtgctggatcgtcacgccataacgaattggcaatttctgtgaagtgtcgctggcaatccgttgcggggtatcgggaatattcttgtttggcaagcgcttggtgaccagctgatccagaaacttcttaggatcgataatcttaggatccttcacaactggcagatcttctttatagccaaggtacttgatcaaagtgagcaaattaggattttcaacttcagcagcaattgacgtgtagccaaggaggttaccataaatagccaaagccgtgtgcaatggattcaagcaagcggtgaccttcatctgatcggcatcgttaacggtgtcgcgatcggtgaggatgacaccggcattttccagcgccggacgaccatttgggaagctgtcttcaatgacgaggtagtgggtttcttccgtattaccaaatggcgcaatattggtgtgcttaggtgtgtgcacgatggtggtgtcttcaaaaccttctgccttaagtttgtcggcaacgttttgcgccgggttcggtgtgatccgatcaatcatggaccatgggaagctgacttgcttaggatcggtcagataatcgatgaagccttgggtgacggtcccgtgtttagcccagcccttggcaattgtcaaaatgccgttttcataacgtttgccgttttcagagaagttgtcggtgctgaccatggcaattggcttggcaccggcttcgtaacgtgccaaaagtaggcgcgcaatggcacccatgttggtcgtcgcatcatctggcttacctgcgatatcagcttcggcagctggtgtcagtttgccgttgatgtcagtcagttgatagcctttttcggtaatggacatcgtaacgagttgcagtgaaggcttcgtgaagatttcttttaaatgttcccagccttcaggattggtcttgttgtagtaaatcgcttcggcaacactggcgatcagtgtcttatcaagtgtgccgtctggttgcataaccacttgcaacacgcgatcgttatatggcttgtagatatcggcaggcacatcgccatcataagtttcggcaacaaccacaccagactttaagctgccattattgagcaagtcctgcgcaatctttgcatgaaagcagcggaaaagattgccgccgccgaagtgaacccatacaggattggcctcagttgtctgtttcatttgttcttggtcgaattgcggaacagcgataccagccgctttgaagtcagcagcctttgcttgataatcgtcggttagcttaaccaaaatgatgaacctccttatatattaatatatcagtttcacacacttaatatagcacgtgcgggttaaaatggaaagcgctatcagaatacttttaacattttaattcaaaaaatatttctgtataggctctgaaccattaaaaaagaaaaagtcgaatcaacaacagttatccgcgttgtttgattccgacttttccgacgttatttcttgttagcattcacacctttgcccggtgcccagtcgtccatcagatttgccggataaggattcagcttgaagtcttcatcctgacgcggcgcactttcattgacgggaccaaatgccttatgaagcgttacggttccccatgccggaacggtaacatgctgccaagtaaccgggccgtcattgttgatggtaacggcggcgtccaacggcttgccggatgggttgtagaggtgagcagcaatggcgccatcgggagcaagaaaggcaacggagcctaagccaccggtgtagccatcttgcgtgtagttggtggagccaatcacaatagatcccggaacaacatcttggttgaagttacgcagcatgtagtattccaggttacgttgaactttaccggttgtgtgatcaatggtgacaaccccgcgacggccagttgaccctacctggtttggcaagccccgttcgtccaaggcaatgttccaaagatcaatcatgttcaagccttgacgcacgagccaattaccgatcaagccaaacataatatgagaagcatcttctggtgtttcttcgatcatgcagcggcgttcggtcatggcgagtttccagtttggattcaggcgactgcctttaaacaagttggtgtaaggaccatcgtaggtatggaaggcaaaaccatcaaatgcagccgcttcatcaggggtcaccaactcgcttagtggcttgtcgatgacatcaaggacgtttaaactgccatcccagaagtaaatcttggtatcagggaaggtcttgtccaaagccgggcgaaggaacttgtagccaaagtgtgccagttccggaatcttccagatcatggctggccatgcagctgcattggaaggttcgttttggatcgtgatggcgtaaatcggaatgccatacttgcgatattcttcaaggtaacgaacaaagtattgcgcgtaaacgccttcgaacgtgtccttaattgcatagccattgttggtatattcgccaaaacgtaagtggccgcccatttttagttcgccggtactcttcatccaagcgggagcagaccatggtgaagccataatcttaacggctgggttaatcgccagaatttcctgaacaaccggaatcagatatttaagatctttggttgcatcaggcgctccgggttcaccttcaccaacagaaaacttagataaggatgcatcatgctcgccaaatggcacatcatcataagtgtaataaggttgactggctggttcgcaggatcctaatggaatacggatggtcgagaaatgaccttcttctgggtcaaacatttcatgtagcaaggcactgcgttgttccttgctctgcttccagataagtgatgctgctgcatcggtgatggcggcacctgcgccgatccattcctgatgccggtcagcaggatcaatcacgatcttggctgcatcgccgggtgtcgtttctggttttggagttgccagatggtcacgcttttgtgccagatcgccagccgttaccgtccaaaattccgtcgggtataagcctttttcagttgtggtcatgttaagcgtcctttcttacgtcaagtgacaaatataatttcaacaaattaacgaacacgtttgatggcggcaatcaagaagccaccgatgatttccattgcaaccgcgaagatgaagactgcctgataaccgaagccttcaacaatagcagaagcaaccatcgcaccaagcatctggcccaacgtgtttgctaagttgatcagtcctaagtctttaccagcagtatcagaagatggcagcacatccatgttcaacgcgccatcgactgagttgtacaagccattaccaaaagcagcgataacagcgtaggcaaacattgcccaagcttctttgacaaacaatgggaacaaagcagctacggctaaggcgaatgttgcgataacaaccggacccttaacccgcttcattttatcggcaagtggaccgccaactaaagcgaagaagacaccaatgactaacatgatggttgaaaatacagagatggaaccgccagcttgtttggtgctttggccaatatagtcggtgaagatgaacaaaaggaatgtggtaacaatcgtagaaccgacaaccatcaggaacttacctgacaaggcgagataaaagtcgcgcgcatcatgggttgggaagaagaagtacttcttgagtgattctttgtcgagcttgatctttggttcgtccaggttgctcttttcgttgatcaacagaacgtggataatggccaacacaacggtcatgcttgccatgacataaataccgaatttaacattgccaaggaattgagcggctaacagagcaaaaccttgttgcgcgatcgtgaaaccaacgccgtaaaaggttgaaacagtgccacgccatttaggtgcaacccgatccgatatttgcggataaatcgctgcggcaatcgcgttttcggccgccgccgcgatgatccagataaagatgatagcagtaattgaagtcgtattagcaatggcgaccagtgaaagcgcgattgctatggtaccaaggacaatataaggtttccgcttaccaaaacgggttcgcgtcacatcagaaaaagcaccaaacaataagttggcaatcgcaccggtgatagacgcaacggttgccagaatgccgacagcccaaaccttgtgtgccgaatcaatttgactaaatagttgtggaattaaaacgcttcgggttgaaccgattggcccgtaccagcaaagtggcgcgaggaacattgcggttgcaacaccaagtggcatctttggctgctgtgaatcttgaatctttgcgttggtaacaaccccaaccgtcgttttgaccgctttaggatcgttcttaacatcatttgccatttttttcactcccatgaaattaagtaagtgcatttaaaaataaataggtaaaacaaatgcataaatgccggaacctgaattttgacacacccgcctccttgccaatcagcttatgccacttaaaacctgattggtcacaaactgcaaccagttgtgaccttaatggtagatatacaaccagtcagttaatgttaaaggcgtattttttaaactaaacgcgcgaaaacattgacactcggctaactgatatattagtatatccttacaagggcatgatagcgcttaccgaaaacggtgtcaacacctatcaaaaagttttataatttaaacgtctcaagcagcatctttctcgaaaggctggggatgttatacaatcagttaatcaggtgaaaaagaaggaagggtgacgcccatgcaaatatcgaattatcaagatgaagcatataacgctatcaaggagatgattctcagcatgcagctgacccccggggaaaaagtcgacaagactgaattgagcgcgcaactcaagatcggtgcgaccccgatccgggaggccattatccgcttacggcgggaaggactatttaatgtcattcctcaaagcggtacttatgtatcaaagatcaatctggatgaaatgtatcaaggccggtttgcccgggtcaatttggaaaggacgattgtggcggacgcagttgatgtcatgacgccagatcaaattgctaaattggaacagcaaattgcgttgcagggtgtttatgagcattctcgggattacgatcatttttttgatcttgatcacgactttcatgaaatattttatatggccgatcataagcagtttgtctgggcttgggtacagcaaatgaatttgcaatttaatcgctaccgatacttacggttggaagttagcggcttgaaatggcataacattatcacggaacatcaggcaattgtcgatgcagtcaaggctaaagatgctgagttagccagtcatttggttgcggatcatttgttagcgattgatgacgatgttaaggcagttttaagtgcctatcctaactattttgaaggaaaagcagcgccaagccatcagcctgactaaggtgacgctgttgtcagattttgttcactgtaagcgcgatcgtgcccaacgaaaggaaggcttacagatgacaaaagtattaacattcggcgagatgatgctacggttaaagccgtatgatcatcaacgtattcttcaagcgtctggcttcgaggctaattatggtggctctgaagctaatgtggcggtttctttggcattgcttggcgacgaggcgcagtatgtcaccaagctgcctgataatgcattaggcgacactgcgcgcaacactattcgtggtctgggcgtagatacacataagatcttgcgcggtgggccgcgtttagggatttatttctttgaaaaaggggccagtgtgcgcaacacgaatgtcgtgtacgatcgtgccggcagttcttttgcgaccgctgaagctgatgaatttgattgggccagtctgcttaaagacgtggcctatttttatttttccggaattaccccggcgatcggcaaacatatgcagaccgccattgaatcagccgttaaatactgtgccgcacatgatattaccgttgtttgcgacatgaattatcgcggtaaaatgtggtcgcctgcagaagctcaggcattctttgccaaggttatgccttatatcacgattgttttggctaatgatgaagattttgaagcaaccttaggcattaaagcatttgatggtaatatggcgaccgggattgatcagatcgatagtttcaaagccggcatgttgcaggtgatgaagcagtggccgaatgttaaaaccgtggccagtgttgtgcggaatatccactcggttgaagatagctggtggacaggacttttggctgaagatggcaaaacataccaagggccaactttccatatgcatgtgatggaaggcgtggcgtcaggtgatgcgtttggggcaggtttgatgcacgccactctgcatgactttgatgcgcaggccaagattaattatgcaatttcggccagtgtgttgaaattgacgatcagcggcgatctgaatttgattacggatgcagacgtgcaggcggtcatggcaaccggcagcggtgttgatcgttagtcgggcaataagaaagtgaggatgcaataacatgcatacgttgacgattgatggtagtcagttgcagttagagcaaaacgaagccaacacaattaaagggtttggacttctaagctgcaacaatacatcaaggttattaatggactataagtgggaacacccccaagtctatcagcaagtgctgcaacacttattcggcggacaacaccctttaatgcgcatgctaaaagtagaacttggcagcgactcgaatacatcatgcggcaccgaaccggctcctcagcgcgctgcggacgaaccggctaatgtggcacggggcatggggtttcagctcattgctgatgccaaaaagattcagccggacttgaaaacctgcatgttacgctgggcagagcctggatttttacggccaagttggcgccaggtgaagtccgatgatcctgatgaaaaggtgccgacagaagcttttgaagccatgtatcagtattacaagcaaacggtgattgcggcttggcaggcatatggttatctttttgattacattgatcccgaccgtaacgagaccaaacacccgatgtatcgctatcttaaatggtttgctaaccggctgaaaaccgatcaagctgatttccctgaaggttttccagtagcagattatcatgcaattaagttgataacgtcagatcaaaattatggaaccgatatggggacagcattgcttaacgatcctgagttacaagcggtgattccggcagttggctaccattacaacaccgatgacggtccggacaaaccatttacgaagattgccgatcagctgcataaggaagtctggtacagtgaaggcattgcgccggtcacattcggcacgcttaggacgcaggatacaactggcattggcataggcggtcctatgagtgctttggatgttgccaatcgcctagttaaaagttatgcccgctcgcgccgaagtttatacatttttcaaccagcgattggcggcttatatcccggcgcaaaatatccgggaaagcaattacttgaaatggatacgccgtggtcgggttactttcagcaagatacggtggctttggcggtcatgcatcacttcaccgattttgccgtgacgggatggcgcgatcaaacagccgcaaaaaactggcggtatgttccgagtgccacggtaagtgaagtggcgggtactgaaaatctgacgcaggcgtttggagctgccagtgccatgactttagttgccccggatgaagcggattacacggtggtgctaataaacgacaccagtgccccccaaacctatcagattgcggttaagaatctggctgctgcgaccaaaccgctacacgtatggcagacttgggccgataaagccggtaaaattcacgatcgcgaaaagacaaccacgctgacgccggtcaatggaaatgtaacggtcacgattgaaccgcgggcgatcatcagtgcaaccaccgcggatttccagccacaagccttattacctaatcctgatgttaagcctgatcagccactgcaacaggatccggaaaatcacgttcttttccacgatgattacacctatgccgatatgccggctgattatctcacgcgccgtggcggcaccccgaaatatacaaccgacatggatggcgcgtttgaagtagttgagcaggacggtaaacgcgggttacaacaaaagattaccgagcagtcgcgggcattggcttgggaaacgcaaaccgatccgaactttaccgttggcgatattcgttggttaaactatgcggctgcgttgaagtttacgtttgacacgacaacccggcaaaatactgtcagtgccaactatattggccttggcgtgcggagtgtggacgattttgaaggcagtttattctcggcgccatatgtggctacgctgacaattggcggaaagttacgcttttatgttcgcggtgttttggcagccacacttgatgtgccggttttcgatgccaaagtgagtcacgaacttattgttgaagcaacagatcgccatgtgacggtgcaagtcgatggccagacttatgtaacttatgacgatccaagtgatcaaccgggtttggcggggcaagtcaaagtcggcaccggctatttcaagacggtgattcaggctttgacggtcacgagtacgtcagcaccagcggtattaggacatcgccgcgatgacttagatgccagcctaacgtttagtaatgatcagtgggaacgccttgctgcacgttttccgcatgcgtgggaacgctcgcagtcaattggcgaaaaaggcgctaccgttgactttgatgttgaaggaaccggttttgtgctctttgggatgcaagcacacgcaagtcgcttgcagctggccgttgacgggcggatacaggaagtggtgccgttgactgcgttggccaagcaaccgaatacggtggtgaccgacttggcggccgggcctcatcacgtcaaggtgacggtcatcgatggcagttatacctttgatggagtggcgccgattctataaataccgttgcttgaagaatctattttaatcatgatcaacacgttgaaaaatgtctggaaaatgagacggtttgagtccgcttttcaggcgtttttaggaagtgatggtggcaaagagtagcaacattaatcgctaaaatgacgttaatcggccaaaacccgacgtttatttgttagatgacaccgcgtgccggtttgcgggtattataaaggggaaaatgttcattgttgcgtagtctatatttgagagcgttaaatagcgttgctagcagaggcagaaataaaagctctcagtcaacattcgaaagtcatgaggtgagaatgatgaaggctttatacaaaggtgaacctgctgatatttgggaaataggcaaaacaacgccccagccagattgggttcgtgaagcgtttgaagcgaattacttgtattggttggataatcatctgcggattttgatgagtggtctgaagccatcgctggacactaatttaaagataggagctgtcggcacgatcggcggcggctttgccgggtatggcatgtatgtcatgggctatccaggtgattacttagatatcaccaatcatcgggtggtttcaaagaaaaagtttttgaagcagtaccagcttattgacgatacacgtgttagttgatggtcagttatagcacaaaatgatgggactcgaggcagagtcaaaggcaagatcgcacaaaaaagagcatacttagacataattttttatgttatcctgccaatagaaacgtgcgtgggcgcgacctatgagcagcgtccgcattcgtatcaagaatgaaaagaaagaagatcagacgatgaatgaaaagttcctcgaagtgttgaagcacgaaggtcctgttacgattgttaccatcaacggcaacccggctcacgtggtcaatacctggatgtcttatgtcagccgcaaagacgatgaactctatattcctgcagccggtatgcacagtatcgaaggcgactttgctaaggataaccatgttcttttaacgtttggttccaaggaagttgaaggaacagttggacccggcgccggtttccatgtgtttggtactggccgatttgtcgatcaaggcccggcgtttgcagccaagaaggaaaagtttccctggctaacccgcctgctgattgttcacgttgatgaggttcaacagaaaatttagcagaattgccgggttaagcctaacgttagtgtgtaaacgaggcgataaccttgctagcaacaagcatataaattagtacgcggataaaaataagatcctagagggagtttgcctcaaaggatctatttttttgacattaaaaaaacgcaatccatgatttacatggcatgcgtttcataagtacatatgaataactttagccaaacattcgggtgatatcattttgaagcgtgtaaccgccattgaaccataaacgttaacacggcgagtaccgcgagcagcatgaagtcaatttgactgccggttgcatcggcgccagatggtgataggcgattttgaaacgtgatgatggctgacaagctggctgttcccagtgatccggcgtattgctgaagggtgttgaacaaagcgttaatgtctgctttagctgatccggataccatagtgctggcgtcggacatggtgttgccaaagcccagattgaagcccgctcggaagatgatataaaaaccgacaattaagggaatgttcaactggtgagtgaagctgccaagtaaaacggcgccgacaaacattgcggcattactggtgagtagcaagcggcgggcgccaaaacgatcgtaaagcgcaccgccaatcggtgaaaccgcggccccgatcagtgaaccgggcagtagtaacaagccagccactgaagcgttggtatgcaagacattttcggcaaagatcgggatgacaaatgcaataccgatgttgctgaattgcaggatgaagaagttaatcgcgcgggcacgaatgccggcatttttgaatagcgaaaaattaagcaatggcgaatgggtgtgttttaagtggcggcccatcccgatgatggcaattataagcgcgatgacataggcccagaaggcaccggtcacaccggccgccgtgaactgatccagcacttcgatcagtgaaaagagacccagcgccagcaagaggaatccgaggaaatcgaagcgatcagaggttgagtgtgctttgacccgaatcgttgcttcacccatgaaccagacaagtaagatgatgggcatgacaagccagaaaatcatccgccatgacgcgtagtaagttagcaaaccgccatatgtcgggcccaaagccggtgccagcgaggtgaccacgctggccatgccgacataaatgccaagatgtgcttgaggaatcgtggtcaggataaggtggaacattaacggcgtggaaaccccggtagcaagtgcctgcagcagccgaccagcaaacagaatcggaaaattcggtgcccagatacacagcagcgtccccgcgagcgcacagcaaatggctgcccggaataataaacgcgtgttgaagcgccgcaataagaaagcggtggtactcatgaccagcgttaccatcagaagatagcctgaggtcagccactgaacggttgataacgatacatggagggttttgatcaaggttggaaaagtgacgttcatagaagtttccaccagaataccgacaaaagtcagcaagccggcagataaaatggctaattgcgtacggtgtgaaacaggtgaattcgtcataaggttgccttcgtttctatcaattaatctgatgcagtatcaggtcactgatgacgatagcagattccaaaaatccgcgcaaacgcaagcagtttcataggaccaaaatgaggagaagcacggtgaatgaaagcagtttgctgaagtgggttttgtctgaaagatacataccattgcccccaacgtaaactgaaatgtggacgattaaactgatgccatcaatagccttattttgaacatactgtagttggattgtaggtggcagggtttatttgcgcttttttagcgtttgatacgttttctggttatacagcgtaacggtcatgaatgcttagcaataaaggaagtaatgttttgccaagcgcgctgagcctctggaatttgtggggtggaaatatagaaaatatggtacataccactaaattcgacaaacttaacctgaacatgagcagcgcgcgcttttttgacgactgtcgtactgtcactcagtagcagctcatgactacccgtttggatgagcatgggaggaaggcccttaaagttcccaaaagcaggtgataaataagggtctttcaaattgtgtgaaccggcgtaagtaatgggaaccggatatttaggagcagtcttgattgtcgatgaaccaaataaaggatcgctggtaactttcgtatgatacgagctgccacttgcggttaaatcagtccaaggcgaggccaaaacgagtgctcgaggtaatgcaagcttatgatcacggaggtatagggttaatgcaagtgaaagaccggcacctgaagagtcaccagcaattataatgttttgaggctgatagccgtgctgcagcaaccaacgatagccgtcaatggcatcgttcaatgctgcagggaaccgatactttggcgcagtgcgataatctaatgaaaaaacggtcgcgtgatgatccgattgtgagtaacgcagagcggcttggttataagtgttactaaagccgcttagataaccaccaccgtgaatttgataaacgactttttttgatgcatcgggctgcttttttgaaagtaagtaagcacgtgcatgcttgagatgaacttcttgatttcgataggtcttaggtggttgccaatcctggaagtggtaattagatggtgtctccatttttttaatgataaacgactcgccatgttgtgactcatagtggcgattaatcatctgaaaagcgttattaataagattgccagacaatgaaacctttagatttggccgagtcaaagcggttgttagacaggcaatgaagaacaaaccgatggagattaaagagatttgccaaagccgtactattcgttgtgattgtttcagataaattaaaccggcaatcaggataagcaggatgatatattcaaaagtcttgaccctcaagaaaactgcgactataaaaatcaaggcaaacaaaatcgcggtcatagcatagaaacaaattgttttcttttttgacatctgaacgatctccttaataaataaacttattatgtttccaagtattaatgcccttagtctagtggcctatattaagaaaaagaagtatcaaaatgggcaggaatgttactttaacttgaaagttgggccaaaaaaggtcacgctaaaaaagaaggtgatcttgatgagtaaatttcaggaaacggatcaaaccatccagcaggcttttttcaaagtactggctgctgagccttttgaaacaatcacaataaataagatctgttctgcagcaaaaatcagtcgaacaactttttatcgtcattatatggataaatacgcgcttcttagcaaggttaatcatgcgttttcttcggcactagcagcttatctacaacgcagaattcatcagacaaacattgcggatacgttagtcttgatcgccaaatatttatccaccaacgccaaacctattagtgacttactacgtgtacacacacccgaaagtgatctaagtgcatcatttcagaagattttccatgcgaaattcgctcgctatatcgactatgagctttccaaaggcgctgtgacggcttttccagttgcttacttgattgaactatatgtggcaatcgcgatggttttcttaagttactctttaaaaaaggggctggacgttgctgttgttcagtcactaaacgattttcaaaagcaaattttcactgaaaaaagtgaaaattaggctaacagcggtggttatctcgatttggttaaccatttattgattggtcagcctacggaattttgggagtttgtacgacattcacgttgagctttccatgataagtgttccaaaaatgccaaaaaacaacgttaatcggcaaaaaccatacgtttattttttaaccgcatgctattgagtctttcaggttatattggagaaaacaaacttggaaggcggtatgtgagtcatgacagaaaaagagcgtttccggaaatttgttcgcaatggatttcgaaaagatgaagaattgggtatcccctatcatctctattgcctagcccatgcagttttgatagcagtcccgcttggattcattgtatccgcggtgttttatgcaatggatttgcgggacttatatggtactgtgtacgcttttaatatgggcgttattgtgtttttgatgtttgagctggacatcgattggcgcattgagaagaatgaatttttgcctgagcgagtctccaagttgcaatgggtcattcgtattttggcgagtgtgctcgtttccggactcttcttttattttcatgaaacaacagttatccagcaatttgtgaagtaagaccgagcaacacattgccttttgcatgttatgagttgacttgttccaaaatagggcaatcggtgcccgcctgttttcagggacgaaaaaaacacctgtcgcattgatgaaacgacaggtgtttttattgctgctggcgataaggaccatcagttttatttgcaaatgttatagctgacaaaatgcactggttcacgcgcgagaatgcattcctgagcgattgggcttagctgcttgtttaggcgtggttggggcaggtgtttttggtgaaggatcagcatgcggtccgggaccctcaggatgattgttttgcttcatttgtctgtcagtcatactgatcacactggacataaccagcgggagtaggaagacgagcaggatgagaccaatgatgacagccagcgcaacctgaatcaaagtggtaatgccagatggaatcatcgctgcgaacgtaccgcttaggatgatcgctgccgagatgacgactgcgccaatgacactggcggctttggtgatgcgttgtgtcatcgtgccaccttccaaggcattgtcacggtagcgaaccatgaggaagatactgtaatctacccctaacgcgacaagcatgatgaaggtgaagaatggtgtgttccaggttagcatatcccggccaagcacataggttgagaatagcttagtcagacccagtgaggtgacatacgccatgagtaacgttgaaatgatgctgataggttgaattaacgaacgcgtcacgacgatcagcgcaatgccgatgccgatgatcatgatggcggcggttcgttcaaagtcaccatttgccaggtcttgaagatccgctgtttgtgaagtttgaccaccaatggcaatggtggcgtcatcaagcggtgtatgcttcagtttggccgtcagatcggttttgatcgctctgatttgttgggcggcagcatcggtacttggatcgccttttaacacaaccgttaatttggtgattttattgccgtctgacatgtaagtcgataaggctggcttaaaggttttacttttcaaagtttcattggggatgtagaacttcttccccaaataggaatgctgcagttcggtcagatattgtttcatactggtactgccgtctgcaatcgtgccgagggcttgatcggcggaagtaaggccactttgcatggcggttacttgttgcgagatggctttgactttcgtattcagcgtttggacgccggtgttgacttgatcagcaccactggcaatttgcgcggcgccattcgtgagggtaccgttttgtgcggcgagcttagcggatccggaactgagctggttgaccccggaaaccaaggatggtacctggctgttcaatgagttaatcccactgtttagttgttgagtgccgttcgtgagggtgccaataccgctgtttagcgcagttgtacccgcgtttagctgtttgagcccgttacccatcgcagcagtgccgtcatttagtttttgaacatcggtagagaattgattgatttcatttaaaatcggctgggttaaccgatcggcgctggttagaccattgattttagcgatgatatctttggcaatccctgctacgccttgaagctgatcattgagagttgccataccagtggttaattcaccggatttgctgctaagttgactcatgccgttagcaagcaccgtgctattgctatttaaggtgttcatgcctttagctagttgcgtcgaaccggtgctcaaggtgttgacacctgagctgagagccggcatttgatcattcaattggccaaggccgctgtttagggatgttacccctgacgtgtactggcttatcccgctgttgagactggaagcaccggaagaaagcgttgtggtaccgtttgccagtgtctgaacctgttgggtacttccggcaacattggcatttttgatttgggtattggcatcgttgagaccagcctggacttgcttcaagcctttaacactttgagttaagccggcagtgatggttttcagctgatcgtttagatacaacgatttaatctgactaccgccgggctgggttactgaagcaacggttttgacgcctttttctttttgtaggtagttggtcaggtcgtcaatggtgcccaaggtggtttgggtgttcagcgcctgcttgctttgaatatagatggttgtcggtgaagccatgccttttgaataatgatcctgaatcaagcggtagccgactttggattggagggtttccggtaattcatcggcgttgttaaagttcagcgtctggttgacgttcaacagaaacggaatggcgataatgccgatgacgcccagcgtgatgagcggccgcgcgatggcaagcttggaaaggccatgccaaagtctgcttgtgctgtggccgttgaggttcttacttggccagaatagcttttcacccatggttgccatgaagaacatgtttaaggttagcaaaacggtcaaaagaatgagcacgccgatcgcaaccccaactgcggaccggtagaacttgaagttggcaaggccgagcacggagaacccgatcagaaccgacagcccggaatatagaatcgttcgaccaccaaaacgacgggcgattcttgctgctttggtcttgggaatgccttgcgacagtgctgctttgaagtcatcgtatagaagaatattgtaatctgtcccaatcccgaacaaaaccacaaccagaaagacttgggtgaaattggagatcgggaagttaaccttgtctgccaaggtcatgatgatgttcagtgatgttaagaaagaaatcgccacggttagtaatgacactaacggaacaattggcgaacggaaaacgataattaacacaatgaaaatgaagatagccgcgataatctcggttttttgaatgcctttttcggtcacgctcgcaaaatcatcattaaggacatcgctgccagtcacgtaggttttcacatggctggttttgatttgtcgttcgagatcgcgcgtctgcggaccaacctgacctttcgctttaacgtcaaccaatgccatttgggtcgtgccatccttggcatcaagctgctttttggtttcggcattatcggatgacttagtgacgttgatgattttaacggctttggagtccttgagtttggctaaagtttgattgatcgcgcgtttttgcgttgtcgaaagcttgtcgtcgccgttactgaagacaagggcaaatgagcgcaccttttgattatggttggcttttttctcaattgtcgcggcaatttggctttcttcgcttttgggtagcgataaggcgcctttatcacgaacaatgccggatacgtcgggcatggttaaaagtgccaccaaaatcacgacaagccagaagataagtgaggggatatggcggtcgtgaagctttttcaattaaacacccttctttcacttgtgaggccattccagacttgatttttcaagtccgcggctaatggtttctgattcgagacatgaccttcaagttgctgttgggcccagacgatgtcgatcatgctgacaatgctgccgtacaaaattgccagctgcgtccgaacgtcggctttgacaatcacgccgcgctcctggccttccagcaacatgttattgatgagtataatcacccggccacgcgcagcacgactctcagcgttaagtgcctcgttgaaaacattttgttgaataaaatgcaattctgtcggatattgctccatggacgcggtcgccgcatcgaataagcgactgaaagtggtctccggatcatccggttggcagtttgccgcggttgccagggagtcgtggaagaagttcataatatcggtaaaggcggtattaaggatatcttctttgcttttaaaatgccgataaatagtgcctaccgcgacttttgctgctttggcaatcgacggcagattcgtttcggcgtatccacgctcagcgaagagcttcaccgcctgcgcgataatcggacttggtaatggaatggctgtcatgatattttctcctttaggaatgaacgttcattcacatatattagtttttgagaatattcatgtcaagtgcatattcaaaaaataattaatactggcatggtgtgttattgataccaaactaaaaactcgtttaatggcgcagaggtcagtttgcgcccatacaaaaaagcgttgaaaaaacaacgctttattcgagactacatttcttacggccacaatttaatacagccgagaataatcgaaaaaatcgcggtaccgtttttcaataagcgcccatcgattttcgggccgatgcgactgcctacgatgacgccaataccgtgtgtcacgatgatcattgccagtagcggtaaggtggtcatgaattggacttggctgaggtagccgactgcggccggtaagctgatgaagaccgagtttagcaaggcgatgccaactgctgcatgcggttcgcagccgagtaaaacgagtagcggcatgaccagtaccgggccgcctgctccggaaagggcacaaatcaatccagtgacaacgcctaggatgacgagcaaaaccggttgattcaagtgatcaacgccgggttttggcgggtggcgttgttggatcaaaatagcaatgccggatagcaggacgaccagataaagtaagaattgtacccagctggttggcagtaatagattaaggcgtacgccaataattgccccgacaaagctgccgccgctgagtagataagcgacccggcgatccatgagcccttcatgttgataatgacgcgagcccaaccagccggaaataatgaaagccaggaaactaaaggccagaccttccgtagtgctatagccaagtcccgcggtgtatagaatggggagtaaaaaaccagccacgccagtcataccgacgaggccgccgattaagatgttgccaattgcgatgatgatgattgccataatgttgggtaacgccgcgcacacgcagctttaatcctttctacgtctaatgttaacacttctcggttccgcatcagccatttgccggcaaccatcgaatccgcgacatcattagcattgacgctttcaagcaacgtgttattccagttgccggttggccaaaggtgggggctatcaatgtttaacccgatgatatcagcctggtaacccggtgcgattcggcccagatgaccggatagattcagggccgccgcgccgccatccaagaccatggacataattgtcggggcaggcatgacagcaggctgatgttgcaaggtgccataatgcagggtcataacggagcggaaaatcttcatttcctgccacagactcagaccgccatgcgcagcgccatcggtacccaaaccaattgaaacacctgcatgtaataattcaggcgtggcagggatgccttttccggcgttactgaacggactgtgactgagcttgacgtgatgggtttcgatgagcattttttctgtgtcgtcaagaaacagactatgtgctcctagaaaatgatcgcttaaggcgccgcgttttgcaaggtagacatatggccgctcaccgcaacgcgctaaaataccggcgacttcttgaggatactcgttcatatgcgcttcaagaaaagtctgacgatcctcggcacgctgggcagctagatcgaccaatgtatcggaacaattatttaaggcgcgtaatgagtaataaacttgcaaatgattgcggccgtggaattgatcatacaaggcatcggtgtgggcgatggcggttttggcgtccatgttaatagttgccggtaacgtcggatcgtccatcgttgagtaggcaagggcgccgcgtagaccacttttcgcgtaaacggtgccggctgcggccatgtgataactgcctgactcaacgaaaccggtggtgccgctggtgatcatttcaagggcggttaactgggcattaagcgtcatggtttccgccgtcatgttggcttcaaatggcagcatgactttttgccagataatgcctttcgtgtccagcacgcggccacgtaagagttgttggccggtatgtaagtgactgtcgatcaagccgggcatgaatagccggtgcgtgccatcaatggtttcatctgcttggacggttatcgtcccatggtcactgacctgcgcgattttatcgtcgcggattaaaatgtcctgatgcggcttgatctcaccaggtgcggtcatggttaaggtatcctgaatcaatgtgctcgtcacttaaatcacccctgtcagtttcaacgtgagcgtatcccacaggagtgaaccgacaaatgttccggtcatgacggcaactccgacaatgatgtacttccagccttgatggacaaatgtgcccagcttatccgaaattgcaatgccggcaaacgagccaacaacggtaaatggcgcggcaaacgcaatgactttggtagaactaatcacaaccgctgcaatcggcgaaaatggtgaggcaacgagtaggcctaaaatggaacagtacgcaataatcggcaacttgaatggcacaattttagctaagaccacagctaccatggtaatggcgatcaaaatgatcacgccggggaggcttttagcgatgctgacgccggatccgatccagttagctagcagcgtcccgaccccacaaacgctgaggagaaataaccattcacgtaaacgcattacttaatccgtcctttcaaagcggttgccgttttagcgcggcgactggcgaacattttatcgaaaagattgtagagcttgtcggttagcgggatggcgagaaacatggtgatataaatcccggtgatgccggcgatggtgttggcggctgaagccatggcggtgatagtgttggcgtcatgcgggaatagttgcgcaaggctggcactggcagaggccatgaaaatgccggctccaacgcctgtcgacatccccaacgccttaggatcaaaccaacccgtcagtcccaaagcagttgccatcatgccgaaataaatcgtgccaagaataccgccaacgatgtaaatcgccatactgccgcttgcttcgtcagaatccgaaccataagccgaattgattaaggcaaggtgatattcgcgattcagtgaacttgttgcgccaattgcctcacggtgcagccccagcaacattgccagtggtaggccgaagaagatcccaagcagattaccgaagccatgcaccagcaatgccggaccagcatgtaagatcatgtccatatttgcgccggcagtaatccctaagttaacgacaaacgggcaaataccaacgataaccaatttggaagcagctttaacatggcgattgtcaaaccatcgcatcacttgcggcccactgagcataccaagaataatggcatagaaaaccgggaataaaatgatcatgccgggaccgaccttgagtttcaccgttccgatatattcagcgatgacggtgaacaatgctgcgacaagataactcttccattcgactttgatccgtgcacgtaaactgggataagtcatgttttgcctcctcttttagcgaatggaaccagtttagcgcagttattcgggtaaataaaggacaattacattaaaaaacgttttaatgttcgtgtttattcgtcagcacctgatggacaaccttttaaaaatgaataagtgacgagcatgacaaatcatataaaaagccaaaagtcagttaccttgaaaaaccgaatcaagatccaataacgaaagatcaagtgctttctgtatttggttttgattcggcaaagtttcctgacgcttggcgatggtgctaagtagctactgtgatcagttgttgatcacgcaattcaataacgttacttgctgtatttagtcgtttttggccgacttgttttgaccttttgttccagattctgctcaggtaggctggctggctcttcgtgaaacagacggggcaggtggcgtggcgcaacagtcgatactgacgtgacaacctgttgaacatgctggtttagctcggtggtgggattgacggttgttgcggccgatccgctgctagtcaacaaccccgcggcaaccgctaaaaatgtaaagatcatatgcaaaactcccttcgactggctgacattctttaataacagcgattaacagtcagtctagtaaggagatgtgattgatttgccgcatttgtgaggtcttttcacaacgaaaatgaaacgaaaacatggtgattcgttaacagaagcgtaaagcatggcgaatatggaccaaaagttgaagaagtatggatgaatcacgcgccgggcagtaaaaaattttgaacatgaaaaaagacgactcgggtaagtcgcctttttactgtttgctcgttttcaattatgaagcagattttccttttggttccaatcggcgttccaaaaagcctaacgccaggtcggagataatcgccattaaagcggttggcaatgccccggcgagaatgatcgcaccgccattggttgcattggtgccgcggacgatgatatcgcccagaccgccggcacccacgaaggcaccgattgccgtaatcccaatggcaacgaccagcgcgttacgaatcccggccatgatgactgacatgctcaacggaatttcaaccatgtacagtgattgccagcgggtcatgcccattcctttggcggcatccatcaggttcttgtcgacattctgcatgccggtgtaagtgttcttgatgatcggcaacaaggagtagagaaagaccgttacgatgacggtgttcacgccaagaccaagcccgagcatgatgatggacaacattgccaaactaggaatcgtttgaatcacgttggcaatgccgatcaccgtgttactcaaggtgcggtggcgggcaattgccaagccaaccggaatcccgatcacagccgcaatcagcacaccataaatggaaatcagaaaatggcgagcaaattgactgagcacgtacgaaccgttattggcaaggtaataccaaaattgctgccaagtatccatgttagccattagtcgtcacttcctttgaaataattgtgtttagccagaaacttctgagcgaccacattcggttcaagtaattgatcgtcgacttgatagttcagttcctgcatggttttcagattgatcttgccgtctaaacgatgtaacagcggttttaattttggatatttcttcaaaagactgttgttaaccactaatgaacactgataaggcgggaagaactttttatcatcctttagaatcttcaaattgtaactgcgaatgcgaccgtccgtagaatacccgagaaccgtctgcatccggttggcttcaaccgcgtcgtaaaccaaaccgatttgcattggataaacgcgtttgaaatcaaaaccatatgctttggtgaagtcgctgtagccatcgcctttacggttcatccagctggaatcaaccccggcgttgtactgtgatgcgactttctttaggtcggaaatgttattgaggttatccttcttggcttcttcttgggtaaccatgaaagcataggtgtcagagaagccataagacggataccaggtttggtcatagcgttttttgaattcacgcttgacgatggtcatcgctttggaaggacttttgacagggttcatgcctaatgtgccggtgatatcggtgccggtgtatcgagtcgcactgatatcagcatcattacgaatcatcgcttggtgaaccaccgtcccggaaccaaggttgttcaccaaagtcgtcttgtagccgagttcgtggttgattaattcggcaatgatattcgccataatctgtgactcggtacttgtttgggaggcgattcggacggtaccgtcattaccggaaccgccaaggccagggaagccgcaaccacctaatagcagcaccggaatcagcaatagggtcaggagtagttttctgaatgtcttcatcttgccacctcctaagcgcgctcgctgacaggtgttaggtggtattccaaccgccccaacagccaatcaacaatcagtgccaaaatggttacaggaatggtcccgccgatgatgagatccggctggaagagattcagaccattaaagatcaagtccccaagcccgccagcaccgatatacgatgctagggttgcccatgcgatgacataaatggcagacaagcgaattcctgccataatgactggcatggctagcggcacttcgacttggcgaatggattgcatggcggtcatgcccattcccttagcagcgtccatcaacacgggatcaacatcttccatgccgatgtaagtgttacgcaaaattggcagcaatgaatagatgaacaatgcgacgatggcaggtactttcccaatcccgaataaaggaatcattaatgccagcaaagccaacgaaggcaccgtctgtaacatgctggcaaggccgatcacgactttagccgtcttaggaaaacgggtcagcagaatgccaagtggaacggcaacaatgactccgagtccaagtgcaattgccgagatgtaaagctgttcccaagttttggtaatcagttcactgccatgtgcgtttagaaatgcaaacatggtcacacctccttaggtgcgtctcgggtatcttcagttgccgaagtggtggtcgtcgacgatgcggctgactgatcgttattcttggccgcagcactgtcttgatcatcttcattgtcgccccaaatggtgtcataaacgacatcaacaagtgaagcacgggtgacaatgccgaccagtttctgatcattgtcgaccacaggcacatacttaaatccgcgcttaagaatgcggtcagccgtgtcgcgcagtagggcatcttttttcacgtagaaaatgctggacttggtgatgtcgctaacgctggtggcgctttggtaacgggtttccagcgattccagatcgatgaagcctttgaggtgatcctcgtcatcggtgaccagcagcgtatcaacgcggcgtttgcgcatgagggaaatcgcttcagccaaagacttgccaggtgtgatggcagccggattcttcaacatgatctgttcaacagtggtgacgtccgcccgcgcttgaaccaggcgatcctgaccgactaagttttcaacaaacttgttggcgggatgggtcagtagttcggttggggtggcgttttggataatgtgaccgtgatccatgacaacaattttggtggcgagtttgagcgcttcgtccatatcgtgggtcacgaaaacaacggtcttaccgagcttttcctgcagatttttaattaattcctgcagtgcttcacgggtaatcgggtccaaggcgccataaggttcgtccattaagatcagatcctgattggcagcaagcgcgcggataaccccgatccgttgttgttgcccaccggaaagctctgatgggtaacgatccagataatcttcgggtaattcgacgagatcaaccagttctttggccttttcccggcgcttttcttcaggccactttaataatttaggaacgatcgtgatgttttcataaatggtcatgtgtggcatgaggccgatattttgaatgacataaccgatttgacgccgcaattttacggcatcgattttgtgaatgtctttaccgttaaacaggatttgaccgccgctgggttccaacatccggttgatcatccgcatggtcgttgtcttcccggaaccggatgtcccgataagacatacaaattcacccttattaatttcaaggttaatatgttcgaccgcgacattcccgcctcgatagactttttcaacgtccttgaacaggaccattggttgttcttctggcatctgacgcgtcctcctttgtttggttgcttctataataacacatgacgttaatcgttttttaataaagcgaaaatgcgttctatctgctcaactttccaattgtatcttatgaaatgattaaaaaaagctcaagaaagttcccctgttttgattgaaaagttgattgcggtcaaggtggcaataatgattcctcagtacactggtctcgaatgggagggatcagcgatgcgttttattcaaacacataaacaagaagcgatggtgatcggcggtgttttgactgcggcgggattgattttcagtcaggcatggttgctggtgttggcgagtctggtggccgggctgccgattgcggtgaatgcctgggaagcgctgcgttataagcagattagtattgagctattggtgacaattgctctagtgggcgcggtgatgattggcgagccgattgaaagtgcggttgttagttttctatttttgttcggcgactggctggaacagcgtagtttagccaaaacgcgctcggcgatccaaggcttggctgccgcagcaccgaaaacggccaggctgctggatgggacgaccattccggtggggaagttagcggttggcgatcaagtgcgggtgttggctggcgaaacggtaccggctgacgggcaggtgattagcggccaggcaaacattgtggaagccgcgatcaccggcgaaccggatgccaaacgcaagcaggttggcgccacagtatactccggtacgcaggtgagcgatggcacggttgacattgaagttgaaaaaaccggctacaacacggtttatcagcagattatcgatttaattgaagatgcgcaggacgcccaatcgcctgtggcaaccttcatccagaaatttgcccgttggtacacgccgctggtattagtcatcgctttgctggtgggattgattagccaaaatgtccggctggcaattacgattttggtactgggttgccccggcgcattggtcattggcgctccggttagcaatgtggtcggcctaggatttggtgccaaacatggcattttaatcaaaggcggcgatgtggcgaccaagttggatcaaatcgacacggtgatgtttgataaaaccggaacgctgacacaaggcaagatccgtgtggcaacagctaagtactggaccgctgatcagcaacgggttgcagccacggtcacagcggttgaaaaagcaacggcgcatccactgggacaggcacttgttgccgatcttcaggcaaagaccatgcaaaagccaaccgatgtcaaagtcactcgcggagttggggtgaacgcccgaatcgccggacacgcgatcagtgtcggcaatcaaaaggttttgcaccagccgctaacagctgaccagcaggccgctgttcagcaaatcgtggccagtggtgcaaccttggtcttggtaaccattgacgacaaactcgtggcagcttatggcttgcgcgatcagttgcggacggaaacgccaaccatgctgagcaccttaaaagcaagtggcaagaagacaatggtgctttcaggcgactcgcaggcagcggttgaacacatgatgtcggcactaccggtgagtcagactcgcggtggtttactgccggcagataaggtgaaagcgatcaaagcagcacaagcccgcggtgaaaaagttatgtttgtcggcgatggcatcaatgacggccccgccttggcacaagcagatgttggcgttgcaatgggttccggcatggatgttgcaattgacacggcagacgttattttgaccaacagccgtctcacgaatctcggcgtgcttttcgacttagccaagcggatgaatcgcaacatcaagcagaaccttgtcattgcaattggcacggtggcgttgttgttaagtggcttattgattggattggtcgacatggctagcgggatgttattccatgaaatttccatcctgctggtcattgcaaacgccttgagattacgacacacaccaagaaaatggcaaaacttgacggccatcaaggtacatcatccgcaaacggttaataatgagaataaataaaaacgaaaggatctttaacatgacaaaattagtttatcaattagatggtttaacctgcccgagctgcctacagaaaatcgaaggggcactaggccaacaagccggcgtcaaaaccgtcaaagccttatttaacagcagcaaggtcaaagcccagattgatccagccgtgaccaatgccgatgcgttgaaaaaaaccattacggacttgggctacaccgttgtgaacgttcgcagtcaagaagcatagagcgtgagcaggagcgcttagcaatcggagtgtaagcggccttaagcctaaatggccggtctttggccatttagacttgaggtccttacacgcagattgctgcgactgcgaacgcgttttagaacggagtgtaagcagaaacacctaacaatcagagcataagcggccttgaacgtgatgaccgagctatgaccattgcgcgaaaggtccttatgtgcaggttgctgcgacatcgaacacaattttaagccgagtgtgatcagggcttcatacatccaagacctttacacaggcttctagcgcggcaaacgcattttcaaggaggaaattatgagcatgagcataacaccaggcatgcacactattgacgaagaaacagtaaaagcccgtcaagcagcggcagctaaacaagtcgaccatgatcatcatgtaccgacagctggggcgatgagcggacatgtactagcaaatttagcagtcttgcaacgtaaactggcccaattttcccaaacgttgagtggaccaagcagtgacggggatcgcgaattgttaacgcaattggcaacacaagcgcagcagcatctgacggtgttagtggcagacttagcggcgcaaggagaagattttcccacgacaaccgcggagtttagcgagtacacgatgttgcaagaagatcccgcgtttcgtttttggaccaatgatatgaaactggatgctgtggttaatgatctggatacttgccagctgttcgtcagtcgggcgattccgctagccaataaagagaacaaggcagtgttggcagcggatatgttacaattgcagcgctggcatgagcaaagtatcctgcacttgcaaacgcgtctcggtcgtgaggtgacggcggggcggaccttgcttgaagaggacgatgactgagcaacattaaacgatcgattgacgagagagcctgtctgtaagggggataaaaatggcgcatagttgtacggcggtcgtaccgttatttaaaaatctaactgatgaagcccgcactgcgattgatgcgttgacccacgagcatcaggtgcaaaaaggaacggttctgatcagtcctaacactgctgctcatttgttagtggttgcacagggaaaactcaaaacttatcaattggcgacaaatggtaaagaacaattactgcgcgttgacggcctcggcgattatgaaggggaagccggcttgttgaatattgctaatccgaatgtctataccgaagcgctgacgaccgccactgtttgcaccattagcgctgccgattttcaacagttactcatgcagcaaccacaaatcagcttgcaattactcacagaaaacgcccgtaaaatgcaggcattggaaaagcaagcgggctatctcggcaacgattccatcaatgtacgcttaactcactacctactggatttgcgcactgccgctggaaaagacacagtgacggtaccgatggcatggacgcagctagccgattatctcggcacaaccccagaaacggtttcgcgcacgttaaaacggttagctgatgaaaaattgattcagcgaactgggaagcaagtgacgattttgaatgctgaggatatggaagattttgtttggtaatttaaaagtctttagccgaataatagtgtcaaaacaaaggatcgcaactgtgaaagctgcgatcctttattgttgttatcagtcatgactagtcatgtgttttttcatgccgaaataataggcaccaacggctatcattaaacccaaagtgaaggcggaaaaatatttttggctacttggcaggaaataccaagcaaaaattgctaagagtccacctgtggtcacatagagatacaggaagctgcggactgcttttaaattagaaggcttctttacgagaaaatagaggaaaaaagccgaagttgcaatgccgaaaattatcgaagcgatgtgtaataacatgtttgggcctacctttcgatcgggtgttgctgtaatctcacagaacaatcaaatattgaaaataaccgttaaacggtactagttcgccgataaaaccggatgcgtgcgtcgtttttgccagaagataaggataatccccagtaagaccaccagcaatatatggacaatatttgacgccgcactagcttcaagtccaaaaacgctgccggtcagtgactgcgatgtcgttgtcgggagggactcgaggacgaacttttcaccagatagcccggaaacggttgtgccaaagatgggaccttccgcgaaattccatatggcgtgaaaggcaccgcacagccagatattgcctgtcagcaagcgaaattgtgacattgcaatggcaaagaaaaacaagccggtggcggcggaaaaattatagccgggattggcaagatgcaaaagcgtgaaaaagatggcgttcaacaaaaccgccagcccgacacgattttgcttaagccagtagcccattatatatccccgacaaagcaattcctcgaacattgattgaatcgcatagccgaagaagaaaagcacaagccacagcaaatttggccactgaaaagtcgccagcacatggtaaccaccaagcagtgcgatgatgccccagataaggctgaacatgagcaggccaaaaagtaagcctaaagcatagtctctaacggcattttgacgggaaaaaggcagcaatgtacgatcactgcgataatagatggccatgccgataatgccgatagcttcagcgtataaaaagagcaggttcaaagacatcgggatgttggtttcatctatgtcgatgtcgaacagaccgatcaaaaaaggaatcagctgtgatgacaatgaccaagcaagtgcaatgccataaacgattaggataggtcctaatagctttgaaaatttatgtagttgtttaattggattcacctctgaatagaatttgaatagagaagatagcttaacaacaaaagaatatttttagggtatccttaattttttgcgtagtcaagcgatccaaaccgagttaccggtgaacgcgttataagcacaggcggttcatcttacttgaaataagtatcaccaacattcggaatgctggtactagtacccaaatgtgcgaaaacgcttttattacccttgctattccgttagtcttcatattgaaaataaatagataaggggtccagcaatatggagaagaagattgttgccgtgacggcttgtgcagcggggattgcgcatacgtatatggctgcggaatcactggagcaagcggcgaagaaaatgggctatgagatcaaagtcgaaaccaatggggcaatcggtgctgagaacgtgttgacgaagcaagatattgagcaggcagacatggtcattgtcgcctcggatattaaaattgatccgattcgctttaccggtaagcggcttttcgttaccaaatcaaaccaagcgattcaagattcggaggcattgatcaatcaggcgtttgaagaagccaaaatttttggaaaaaaaggtgcgaaggttggcaagattcaggtaggtaacgataaagataaggtcaactttttcacgcatattatgagcggcatttcatacatggtgcccatggtgattgcagccgggttgcttttgacgattgctaatctgtacgcctttcaaagagacgatttaggccgaattgttaagtggggctttgacaataaaacgcaaatgggattcttgatggccaagttgttctatgtggggcaaatcggctttaagttgatgattccgttgtttgccgggtttgtcgcgaattctattgctgacaaaccagcgattgccccggcgatgattggcgcttatttggtcaatgatcccgagtttctgaatacgaaggcgggcggcggttttattggcgccatcattgttgcctttattgtaggttacatggtgaagggcttgaaaaaagtgaaatggccaaaactgctggtgccgattgtgccaatcatgatcattccgtttatcgccaccgcggtcattatgttgattgttctttatgtcatcgggaacccgatcgcggttggcatggatgcgatgtataaaggtttgacggatctcaataacaactattccggagcgccgattttgattggcgctatctgcggggcaatgatcgggtttgatttaggtggaccgatcaataaaacggctttggtctttggaaccgcgattttcacggatacgttgaccaagtatgggattaacggggccaattttgttcctggaaccgcgacccaagcagcaatttccgttgcgccactgggagtttggctggccaccatcttattcaaaaagaaattcaccaaggatgaaaaaatcgccgccagtgctgcttttgggatgggaattgtcggtgtcactgaaggcgcaatcccgtttgtcgcggccgatccagtcagaatgatcttttctaacgtggttggttcagcggttgccggtggtctagtagctgcgacagggtgtaaattttacggcggtatcggctcgccactaggaacttttattggttatattgaacagccgctaccgtttattacctggattttatgtgtctgtgcaggaatcctgaccgccgcactgttaatcggcttcacccgcaaacaaacagtggcagggctcgctgttgaacccgaaaagtaatgctaaccgttgaaaccgacaaatgaacaggtaggtagaaaagtgaataaagaagtttttaatcgtcaccatattttatttgatgaaacagcaacaacccaggaagaagccttcaaaagcctcgcccaatttgcttataatgcaggctttgtctccgatgaaacagcctattttgaggggttaaaagctcgtgaaaaggaagcaaccaccggctttaaagatcatatcgccattcctcattgcaaaagcagcgtcaataagaaaccggggttattcttaatcaaatttaagcaggcaattccgtggcaagcattagatcaaaagccagtaaaggtggcttttgggttgaccattccggaacaaggggccaccgaacatttgaagttgctcagcctgatagccagaaagttgattgacccagactttagagaaggagtcctgacacaggatgatccagaaaagctgacagcaatcattgatcaaatcgaatttaggggttaatgcagaagtgaaaagaaaagttcatgtcatccatcacacccactgggactttgaatggtatttcactgccaacgagtcactggtgcagctggcttatcatttggatgaagtcatgcaagccttagagcaacagcaaatcagttactatttgctggatgggcagatgagtattcttgatgattatttaaccagttttccagaacaaaaagagcggctaatgaagttagtcaaaagcggcaaactcgctattggcccttggtatacgcaaaccgatgaattaatcgttcgcggtgaatcgattgtcagaaatctgaacctgggcatgacgttagcagaatcattaggcggctgcatgaatgttggctatttgccggattcttttgggcaaagtaaagacatgcccaaaatctacaatggggttggcattcagcaagcagtcttttggcgcggggtgcctgacgatgtaacaacgcagcgtgaattttactggcaggcagaggatggttcccaagtcttaactgcgaatatcaaagacggctattttgtgggcgttggtctgatttattctgatgatgcgcctgccctcgtcaaaacgattgcggccggtgctacgggtgcggatttactgttaccggtcggcggcgatcaacggtacattgatttcaatctgcgcgatcgcatgaacctgtatcgccaagtgcttcctgatacagagctagaagaaagcaattaccccgggttttttgaggcaattaaagaaaacgagctaccaacaatcaccggcgaatttatttctagtgcagtctccaagatccatcgttccatttactcttctcgttacgatcataaatacttaaatgataaagtggaacggcgcatgatttatcaagtggagccgctgatggtgatggcagaaaaatgcggaatcccttataagcaaggtttgctagatcgaatctggaaattgctgaataaaaaccacgcacatgactctgccggcgggtgtaatagcgacaaaacgaatctgatcatcaccgcgcgctatgttgaagcagatcagctttcttactcattagtggattacctgaccagaaaaatttccgaatcgcgagttcaggtatccgaaggcgaattggtgatttttaataccttgccgtggacgactaaaaaggtcataaaatgtgaggtatcgactcactttgccgcgatcgcacttgaaaaagacggcgtgacggttccggtcgaatgtttacaaacacgcaaagaatcgaatcgttccattcgccgaaaagaagtggcggatgcaccagccaacgcttatttcgttcatgaattattgattgaagcagaagtgccgccgcttagttttgtagcgtatcaagtggttgaaaaaactcgcatatccgctaataaactgctagctgaaaccgcggctgtttcaattgaaaatgaggcgtatcaggtgacctttgaggcaggcgaactatccttaatcgaccgcaaacgcaaagccgcttatcagaactttttggcgtttgaagatagcggggatgaaggcgatacctatgattattcgccgccttatgtggatgatcggtatcggctcaatttgaatggtgctacttgtcacacgatccgcaaccaactaatggaaaaactcattatgaccggtgagtggcaagttgccaaagacctaaaggaacgccaagctaaaaagcgaacccaggcaatcccttatgaattgacgattgaactattaaaaggcagtcgccagcttcaatttcatttggagctcgacaatcgtgcgtgtgatcaccggatgcgggtgttgattgagacaccgaatcagaatgccttttcatactcggacacgccgtttggtacggtgaagcgagcggttgaggatcctcatattgacgattggcaacaactgggctggcgggaagaaccaacggcaattttcccaatgctgacgtatgtaaacagtcatgatgcgacaaccagctggacagtttttagcaaagggatcaaagagtatcaattcatcggggaaaagtttcaaacgatagccttgacgctgtttcgctcggtcggttatctcggccggccggatctgctaagacggccaggggtggcttcaggcaatgagtttaaagccattccgacaccagatagtcagttgcaaaagaaaatgcgcttcaaattcgcactgcagttagatcacgattttcagccagcaagcttggcaaaagattatctcgactatgcgatcagcaacccgcattaccagatccaagacctgaatcgctttaccacaacgcttaagtattttgtctcgaatcccttagaccatcaagtgccaacaccaaaaggaatgacgcttgacagtgagacgctggttttcagctcattacgcaaaagtaacgacgaaccgggctttgatattcgggtttataatccggatcttaaccgggaagtggacggcggcagtatcaaaggcttgcgtaatgtgcggtatacgtttgtagatctaaggggtcatgctgtcgctgaaacccaagaagatgatacgattctcctaggcacctttaaaccgggtgaaattaaaacggtccatatcgttgaatgaggagaaaacgaatgccagaagatatttttattttaatcgagtcgtgtcggttgaacttcactgctgtggaacaggtgatcgccgactaccatttgagtaaacaaccggcgatgaccattgataaatcatctgcgcacttagcggtatcaaaagcttctattacgcggttttgcaagaagatcggtttgagtaattacaaagagttggtctttctttacaagctgtctttaaatcaggaaacgactgatttatccgtatcctcaaaaatcacggcagcctatcattcgcttgcaacccgcagtgacagtcattattcacaagcagtcattgatgctttttgtgaacggctgcatcaacatagaatcattcatttttttggtaaaggcttcaattcttacgctggcgccgatttccagttcaagttttcccgagtcggcaagtatgtccgtgtgattactgatgaaaattcgattttgatgtccgccaattttgcgaaccaagatgagttaatcatggtggctagtttacgtggggatgacgaagagttgctgaaagcgatgaaaattgccaagcagcggcaggtaccgattctattgattacgtctaatcgttattcacaacttgttacccatgcagacgtgacgcttattgctgccagtttgaccaaagaagaggctttaggcaatatctcaccacaaattccgattttgattcagttggatatggtttatgagcgctatatccatttatatgccgatgccgtttctcaatggttggcgtcggaacaaattttacacaagtaacggaggaagcatgaagaaatttcccgagaactttttgtggggcgctgcaatgtcggcaccgcaaacagaaggccagagtttaaatttcggaaaatcagccaccacctgggattactggtttcaaaccgcaccggagaagtttcaccagcaacaaggaccagcgatcacatctgatgtttacggccagtatttaaaggattgtcaacgcatgcaggaaatcgggttgaattcagtcagaacatcgatttcctgggcccgtctcttgccagatggaaagacggtcaacccacaagcagtcgcgttttaccggcagtattttaccgccatgcgtgatcatggggtcgaaccgatcatcaacctgtttcattttgacatgccgatgtggttgatggcgcgtggtggctgggaaagtcgggaagccattgccgcctttgccttttacgcccagacatcatttgagttgttcggtgatctggttaaaaaatggacgacctttaacgagccgcttgtccatgtggaatgcggctacctgcatcagtatcactacccagcagtagtcgattttaagcgggctgtccaggtggcttatcataccttgcttgcacataaagcagcagtcgcgaagtttagaaacgcgctgccgtctggtgagatcggaatcattttgaatatttcaccgacatatcccaaaagtgaagcaactgcggacatgttggcagctaggcgctcggatctcctgaacacgcgtagtttcctggatcccgcagttttggggaccattccggatgagctagttgcgttgttaagtgaaaatgaattgctgccagtgacgaaacccgaagatcaggcactgattaaagaccatatcgtggatttcatcggcttaaattattaccaaccgcgccgagttcaggcaccaacagctcccaaaacgcctgcgcaaatgccggccgacttttatcagccgtatgattggcccgccaaaaagatcaatcctcatcgcggctgggaaatctatcccaaagcgctttacgatgtcgccatgatgatgaaaaacgactatcacaacatgccatggtacgtgagcgaaaatggtatgggggtcgcaaacgaagaagcttttatggcggacaatggcgagattcaagacgactatcgcatcgcatttatgaaagaacacttaaactacttgcaccaaggtattcgcgaaggcagcaactgctttgggtatcatgcttggacgttcgtggattgctggtcgtggttaaatggctattaagaatcgctatgggttttatcggctggatttagcgacaggccaacgatcaatgaagaaaagtggccgctggatggggcaggtcagtgaaaacaatggattttagaggtgaccaatgagtctaggggtatttgatataggcggaaccacggttaagcacggcatttgggagcatcagcagttaagcccagtcaacgcttttccaacacctgtcacatttgatgaattactaagaaatatggccgaaattatccgcgatgccaagcgcccgctaacaggcattgcaatcagtgcaccaggagcagttgaccaagaaaagcggaaaatactaggcatcagcgccgtgccctacatccatcaacggccgatctttgatgaactcgaacaacatctcggcttgccggtgacaatcgagaatgatgccaactgtgcagggatagccgaagtagaactaggtgtcggcagagaagcacaaaatattgtctttgttgttctgggtaccggagtcggcggcgcactttttgttaatcgacaactgtataaaggaagtcatctgtttggtggagaaatcggcctgctgaaaagtcagagtcagcaaatctttagtcaaaccggaaccttggtcaaagtcgcacaagcttattctgaacaagtcaatcgtacggttgatggaaaaatgctctatgagttaagcgaaaatggggacacacttgcaaaatcggcgttggatgaaatgtatcagaccatagcaaaaaacctctataatcttcaagttctattcgacccggaaatgattgttttaggcggcggcatctctcggcggccaacattagcagctgaactttcagggcgattatttgagcaactaaaaaaagaaggcattgaggaaatcatgcctgttgtcaaatgctgccattttcataatgatgccaatctaattggggcggcgatgaacttccagaagattttccctgatcagcatcggagttaagtaagtttaaatccgattgggtcaagttttatggcaactcttagccatcattattaagtgaagcgtgttgaatgattacctggaaatcctatagactgagattaagctcaaagaggagattgaatgactcttacagtcctcctaggtctttctcctttactttgcattcgagtcgttatattatcagaatgcttttatttaccgattaatgggtccatctcaatttatggcgaggaggatggaacatgacactgcttagaaaagttatttgggtattcgtgtttgttatttatggggtagtgcttttttgggcttcgttttacagcaacagtgcttattttttaccggtgatcgccatccctgctattttttcgggaatattttggctaatcgaaaatgttaagaaaaacaagaagtgaggaatgttcgtcttactgtgccactttggtttagcaagatgctttattgtcgattgatattacgttccgccctcttttgttgctttaactgaatgcttaagaagcggttgcttagaacgtaaatcaataaaaatgaaaaagatcgcagtactcggtttgagagtattgcgatctttttggccagtggctactttacggatcaagtctacttaaatcagacaacatttaagcattcctactaacgacagactcggtttgcttttgcgtatcaaccgctgcccgaatcgcctttgtaaactgctcaatcgcagcgggggcgttttgcgcttccttggcgacaatgtccacgatggcgctgccgataatgacgccatccgcaatcgacgccatggtttgggcttgttgcggggtatggataccgaagccgattgctgttggcacatcagtgtagcgtttgatttccgtaaccaacgtttttagaccggtgaaaaattcgtcccgttcaccggtgatgcccacagaggaaaccacgtagatgaaaccagaagcacttttggcaattttttcgatccggtggccagaagtcggtgtgattaacgggataatatcaatgccatacttttctgcaaacggcacaatttcagcgcgactttcgtatggcagatcggggatcaccagaccgctaacctttagctcggcgcaacgcttcaaaaaggtatcgtagccgtacttaaagacgatgtttaagtaagtcagaaacacgatcggcactgcggttttcttccgcgctgcttcaacgatttcaaaaacggttttggtgcgcacgttggcagcaaatgcgcgcaggtccgcagcctgaatcactggcccatccgcaaccgggtcagaaaaggggatacccaattcgacaatatccgcgccgccatgtgcaagggcaacaatgtttttgacagtggtatccaagtccgggtcgtccgcaacgacaaaagggatgaaagctttatgatttttgaagatggcagctaaattactcatcaacgtcaactcctttgtatttggcaatgctagcaacatctttatcgccgcggccggataaggtgcagatgatgatttggtccttggccatggttggggcaattttttcaacgtaagcaatggcgtggcagctttcgatcgccgcgacaatgccttcttgtctcgcgatgtattcaaatgcctgaactgcttcgtcatcggtgatcccaacatattgggcacggcctgcttcggcgagggcggcgtgttccgggccaacgccggggtagtcaagaccagcagagatggagtaaaccggatcgatttgtccatcttcgttttgcatgaataaggatttcatgccgtggaaaataccgacactgccgcgttcgatcgtagcagcggttcgcgccgtatcaacacctttgccagcggcttcaacgccgaccagttgtacagaaggctcatcaatgtatgcggcaaaactgccaatggcgttactgccgccgccgacacaggctacgatcatgtccggcagctgtcctgctttagcctgcagttgttgcttggattcaatggaaatgacgctttgaaaatgtttgaccatctccggaaatggtgctggacccacggctgaaccaagcacataaaaggtgtcatcgctgcgactggcccattcctgaagggcagcgttgaccgcgtctttaagcaccatcgagccgctggtgacagaatggactttggcgccgagcaaggtcatgcgataaacatttaacttttggcggtcagtgtcttcttttcccatgaaaatttcacattccatgcccatcaaagcggcaatcgttgcggtggcaacaccgtgttggccagcgccggtttcggcaattaaccggattttgcctagatgcttggcgagtaaggcttgtccgataacattgttgattttatgggcaccagtatgattgagatcctcacgtttgagatagatcttggccccgcctaagtcttcggtcatgtttttggcgtaatacagtagcgatggtcggttagcataattgactaacaaatcgttgagttcggctttgaattgcgggtcgtcttttaaagtgttgaaagccgcggtgattttttcgagttcggtcattaaggtttccgggatatactggccgccaaagtcgttgccatagcggccggcgcggtttgtaggttgagcagtttcatttagtgttttcataaatgatttcctcttttgcgttttgagtaaattgatgaattttatgcgcatctttgtgaccggcagtttcaacgccgctggacacgtcaacgatagtagggtggacgacttgaatggcacgggcaacgttttccggcgtcagaccaccggctagaatcagtggtcgcgtgatgtgtggaatagccgctagattgagcagttggccactaccttttccgctgtcgaccatgagataatcagccggcgaagttaagtcaattgcctggcgttcaaagacctggatgacttgcaggccagcgtgttgcagctgcttaatttcggttggtgtacttgttcgatgcagctgcgcaatttcaatggcgccggcttgataaatcgccagaatatcggcgaccgattcatgaacgaaaacgcccactggttgaatatcgggatggagtaacttgcgtaaagccactgcctgctccagggtgacgtgatgccgtccggaagcaaaaacgaacccggcgaaatccgcttgagcagcattgatggctaaaatatcttcgggatgcattaagccgcagattttcacttttaccatttttcaaatccccctgaatgccgtaattaattcccgcttgtgcttggagcgcatgagggtttcaccgattaagacggcgttgaaaccggctgcagctaacttttcgacatcttgttgcgtttggatcccgctttcggcgataacaggaatcgagtcaggaaccatggcgcgtagtttcagactgtttgtaaaatcaacctgaaaatttttcaaattccggttgttagtgccgatgatttttgcgcctgattgcaaagcacgggtcacttcttcggcggtgtaggcttcaacaatggcttgcatgccgagattctccgcgagttggcggaaggtgcgtaattgttgatcagttaagatggcaacaatgagtaaaataatggacgcaccatttgccttggcttcgtaaatcatatagggatcaatcgtaaaatctttacgcagtgtgggcactgagacttgttggctgatcgtctttaaatagcgaagatggccgttgaagtaatcaggttcagtgaggacggaaatagcatcgacgccggcttgttcgtaagcttgagcaatcgccatataaggaaaatccgccacgatcgttccttttgatggcgaagcttttttgacctcggcgataacgtgtaaaccaggctgctttaagatggtgaggaagtctgattttgtggtgggtggttgatgggcaacgatgcgtttgagttcagttaaggattggcgttgttggtggcgagcaaggcggattttggttgctgccacgagatcatctaagatcatgccaccacatccttacgtttggcagaaaaggcgcgcaggtgatttaattcttcacgtgccttcccagcgtcaatcgtttccgcagcgagagcgatgccgtcttgaatgctcagttccggatgagccagatgcagggcagcaccggcgtttagtaagacaatgtcacgttgcggtccgtgcttgccggcgagaatattttgcgtgatttgcgcattttcttcaggcgtgccaccgaccagatcggcgcgctgactgcgattgaagccgaattgttccggcgtcaccgtgtattgggtgagttggccagcgcttagttcaaccacggctgtttccgcggcagttgtcatttcatcaaggccgtcacgaccatgaacaaccagcgcattggtgacgccgagctttttcaggacgttggctaacggctcaagcaaagtttcatcgtagacaccaagcagttggcgcgttgggtgagccggatttgccagcggaccgagaatgttgaaaatagttcggaaaccaagctgctttctaacgggagcgacatacttcatcaacttgtgatattcctgcgcgaacagaaaagctaaattgttttcctgcaggctttgataactgacagccggcgtttcgttgatatccaagcccaaagcctcaagtacatcggcggcaccgctcttggatgaagccgcgcgattaccgtgtttggcaacaggcgttccagtcgccgcaacaacaatggcgctggtggtagaaatattaaaggtgttggcatgatcgccaccggttccgacaatttccaaaacatccttggtttccggaaaagcgagtgcgtgccgccgcatagaagctgctgcaccggcaatttcatcaatcgtcggtcgcttagccgttagcgcggttagtagactggcagtttgcacttcagacgcctcgccgttcataatttcatccaaaacagcttggctttcttcaaacgttaaatcttcatggttgacgactttttcaatagcttgtttgatcatggcgatccctccaaatttggttgttatagcgacttggttgttgagaaaaaaggctaagtgaaaatggccatcgtttgatttccttggtttgtttcatttttgggggacctcctttgattgttgagatgagtggttgttgctgacgcggtgaggtgcttcttcataacatgcttgcagtagcaaaaaaatccgtccataactaagaactctagttaaggacggattttccgcggtgccaccttagtttgatcgctcgagtcttcgacaaatagtctaacttaattgtctaaaaagagtccgattgatcacgcttagcgagggaccaacatccctccgacaactgacgtatgcctgacgtttccccgtactcgcgaactttcgggagaaccctccgtggtccatttaatcatctgcgttcgattgcactctcagcaacggcaactctctgtgcgcgcacaatgatcttgatctccacatcaacggtttttcatggacgaaatattaatgattgatttgaatattagagccttaccggaaaaatgtcaaggattttaattttcgcttgggtgttaatggaaaccgttttgttttagatgttcgtggtactcggttgccgccgatccgtccagagcgatacaggagcgaggcataagacaattagagcacccacaagataagtgtgactaaacgcgcgtgacaactgggtatttttacggcccgttattgcttgaaaagtcttttgcagcgtttgcttctgtgcaatttgtttgatgccgtttaaaaagatggtctggttcgtgttgatggtcatggcaccggtggccagcttggtgacactcactgacaggggtgagtggctttgttgcatcattttcgttaaagcggttaacccagttgtgaccttgatattagcgtggcgtaacgcggaactggtatcatatagtcgccttagatcagttcctgccgcgggtttgggtagattggttttcacttttgctgcttgagcaacggcttgtttcattttttgttgctgatgagttgtcggcgtggatgagccggcgaaaactttcgctaattgctggtgggccacgcttttgacgtaaggtgagagcactttttccgttacgatttgatcgctggcatggtgaatctgggtcttagctgtgtcgatattggtatccagcaccgttaccaggacggcgatgcctaggcaggtgccgatttggcgggcagcgttgacgattccggagccgatgccgcttttgtttttgggcaggtagcgaaccgaggcgaccaacgagaccgaagcgaagccaaaacccatcccattgatgatgagcagtacgacgatgagtgcggtggctgtgtcggttttaatgagcgaaagcaggaagagactggctgccatcaccagcataccggtgagtgtgaccggaatcgcgccgactttggcaagcagtcgagtcgcaagcggcatggcaatcatgatggtcagtgaaaccgggataatgatcaaagcagcgtgtaagggactatctcctaagacgtcttgcagaaaataattcaggattaagcttggtgcaactaaggcgaaaccggtcatgaagtaaatcacactggatgcactaagcgttttttcccggaaaagattaagctccagtaacggatgccgaaccactttttcagtcatgatgaagacaataagtgctactccaccgccaattaaactggtcaaaatcagtggtgaagtccacccgtattggcgaccttccaacagcccaaacgtgacgcctccaagtgcagctgtcagtaacagtaaccccggaagatcaatccggccggcaagtgattcatcatacgattcttttgcgcacacagtaaccagcaaaaatgcgagaatggctagcggaatattaatcccaaaaatccaccgccaagaagctatttgtaaaatgatgccaccaatgggcggtccgccggcagctgccagcgcagtgacagcaccgaccaacgcagcgacctgattgattttttcttttccgtagacttcgatgcccatcggtaacacgattggcgtgatgatggctccgccaagaccttgaaaaaagcggaatgtaatgagtacgggtagcgagggagcggtcatgcaggcggcagagaagcctccaaacagagccagacccagtaacatgatttttttacgaccataacgatccgctattttggaagccgtaatcataaaaaccgacatggcaagtgtgtaaatcgtcatgacccaactggtgttcgcaagtgaaccgtgaagctcggtcataattttgggaatcgcaatattcacaatagtcgtgtccaacgtccccataaacatggcaatcgtcaggccaataaaacaaagtactttagtcaagcgcgtcattgcatcagatcctttcatctgctacatttgtgtacacgtgacacatgtgtgactttcgaaagcactttgagtatactggggctaaagataagcaacaagggtttggtgacaagtgctacaaattggtggtgtttgtgtcagttaggagacggtggacatgaatggaaaacaacgcatggcgcgccaatcaaaacaatggttagtggatgcattagtgacgttgatgaaggatgaggcgattgaagatatttcgattacggaaattgtccaaacggcggatttatcaagaagaactttttatcgtgcgtttaaaactaaggatgatttaattgattatctgtgccgccaactagcagatgattatttcaaaagtttaaaagcggccacccgcgatcaaaccccgattagttttgccaccacgatgcaaaactttttcacattttggtggcaacaaaaagaccttgtccggttgttgattcgacaaggtctgttcgatcggttgaatggcgtctggcaacaaaatgcagtcgcacattatcgtgactttccggcgccgtggcatccgcaaggtacggatcaagaggtcaactacatcatggcctttgcacttggaggcctcaccaatattttgcggctttggctagtccaagcacatccggaatccccagaagaaatccagcggtttgcacaggccagctttgcacaattagcgcggagtttgggtggtggtgaaaataacgagcctcatgaagcgcaagggtgatcgtgcggttaaaagaagaaattgataggtaaagttaaatcggcattactaaatacgagcacgccgtcagcagcttttcccttaggtacatcgagtatgagattgatcgtcttttcctcgctcgtgttgataacaggtaggtttgatggtgtttcaatggcaactttctgattattcgcggaggcggtgaagtaactcggtgaaaacctaagcggaatggcgtaatggttattatggaaagttagcgagatcccggttttattttcgggcatgtttggcaagtaggtggacttaatcgtgaataatagttgtttgttatgcccgtagtaagcaactttgcgaccgatcgcgacgggcttgctagtcatggcactgtgcgcaataggatatgtggatggaacagcgatgacttttttacttgtgcgctggcgggatgttgtttttaaaactaattttgtcgatgtagcgtgaagctttttcagcgtcacagttttcttttttgctttaccgctggctaattgctggttattcaggtcttttagcgagtatttagtgttgggtttgacttgaaaagttaacttaagagcgtcatgaacagtggttacttgcactttggttgcttgtggcgattgcgtttgtgcgtgcgctgcttgctgaggggcgaaaagactgatgcccaaaagaatggcgaatatagtgactgcttttttcacagtgatccctccaagtggcgtggatttatggtatgtggctaattatagttgaactttgactatgaaggccatctttttctaatcatatcataaatatttagagggattttctgtggctgatatttgtcttcaaaataactcaaaagtggccatcgcatttttaacaggtctgcaatggctgcttatgtgagttcttttaccaatgggaggcagacgcgatccacgacttcaaaacagtggaaatttgcatcacaagtagatagctattaaagaacaatatttcctttgacatcgcttttgacagtgaaccgtcaataagatcgttcgttttcaggagcatcggccttactagatgccttaaagctagagtgatggctgaaattcagcgagccaattgccgctgctgctagcagaccgagtagccaaaccatgataacccgtatgcctgacgcaagttgcatttcaggtaacgccgtagattgagcaatggtgccacttgcaatcttccaaacattgaagaaacttaatggcaaccacggaattggcggcattatcaatgcactggctgtgaccaacaagacgatagtagtcgttatccatgcatttttagcgattagcgctgtcacaatattgaacgctgtcactaacgcaattaaaagcaatagtagtgcaattgagtggaagatgagttggccgctggtagtaaagtcctcggcaaaactattcaaggtattctgataggtgacatttattactgggaattgtaaactgccaaaaccatttaggcaacctgtcactagtgttgtgagcagaagcggcaggaggacaatctccactgtcgtcaaaccgattgtcaaaaattggacagcgatctgtgtgccccagccttcaccttgtagccttaaccaattggcgtgtgcgcgttggtgtgctaattctttggcgaaaaggccacctgagacgataatgccgatgagtagtaaataaaacggaatattttgttggaataaatattgcaggtaatcaaacccacgaacataaaaggtcggaaaccactcgcggacaagttttgcggtttcagctggcattgtttgcagttcttgatcagtaaatagcaggccctgaggatagtagctactaagtttgtgctgagcaagaagttcattttggtgttccgttcggttaactgcatccaaataatctggtttggctgaaccattcaaaaccgcgattcgataattggcgccagcattattgttcgttgctgggcgttggccgcttaaaacgggtaattccgcagcaaaccaatgattataagctgctggtgaacggttgagttgttgcagttcaatcttcagagcggttggtccgttagcttggcttgcaccttgatgaatgagttcctgacgatatttctggataaattcattttgtgctgctttttgttggaaattaccggtaacgccaattccggtcaggatggcaacgagtagccaaacccaccagcgttgattgcgtttggtcaattcaaatttcaaataatgaaaaaacatcgaatcacctccgaactcgggcagcaagcatactaagaagttgccaagtaaaataaagaatggcaaagtgtacaatagacatcatgatattttcttggagcagggtttttagaggttgcgcatgatcagtggccgtattttgccaactgtgagtgccactgataagagggcgtccccagagtttactgatgagtagaccaagaccaagcattatgaatagcatcaccagccaagtcatcagaataaccagaaaattcatggctagccagttccgatgattaggctgatttaaagtgacccatttgtgttggttacccacccatgacaaagtccaagttgttgacagaatcattaccatcagtaagagaacggcccaatgtttgatcaagtgactaaagtcggttaggaaaatagcaggaagcgttgcactgccattgatctcatatccttgatgagtagctactaatttccggaaaaatattgcctgctgccgattgaaaataagatcggcgctaaagtcatctgggctaagcttctttaacaacgcttcctggtgaaagactgctaagctggttttcaaatagttgcgattgtcatgacggctcagaaattgttcctgttgggtgtataaacgcgctaagtgacgagcatggcgcacttttagttttgcctgtgcgacttgatccgggctggtttcatcgggatgggtagcaatatagcgccaattgccatcaacccgacttaatgcggcttgtttcgtttctatttgtacgtttaatgtttgatacgtttgatgttgccggacacgactcattaagaagaaagcaacggcaatgatgacggcgagaccaagcgccaagctcaggacaaaacttgcttttaagcgtcgccattcaagaacgaacagtgcctgtttcatcgagatgttgcaaagagcgcattatagcgtgcttctgcagagtcatttggccacagtacttcttcatgaatttgttgtcctgtaatgaagaaataatgctgcgtcactttcatcaattcatccaagttatgtgacgaaatcaagacagcgacatcttggtgcgcaagggtaagaatgacttcacggaccagttgtaggctagtaggatccaacccatttagcggttcatcgagtaagagaatggtaggcttaaccaccaaagccatcaccaggagtagtctttgtttcatccctaaagaatatttgcccacacgttggtttaagaaatcggtcgtttgcagctgatcagcaatggcagcaacagaccggggattcagccgatgaactgctgttaagaaatctaaatgttgttgcccggtcaaatagggataaagaaccgagttgtcttggagataggcaactttttgaaaaatcaactggcttgttatcggtttgtccagcaactggattaagcctgattgcggttgtaataagccggtgagtaagttcagtaaggttgttttaccgtagccatttggggcgactaagctgtaaacgccgggttgtttcagatgcatcgttgcgtgttgaaagattgtttttccgcggaatcgaaatgtcagatcgtggatagccaaaagcatataagtcccctccaaacaaaatgcgttacatagcgaggctcaaagtaatggtatacataccttgcaacgttgataagccgtgacgataagtttggtgaaaggttgctaccatttgcaaaagtgactgataacacatgtttaattgatgtatgactatgctaatattaacagcatacatctcaccaaaaacccatcagcaaagaatatgacaagaatcatatttatttagttaacaacagttctaattttaggaggagtcgtgatgactgatgcagaatgataacgttggggcttattttcgagagattcgtaaacgacgagaattaggaatcgaacaagtgcgaggaaatttgcatcaatcaactatttcgcacttcgaacgcgatcatgatgacattactgtccgcaatttacttcagatccttcagccgacttttacaacacctgaagagttttgtttacttatcaatggtcaggatgaatcaatttccagtattctcaagaatatatctgaatattacgatcaacttgacatcgccggtttaagggcattttcagccgcatttgaacaagcgcaccctatgactgcacctgttcgcttgatcttgttgattcttgaaagttgtgtgaaggaattggcaggtgaagatccccttttgtcagccgaagattgtgattatgtacaagattatttgttgcagccagggaaatggtttagttttgagtatgttgtttttggtaatcttgcctcatcactacccggtgaagttaacttgcgactttggaagaagatgttgacttcttttcgtgagtttcacttggccacgtacgatgaactgctcgtcaacattttgtacaatgttgctgcttcttttttgagtcaagacgatttgtcatcagctgcgtatctcctgcagtcgctggatttatccaaggtagatcattacgttctttatgttcgtcatcatgttgcttttttgaagctagttttgagttatcggctagatccccaaaataagcaaaataatgagaatctcaaagtattcttattaggcactcgaatagttgatgaagcacttttcaaaaagaatgttgatgctttgaaggaactgaatgttgatgttcatacaatcctgccatcggaaacgtgaacaataggtactcctgatgactaggagataggttgcgcaagtggtaccaaaaaagcgctgaccagcctctctaggccaagtcagcgcgttctttttgtttacaggaaatttttccaaacccacaaccaaatgatccgctgcctgaacgtgcaatatagtcacaactgatcaagccagtcaaaatggtgtaaccacttatcttgcgaatagataactcgattctaaaagggggttttgattctcgttattcatcccagacgttccactaaaatgccattatcgtcgatgctttcttccatcattgctttacgtaaatcgtagtcggaattactctcgaagatactatgcttaacggacaacagactgatgacaccattttcggcaatgataggctaatattcaacatttctaccaatattaaatgacgcggaaactgtaatcatagttgaatttccgtgacggcgctttttaacagtcatgtttatcgttctttcccatgccatgaccatctgtgcagtttttttgtatcaaggtgttagccgaattaaaacatatagttgctcttgtaagtaagagcggtttgcgctattaatacattaaaaagggagtggattgcttatgacattagaagttgttcctttttcatccgcatcatccgaaattgatgggttgaagattattcatgtgaagatggtgacggatgagcgcggaacggttcgagagctgtttcgccagagccagcattcgcaagtgttagtaaaccctaatatggcttggaaacaggtcaatttgacccggactaagcgcggggctgttagagggttgcatggtgaagcgatgtcgaagctcgtcacggttgcccatggagaagcatttggtgcctatgtggatacaagacgggacagtcctactttgggttccgttgtcacggttcgtttaacgcccggtgtgcaggtttttgttcctcaaggcgtttgtaatgggtttcaggcggttgccgatgatacggaatatctttacttcttcgacaacgaatgggaaaaggggatgagcggtgtggcactaacacctctggatcctgatttggggattgagtggccgatcgccattaagcctgataatttagcgcaaatttcaaaaaaagattccgaggcgcctactttgaaggaagtgctgaaacaactggcagagacgcggccaaaggaataactagcagggatagcgactgccaacccgggtacatagtttatcaagtgacaggtacaaaatgtgatcctgagacgtcttttgataaaacaaaacgcgctgacccagcttttttaaaggtatgtcagcgcgttctttttgtctacaggaaattttccaaccccacaaccaaatgatccgctgcctgaaccttgcgaatggcaacggcgactccttgcatgaagctttggcgatcgaaggagtcttggcggatggtgagggcttcaccgggaccgccgaagaggacttgttcgtgggcgatgtaacctggtaagcggatggcgtggaccgggacgtcatcaatgcgttggccacgggcgtcgttgtcgatggtggacaagggcttttgggtgcgtccggcggcgattttgtgcgcagtggcgatggcggtgcctgatggagcgtcggccttatcctgatggtgcatttcgatgatttcggcatcagggaagtaggcggcggcttcctgtgcgaacttcattaagagaaccgcggaaaggccgaagtttggggcgattagaccgccgagctgacgggcttgggcgagttcgattaagcggttttgatcggcttgcgtcatgccgcttgtgccaacgactgggtgaatgccagctttgatcgcagcttcaatgttggcagcgacggcagtggggttggtaaaatcaacccacacatcggcaatgtcgggattgagctgatcatagctcgtgagcacttttgtatcagctggtagtccatatttttgggcatcagcggcagttgctttgggatcaaaaacggcacttaatgcgaaatctttttgtgactggaccattttgactgttttttgacccatggcaccgcgaaaaccggcgacaagaacgtgaatcatgcaagcacctccgcttcaattgctgatagttccgaaacccctaatagatgggctaattcttgttgttgtgccgctgttaatggcagtagcggtaaacgcgggctgccgactttgaatcccaaagcattaagtgcggctttggtaggcgctggggatggaaaatggaataacgcggccattttcggtaacagttgccgttgtaatgcggctacagtggtgacgtcaccgcgatcaagcgcacgatacatttcccggatgctgtgggcatataggtgggaggcaactgaaataacgcccatcccgcccagtgttttgatcgtcagcgcttgagcatcttcgccggtccagacgttgaaggcatcatgtttggttcggtcgatgatatcgctgagtgctgccaaactgccgcactgcttgatcccttgaatcatggggttttgtgccagcgttgccacagtttccggtaacatgtccacgccggtccgtcctggaatgttgtaaataatgatcggtttttgcgcacttgccgcaaccgtggtatagtgcgcgatcatgccattttgatccggtttgttgtaatacggaaccacaaccaaagtagcatcaattccggcaattccaccgacttcatgcgtaaaatcagtggtttcgcgggtgttgttagaccccgaattggcaatcacgagtgcgcgcccgtgaaccatggccacaaaacgggtgtaaagggtgatcttttcatcatgactcaacgtaggcccttcacccgtcgtagccccaaccacaaacccgtcagtaccttgatcaatgagatgatcgactaaccgttgcatactatcatagtcaatttcatcgcggtcgttaaacggtgtcacaatcgcggtgattaattctgctctttgcatttaaaaacccccctgagcgcgagccggcgcggttagaagtcggagtgtaagcggccttaagcgtgatggcccggtcttggccattgcgcttaaggtccttatacgcagacttctgcgccggggagcgcgttaaagtgagcgcgagccggcacgattagaagtcggagtgtaagcggccttagccgtgatggtcgggttttgaccattgcgacccaggtccttacacgcagacttctgcgccagcgaacgcattatgctgaatccaactggcaagccatcaccaaaaaatccgtgactgcccttgcacactatcaatcaagaccctcaagccgcttccgccatccgatgcgtcagaaaatgaatgatagccgtcacacctggcgctagagctgcttcatctggtaaaaagtcagcggcgtgcaactgcgaatccggatcattcacgcctagccaaaacatggtgccaggaattttgtttaatagataaccaaagtcctcaccggtcatgactggatcggttggcacaaaggtcacggctgggtcggcttgcatgaaatcaatgaaatcttttgtcaggtgcggattattttcgacgggataataaccgccttgattcaaatcaactttgacttcgcagttgaaactagccgcgatgccttgaccgatatcccgaattcgctgttgcaagaaattaatttgcttttgcgtgaagccacgcaaggtgccttctagatgggcgctgccggcaatcacgttgcggatggttccggcgcgcatgaggccgaatgtgatcacggcgctgtctgtggggccgacattgcgagcgacaaccgtttggatttggctgatgaaactggccgctgcgacgatcatatcgttagcattttgcggtaacgctgcatggccgcttttaccgattaaatcaacgttaatctcagtggtgccggcaaaaagcgttccgagccgcgtgctaatcgtaccagcaggcaggtcaggccgatcatgcaggccataaaattcatcaatctgccactcaccggtgaaagcgcccatgtcataagccagtttaccgccattcttgctttcttcagccggctggaagaagaaaatcagatgatcctttggctgatgaacggcaaaataactgagaatgccaagtgccacggtcatatgcatatcgtgaccacatgcatgcgcaatccccaggtgatgcgaggcaaacggcaaaccggttgcttcggtgaccggtaacgcatccatatcggcgcgataaccgatcgtgcgttgcggatcggagccagtgactttgactagaatggcggttggcaacttcggtaaggtgcggatggtgagaaaagtctgcggaaaactttggatggttttgagcaggaaagcgtgggtttctttttcctgcagcgctaattccgggatttggtggagctggcggcgaatagcaatgagttcggcttccttcattaaatgtcacaactttctgagttcatcaagcagcaccgtcttagcttccgtttgatcgttgacttttttaatcaccttggctgggacaccggcgacgactgtatgggcaggaacgtcattaatgacaacagcgcccgcagcaatgacagccccttcgcccacggtcacgccttcaagcacaacggcattggcaccggtcatcacgtgatcaccgattgtcactggcttagctgacggtggttccaccacgccagcaagcactgtgcccgcgccgatatggcaatgtttgccgacaatggcgcggccgccaagcacggcccccatgtcaatcatggttccggcaccgatttccgcgccgatgttaataatcgcgcccatcatgatcaccgcattgtcaccaatcagcacctgatcgcgaatgatcgcaccaggctcgatacgggcattggttgttttgatgtccaataatggcaccccggtgttacgaccggcagcctcgacatagtaatcatccagtttagcggtttttaaaacgggctgaatctctgcccagtcaccgatgacagtgcccgtgtgtttgccaataaatgcatgaacacttttagggaaatgcaagtcggctaatttccctttgagatacactttgactggcgtggttttcttgctgtttgcgatggttgaaatgattttttcggtatcgagttgtgccatgatggcctcctatttttttgcgacagtagtggcggttgatgtcggcgctgattgacttggggcggtgtagtgctgatcgtgttgaattaaatcggcgtaagtttcacgcgtgaccactagctgtgcttggccattttcgacaaaaacaacggctggacgcgggttgcgattgtagttggacgccatcgagtagccatatgcgccagtgtcgaacacggcaaccacatcgcctgggtgtgtggccggcagcggggcatcatcaatcaaaatgtcgccggattcgcaatactttccgactaaatggacacgttctgtgggctgggcagtcgggtgatccgcaaccacagcagtgtattgagcctgataaagggcagggcggatattgtcgcccatgccgccatcaaccgcaacgtaaggccgcaagcccgggacatctttgcggctgccgaccgtgtacagactgtagccggcaggaccgacaatcgagcggcccggctcaatccaaacggcaggcaatggccagttaaaaccgtggctttgggttttcaaggtggtcacaatcgcctgcacgaaagcttctggtggtagcggatcatcctgcttggtatacgcaatcccaaagccgccgccgacattgaggactttaggaataaagccgaattgctggtgccaatgatcaaggactgccagcagcttttgggtgacggcttcaaacccggcgacttcaaaaatctgggagccaatgtgggcgtgaatacccagcaaattaagatgatcatccgccagaatacgcttggctgcttcatcggcttgcccgctttcaagatcaaagccaaatttactatcggtttggccggtttgatcataagcgtgtgtatgagcactaatccccggtgccacccggatcaagacgttttgcttgcccacggccgcctttagcaactcgtcaagcaggtccaactcgtgaaaattatcaacgatgatcgtgccaaccccggcgtctaaagcttgttccagttcggctttgcttttgttgttaccgtggaaactgactttgtccatagggaagcccgctgcttgagccgtgtataactcgccaccggaaacaacatcgacatgaatggcttcggctttggcgacctcgtacatcgcgatggtagcaaacgccttggaagcgtaactaacggcgtatgcaacccccgcagtttcaaaaacctgcttgaacgcccgaatctgatggcgaatggcgccaacgtcataaacataaagcggcgtttgaaaagtgtggacaagttgactggcaacaaccccgccaatcgttaattgaccttcgtgatttgtggcaaaattcattcagttcatcctcccgagtgatggcagggcaacggcaaacgaaaagggacccttttgtttggccgcgcgtcaaacaaaaagatcccaacttgcaatctacttgaatgatagcgccccgcttagatacctaagcgacagtacaggatttatttaaccctggcccaacaggctcaccgatcccggatcacccatttcggcaaccgcccctttcaccgaatgtcaccacgaaggatctcgctcgattcggttagtcatgttggctgcaacctctatctgtttgacaccacattataataaaaaacggtacgcgtcaaatttttgtgagcgcgagccagcgcggttaggagtcggagtgtaagtggccttgggcgcaatgacccgggcttggtcattgcgcccaaggtccttacacgcagactcctgcgctcgggagcgcgttatgggagtaaaagcgaactagtgcccttagacggtgatggcccgctcttggccattgcgaccaaggtccttacatgcctgctcagcggaacgcgcgttatggtgagcgagagtatctcttactcagagaccaaatataagagcctcaaacatggtggctgacgcttactttctatttcttcagcgcgaacagtgtgactgtattccaaagaaccatcttgaaagcctgattcccaacaacccactttcaatccgccaccccaatacctagcaaaaaattaaaaacatttttaagctcattattactatgcaatggcgtcaaaaaatgctgttttggcgggatggtgggggcttgtgtttctctgggagtctgttaaagtacagaataaaatgacagagttctcatttgcattgccgtctgttgatgccagatgaaaatcacttacgcaatcgctgtcggttggtgattggcaaggttgttggcgtcaaggatacactggaaaatggggttagggaggcagtttatcgtgcgtgtcgtaaaatttggcggttcgtcattagcagatggagcgcagtttgccaaggttgtggcgattatgaaggcgaatccggatcggcaggttatcgtaaccagtgcgcctggtaaacggcatcccggcgatgtcaaggtgacagacctgctaatcaagtacgcccaagcggtgttgcagcagggtgaaacggctgcaatcgttgctgaaattgtggctcggtatcaggccattgccacggcgttcaaccttgacgcgcaagttatggaaaaaatcgaaaatgaactataccagttaccgaataccagctttaaaaatgccgactacctaatggctggcttcaaggcacgaggcgaaaaattaaatgcttttctcatgacggcagttttgaaccacgaaggtatcgaagccacgtatggtgaaccgaaaactttaggaattgttgtaactgatcatcccaatgatgctgaggtttcacgtgaaacttacgatcgtttggcggcatttcggcggccactgggtgtgctggtggtaccgggattttatggctataccagtgatggtgatattgctactttttcacgtggcggctcggatattaccggtgcgattttagcaaacgggtttcatgccgacctgtatgaaaacttcaccgatgtagatggcgttgcggctgctgatccacgggtggtggcaaatccgcagatgattcaagaaatgacgtatcgggaaatgcgggagttgtcatatggcggctttggcgtttttcatgatgaagcgattctaccggccattgcgggacagattccgattaatttaaaaaatacgaatcatccttctgcccctgggacgatgattgtcccggaacaacattttgtgccgaaacatgcgattaccggcattgtcagctcacaacattttggcgcgatctatctgcatcgttatttactcaataaggaagtcggatttacgctcaagctgctgcaggttttggcgcgacatggcatcagttatgagcatatgccaagcgggattgacgatttgaccattattttggatgatcggcagctcacagaggcgaaacgtaaggccatttgtgctgaaattcaggaagttgtacacccggacgttttgaagtggattgacgattatgcgattatcatggtggtaggtgaagggatggcacaacgaaccggattgattcagacgattttgcagccgctagcgagcgccggcgtgcatgtgtcgatgattaatgaaggggcctcccagatttcattgatgcttggcacatcgcgggaatcggcgaatcgagcagtcaaggccatctataacgcctttttcattccgatcaatcagcgtttggaggtgcagtgagtatggtgacattacaaaaagttcatggctctgaaaatagtttctttttattagatgaaacgcaattgaaacagccattgagcacaagccaactggcagcttttaccaagcaggtgacgaatcgccaaactggctggttaggcggagcagatggcgttttggcaataacggatgcgcccgggactgctgggaaaatgacggtggtgaatacggacggcagcctggctaaattgtgtggcaatggtttacggacagttgcccgctatctaagtgaaaaaaccggtcaatcagcattcaaggtgcacacggattttgccgacctggccgttgcaaaacagtcgccattagcttccggtgttccggcatattcagttgaaatttcgccagtcagttttgccgctgctgacttgccatttgccaatcttggcgttgaccgcatcgttgacactgtcttgccggctatccatcctagtttgaagtttaccgcagtggcagtacccaacccgcacttaattgcatttgtgtctaaagaagaactggtcagtcctgatctggagcgaattggcaaaatgttaaatgccaaaaatccgtattttccggaaggggttaacgtaacgtttgccgaaatcttaggtaaggacaccttgtttgcccggacttatgaacgcggcgtcgggttcaccaatgcatgtggcaccgggatgtccgcaacgaccttagcgtttattctgactcatccccaggaggcggcgtttgagtgcgtgaataccgtgtataatccaggcggcatggtgaagacgatggttcatcatgaccatgggcgttactggatcgaactcatcgggaacgcaaccgtgacggcgacaatcaccgtaccggatgaagcgcttgaaagtggtaaactgacacaagcaactttccaacccactggcgagcaggcggcttatgagcagttcattgactcattgccgcatcgagatttggcagacacattaatagaaggagcataaatcaatcatgagtggttatcacgtagcagttgtaggggcaaccggcgcggtcggaacccggatgttgaagatggtcgcagaaagcaagctgccaattgcgtcagtccttgccttggccagcaaacggtcagaaggtaagacggtaccttttcgtgacgggacgttaacagttcatgaaacaactgatgatgcgttcaaggggattgatattgcattattttcagcaggcggctcggtttccaaacgttttgcccctgcagctgttaaagccggcgccgtggtcgttgataacaccagcgcttttcgtatggaacccgatattccgctggttgtccccgaagtcaatccggaagccctgcgcacccaccacggcatcatcgcgaatccgaactgttcgacgattcaaatggtgaccgcacttgagccgatccgcaaagcattcggcttgaaacaagtcgttgtttcaacctatcaggcagtttccggcgccggacagtcagccatgaatgaactgtttgatgaaacccaggctgctttggacgataaacccttagagcctaaaattctgccaactgctagcgacaaaaagcactatccgattgctttcaacgccttgcctcaaatcgatgtcttcgaaccagacggctatagtcatgaagagtggaaaatgattcacgaaaccaaaaagattatggcgggcgacatgaacagtgatgcgatcaaagtcaccgccacttgtgttcggattccagtaccaattgcccattccgaagaagtttattttgaaattgaagacgctaacgccaccgccgacgacattcgcgctgcattaaacgatgcgcctggcgttgtggtgcaagatgatccaagtcaacagctctatccgcaagctatgaatgcagtcggcagcaaagaggtcttcgttggccgtattcgcccggatgctgaaaattctcggttcttccacatgtgggatgtttccgacaaccttcttaaaggagcggcatggaactccatgcaaattgccgaaacgatggatgccatggggttaattcaaccgaaataacgaataagtttaataaagccatttgcgtagtgcacgtcaaaacactaggcaaacggctttttgttttgcagcggggggacaacagacgtaacatgccagcgtcctctgtaaataacgcctctaattcttgctagaagcttaagatgctgccaaattgattgacggatttcttaaaataactatactgatgaaaaacgagtataggagcatgttacatgaaaaagcatcgtttcgtcatcgcattgatcggcttatcacttttcgcagtcagcagcactgttgccgccgatatgacgcaagccaatatcgatcagcaggttatccaatacacgttgaatggcaaggggctagtcatcttcaaccaggcgcgcacctatcgaacgaaaagcaccgccgcagtttataaaggctccttcgcggcagacgcaccgacagcaagcttcaaaaaggtcggcaacctgaccaatcataaagattatcgagtaacgcgtaagataacagccaaggctaagttgaaaggatcggccacgcagactttttactatgtgtccgggcacggttgggtgaaaggcagcgacttgacgcgatcgtgaactgtgtcttcaaaatcagggaaatccgtgtagcaacgcagctaagattgcgtgaatctgtacggatttttctttttgactagaattggtatataaaaattgttgacctgcctgactgtgaacgatacaatcaaactccgactttaaaaaatgaagaggtgatttgatatggtaaacgtttactttggcccaatcccgcagagaccagactcggtgctggtgttgcagttttatcatggcagactcatttgggtacataatgtgaaacggaaatgggagctgaccggtggtaaattggagccaggcgagacggttattcaggcggcggttcgtgagtcttacgaagaatccggcgcaatcgtcgaacccagtgcgatttcgtcgttgggctactatgttttgccaaccggccatgtaacggcagttgtacaagcagaggttttacgtttagaggcgatcccgatgacttctgaaaccgatgatcgccgtttactctttgcaccattaccggatgcggaacaatcttttcatgatcatatttatcggcaaatttttcagcacattgggtggccccatgagtaagcggcgcgtgggcttgttacttaatcttttgtcagtggctgtgatggcagtgacaccggtgatgaacaaatggtcgatgaacaccctgtcgccgctagctgcaagtttttataacgcgcttgtttcactcggtttgacttttatcacgattggtgcaacccatacaaaattgatatgggtgaaaagtcccgttatttgggtattgggactgaccaactgtttaggcattgttttgcagtatttgagtcttttctttcttgatccggtgagtgtcggattgatcggccgcttctatattgtttttgcgattttattgtctgtattcttgttgcatgagcggtttgatcgccgagaaatagtgccgattgggttatgtattgccggaacagcgttggtatccgatttctccgggcgtatgactgacatgctcggactggtttgtgcgtttggctacacgtttagttttgcgttaaccaacacgctggcgaaaaaagcattggcgcgtgtcaatgaaaaaattttgcttttgtacaaccaagcaaccgcagtgatcatactcggcattgttgcagccggcagtggcaagttagctttttcgcccaacgtgggtattggtgccgttgcggtttcggcgttttgctccgggtttctgggactgctgctgttttaccgcggacttaagttcatctcatttcgcgatgccaatttaattcgcgcactaaacccagtatttgttctcgtatactcattaccttttttccggattcaaatgacgccggcgtttatactaggcggcgggttgattgtcctgtcaattgtctggatgtctttgccggtgaaaaaacgcccagcgattgggaaggaaaattgacagtgagaccgctatttttgctaggcttttctgaaaatcaacgttaaattggaaaaacccgacgtttatttggacgatgccacaacttcatggaattattttacactagggatagttagggaaaaagggtacctaaaaagcagtttaacagagccagcggttgttgaactggctagtcatcttggaagaaaagacaggctcgatcttgaagaagtttaagttggaaacaacaaaaatatatctttattattatgcttgtcagcaggtaactcgatcggtccgtctcacagtatggttgggttaggtgtcacgttttttggagatgaatacttatcgttgatttaagggaagacatcatcgctacttgcgtttttacggtatttctattttgcgttgatataatcctaaaggctccgctgcagattattagaaatctgttcacggggctgcttttcttcgtgattatgttactagttcaatatttatgccgtaaaaaacatgatgttcatgaggagtcttgagggatgactgaacgatggtttcaaaaatcacttgtctcacaacgaagcgttaacgtgaaatcttacgttgtcggatactaaccgttgataatatcttttgttagatttaatatcaccccaaagtttagcgttgctttcattgcttagatcaatgattgaataaggctgttttgaaaaggggattgatttaaagaaaaccaaataatgtttatacgtgaaggccatgctgtacgcagcggccttcttttttcgagggtaggaatgaacgtaactgatttttgcgtttgggtatttctttttaagtttcctcaattgcctttttgttggtctatgggtaagaactaaatgacgttgcggttttaaaaaggggactcttagacggagaatttgagggaaatctagtttaattactttttcgatattgtattgtgcccgtaactttgcaagctttttaattttgggagaggacaaaaaaagaatttgtctagacgaataaccaggacatccatataaaaatattccaagaatggttaatactgaggctggtgaaaagacaaatataagaaagaatataaaactcagaatagttgacagtctatcaaacatgtttccagcaaacacttcacccagtaacattaaacttgcgtaaacgcctagggtgattctgataattaatatcatccttttttcgaaaggaattgtcattaacaaaaccatagattggtgaatgataccaatgtaatctttgaaagagatatttgagacaaacaatactagctccccttttttaagcagaaatgattccgcttatcgaatatatgacaatttagacttagctcattgattagtggcatcttcggctattcagatgatttatcaggaacacgccgtcaaagaggcaaagggtaaagttaatgcaactcgagttaagtgaattctaacatgaaatcgtcatttcagtacattcaagaatgtacagagtaagacctaaagagtgaaagttgaatatccgcagaaagtcccgagaaatcgggactttttgacaccaaaaaagacgcaaagcactccgcgtcgtataattaagttgaccaaaaccaacatacaacggagtctttacatccatgtttactatacaacaatcaacccataatatttagctcaaaacaaaacatttcttcaaattggtccatctttctgaggcgcttcggcaagcaaacgcgcaaaaacacaaaggtatcaagattgccagcttgtttcagtggattatcctgtccatctttcaacgttactcactgcatcgagctgaagccaatccaaacttttcaaaacggacagcccgtaattgcttgaatgatgctcgaatcaattggcagcggctggttctactggtagcggttcgtctgattcaatatttccatcaatttgccgcagccggtcgtgatcaagccttcgtcattgacgactcactatttaagcgcgagttctccaagaagaccgaattactctccaaagtattcgatcatgaccatgaacggtactataccggccttcgggctttgacactaggttggagtgatggcaatacctttctgccgctcaactttgcgctgatggcctcaagcaagacaaagaaccaagttggcctgcaaaagccttatgatggtcgatcacttgcggcaaagcatgccagcaagcccatcgcaaaatgaacctagtggcacttgaactggttgattaggcgattaaagcaggtgccaaggcacattatgctttatttgatagctggtttgcttatcccaagatattccatgaactgcttaaacgcgggatcaatggcatcggcatgatcaagcagacggagaaagtgtattttcgttatcgtggacgagaaatggatgttaagcgactctacgccacgttaaagcagagtaaacggccaacgcatcagcattatctgtacagtcccattgtgcaatacgatatggacggtacaaagatggtcatgaagctggttttcgtgactaaaaaaggtgccaagggtcgcttcttggttttagcaaccacaaagactaatttgcgccccgaacgcatcattcagatgtacggcagacgctggcaaatcgaaggctacttcaaggttgctaaacaatatctgcgctttgatgcgacacaagtacgtggctatgacggcctttgcgcacatatggcaatggtcatgatgagctatgatctacctgccttatgtcaacgtgaagaaactgacgaacgcacgctgggtgacttgttcttctactatggaaaagctctacctgatatcggcatttcgcaagccttggattggctcatgacacaattaattggtatagcgtcaacttatcatgaagcccaagtggtcattaatcagatcatgagtgaattcatgcaaaaactgccgaagagtcttgcagatctcttcggcagcgcggcatagatagaatttgaatatgattttgtggatacactctgacgcagcggcagtcagagccatttttgtgctttcactctttagttcaatatttacaccgaaagagaacatgatgttcatggggcatttcgattgattgactgaacgatggtttaaaaaaagattgtatcacaacgggagaattagcttaaaattctgccattaacgggcactcaaaaagcggtgaataatttcggtgttcagtcaaggaatgcaagaattattcgccgctttcgtctgatatatgattgatagcgtgtgaactgtgatccgtcttccctcgctgaaaaaagcgcgacggcctattttccccatccagtcaggattgcatgaatgcccatcaaaaactgctcgtcgtcggtaaacttctgattttctatcggttgcatgaatgtttgcagtgtttttgaagggtgacgtggtgtcacttgtccttgcgattcggaattatctacagtctgaggattaacggcttcggtccaaacaaagccaacagtataggcggtgagcgaattaatcaggaacacggtagttgactgaatcttgaagcctttttttgtccaggctgttaaaattttatcgactaatgcgaactcagacctagttgctaacggacggcttgaaattaatggcaggacatgcggatgcgctagcaaggtttggcgtaaacgggtcattaagtgaatgatttgttgctgccaaggttcatcggcagttgcggggtcaatggttaatacgcttcgccaaagcatctctaccacgccatcaaaaagggcttcctgattaggaaaataccgataaacggccattggcgaaacggccatttcctgtcctaattttcgcatgctgaacttttgcaggtcctcgcgatctagcaaccccagtgcgacttgcagaatataggcatgacttaatgtcggtttggttggtttgacaggtttcacggttgatgttccttctttcaatttaagacccgatcagtgaaaatatacccaatataaccctgacaatcaagcaagactcgcgttcacgtagatggtcgtgaagccagagcgtacgatgagtgtcagggttatttgatgtagcaggtatatgtaaccaaaccactttcctttattggtgctggcgaggtcagccgcagaatcgatgtgatcggagatggtatgggttgaccgtgcgcctagacaatactgcgctttttttgggcgatcaaggccgtgaatacacagatgatagtaaagatagggagcatgatgagcgctgaaccaagtgtgcgagcgccatccagatattttcccaaagttgcaatgtaatgctgagggaaaaggtattgaaggcgggcctgtagcgtggcttttttaattgagaacaaggcgcctgataacatgaatgaaaggacgactagaattgttccaatgcccatagctccttgtttggtacgtgtcagcgtcgcgatcataatgccaaatgtggatgcgaagatacaaacaaggggtatcgttgcgaacagtgtaccggagagtttaataccaaatagtggcaatataagcgccgtgatgggtatgctcaagcagatgagaatggctgcattaaaaataatgtgctgaagtaaatagctttgatgagaaagcccgcttaaatagatgcgctggtcaataccggcacagtcgtcaaaatagaacttatacagaattagcgacaacatcatgacagtgattcccaacatactcaggaagatcttgaaatgatgagtgcctgaaccagcaactttggaataggtgccgttattcaaataggcagttagttgtcgcttcaaagctgagctgcgaacggaggttactgtgtaatgtcccgcttttttggaaacataggcatcatattttcccataattagattctcggtgatgtcgctggaatcagtgactttcgtgaacactagctgccgtttttcaattggggccgcttgcagcagttccgaggcactggtagatacgccgacatcaactttgggtgctttcatggtcactgcaaatgccgttgcggctgtcatcacaatgagaacgagagcagctatgaacaaatatgcaggtcctttcaggaaacgcatggtattatttttgaaaattaaaagtttcatctttatccctcaaatttttctggccgatacagcatatgaatgatgatcaaaaagacacacgagccggccactagaattgcaaatgtcgtaatcgactcctgaaagttatggtcgtaaatgattgcaaagaagacgtcagaaacttttgcaatcggtgacatgtcggcaattgctgcaatttttttgccgaatattttcattggaaagaagagtccggagacgatagcaaatacgttaatgacaaggtttaacagattcgttgagagatcctcgtttcgcaagatgacgcagaatgcgccgccgaacgtaattgcgaaaataacaaacgcgagatccagcaatagcaacggaagaatctgactgccgccaaaattaacgaatctgatagcgttgaacagtaacatgtaagctgccaatatgccataagaaaagccggtagcaactagtaatttagaaagataaacttttgttcgcgcaatgggagtataaatgatacgattgttggcgttttttacacgactaccgaatagcatgtctggcaaaatgacaaccgttgccatggataggtaaatcatcatggtgacaccataataatcatatgaggtcagcacatcatcgccaaagatgctgttaaaaacaaaacctgttacccagattagcaaaggcgggtaaagtaagagataggtcataatcggtttgtttttcagaagatgcaagcaatccaaacgcataattgtgaacatggcgaacctcctcttagtcgcgtaattgttttccagtgagatttaagaacacattttcaagattctgttcttgtttagaaatatcggttagcgccagtccatgctcggctagaaaagtgagggcttgattaagggaaccggtatttgccatgcttaatagcaggctgttttggccaaccgatacggctttattaatgccggccatttgctctagtatcaccgcatcttctgcagttgggtgtccggttagtgtgagttgatagctgtcatcaccgaatttttttaaaatagcggtgagttggtcattaagtagaatcgtgccaccatccatgatgatgacccgatcacagatttgctggacttcttccatgtaatgcgtgacgtaaatcacagtggcaccatggtttcgtaatgttttgatggactcaagaatgtggttacgtgattgtggatcaataccgactgttggttcatcgaagataatgagttgaggttcatgtgcaatagcacaagcaatatttaagcgtcgtttcattccaccggagaaagtggccggcttgtcagcttgtctttccaaaagaccgactttagctaatgcattttcgacctttttacgcatctcttggcggtggacgccgtaaagtgcagcaaagaatttgacgttttcgtaggcagagatatcctcataaagcgcaatgtcttgggggacgatgcccagtttttgcttaacctctttacgcggcatttgtggattgttgaaatatacaatcgtgcctgagtccgctttgagtagcgttgaaataatgttaatggttgtacttttaccagcgccgtttggtccaagaaaaccaagaatttcaccgtcttgaacagcgaaattcaagtcgaccagtgcttgtttaccggttttataggtttttgacaaatgctcaacttttaaaatagtcattgatcaagtctccttaattttggggggagttagcgatacatcattgtttacgtcgtattccgtgtttacagtgtaatcttatgtttgaaaattagctagctaaagttggtaataaattggtaaaaattgcctgtcacgaacggataagttctcctaaaccctttgaaaacgcgaaaagccagctattaaagcgtcaaggcccaaatgaatcagttcctgcgtgctcttttacttccttgctgccagaatccgcttgcacagtatggtagaatagctaaagaaatccttaagtatctgcgcgaagtgaaagcgagtttttctatatgaagaaattgtttgaacggatccgtatgcctgagtttctggaagacatgcggatgcggtatgcagcgattgcgatggttgttttggcagtcatcggtattttaattggcgcgttgattcggccttggttggctttgttgatgctgctgattttgatcagtctggtggcaacgattttttatgcccttgagacgattgccaagaatacgaatcagtatatttcagatctcagttatcggattaagcgcggggaacaagaagcgctgattaaaatgccgattgggatcatgatttatgatgaagacttgaatatcgagtggacaaatccgtttctgcagaagtattttggcgatacggatgtgcttgggcagccgctggaaaaagtcgatgctgaattggcggaacttattcgcagccatgaagacaccaacgaaaccaagatggtgacatggggccagcatcaattcgaaatcattgtccaaaagagcattggcgttgtttatctgatggatatcacgcgttatgccgagattgaggaacgggccgaagacgagaagatcgcgattggccagattttcattgataactatgatgaaatcacccagacgatggatgatcaggttgtcaccaacttgaatagttacgtgacgaatcaactgacagattgggccaatcagtttgggatgttcttaaagcggattgacaatgatcgctttttcttactggcttatgccaaatcgttacgtgatgttgaacgcgataagtttaagatcttggacgtgattcgggaagaaacctcgaagcagaattatccattgacgctatctgtcgggattgcgtatggtgatgaagatttggcacaattggccgtcacatcgcaaagcaacctagacttggcgctgggccgcggtggtgatcaggtcgttgtgcgggcaaaaggacacgaggcgcgcttctatggtggcaagaccaacccgatggagaagcggacgcgggtacgtgcccggatggtggcgcaggccttgcaagagctgtttaagcaaacggataaagtcttcgtggttggtcacaaacggccggatatggatgcggttggagccgccatggggattcgtcggattgcccagatgaacggcaaggagtgttacattgtcattgacccggatcacctgcattccgatgtcgaacgcttaatgggtcaggttggtcaggatccggaagttgctaacgccattgtgacgccggaagcagcattgtcacaggctaccgatcagagtttgttgattctggttgatcatagcaagccatcgatttcagccgcgcctgatttgtacaaacgtctggctgcccgcaccgtgattatcgatcatcatcgacgcggtgaggaatttccggacaatccaatgttggtttacatcgaaccgtatgcaagttcgacttgtgagctgattgcggaaatgtttgaatatcagccaaccaatgtgccgagtctggataagcttgaagcgacagcgatgttggccgggattacggtggacaccaagtcgtttagcttacgcaccggaacccgtacatttgatgctgccagttatctgcgctccatgggggcagacgggatgctggctcagaacctgctgaaagaaaatatcgacagcttcatccagcgcaaccatttgattgatacaattgaaatgattgccccaaatatggcactatgtactggggaagaggacaagcgttacgatccggttattgcggcacaagcggctgatacgatgctgtcactaaacggtgtcgatgccagttttgtcatcaccaaacggccaagcggcgatgtcggcatctccgcccgctccactggggatgtcaatgtgcaggttattatggaagccatgggcggcggcggtcatttaagcaacgccgcaacacagatcaaaggcaaaaccatcgccgaaacgcggaccgaattgcttgcccagattaagaaagcagacgaagacgcatagaaagcagggattagtgatgaaagtcatctttacacaagacgttcgtggcaaaggtaatcgcggtcaggtgaaagaagtgcctgacgggtatgccgagaactttttgattcgcaagggtttagccaaggcagcgactccgcaagccatgagcgccttgcgtggccagcaacggcttgaagaaaagaaagaagccgagaagaaggccgaagctgaagcaattaaagccaagatcgaagacgacaagacagttgttcagatccaaagcaaggccggtgaggattcccgattgttcggttccattcctagtaagcaaatcgcaaccgctttggacaagcagtatcagatcaaggtcgataagcgcaaaatcgacttgaaacagccaattcgttcgctaggattcaccaatgtgatggtcaacctatttcccggcatcgatgcgcgaattcgcgtgcatgtgattgaacagaaataatttgtagcaagaaagggactgcttcggcggttctttttttgtgagcgcgagctggcgcggttagaagtcggagtgtaagtggcctcaggcgtgatggccgggctttggccattgcgactgaggttcttacacgcagacttctgcgccagggagcgcgttatggtgagcgcgagccagcccggttagaagtcggagtgtaagtggcctcaggcgtgatggccgggctttggccattgcgactgaggttcttacacgcagacttctgcgccagggagcgcgttatggtgagcgcgagccagcccggttagaagtcggagtgtaagtggcctgaggcgtgatggtcgggttttgaccattgcgactgaggttcttacacgcagacttctgggctggcgaacgcgttatggagaagcgtgagccggcgcggttagggaccggagaacgcgttagatgaccgctaccaatgtatcaacatatgatgagcgatacagatgtgcaaacgcttgtttcggtcagcattttaacgtagactgttagggataagcggttaaaaatgagccgattaaattgaaggaggacgcgcatggataaccagttaattgaacagcagccgccgcatagtgatgaagcggaacgtgccgtccttggcggtatttttctgaatgccgacacattgccggatgcccaggaatacgtgacggcagatgacttctacaaaaagtcgcatcggctgttgtttcaggcgatgacggatttgcaggataatggtaccgcgattgatacggtcacggtgacggattatctggacaatcacaatcagttggatgacattggcggagctggctacattaccgacttggtggcatcgacgccgattgccagcaacgttgtgtattatgctaaaatcgtgcagcaaaaaagcaccttgcgtaagctcatcagcaccgcgcaaagcattgccagccgcagttatacggaacaagacgacgttgaagggttagttgaagacgccgagcgccagatcatggacgtctctgagaatcgcaatcaggcagggttcaagcagattaaagatgttttgaatcaggcgatggcgcagatcgatcagctctatcaaaacgaccaaaccatcacaggcttgccaaccggttttcgcgacttggacaagattacaaccggcctgcatgaagatgaaatgattattctggcggcacgtccagctgtcgggaaaactgcctttgcgttaaatattgcccaaaatgtcgggacgaaaacggacaagagtgtggccattttcagtttggaaatgggggctgaacaactggtcaaccggatgttgtgttcggaaggcagcattgacgccaatcatttgcgaaccggccaattgaatgaagaagaatggcagaacctgattattgcaatggggagcctgagcaaggctaagatttatatggacgataccccggggatccggatggccgagattcgtgctaagtgtcggcgactagcccgggaacaaggcgacttgggactcatcatcattgactatttgcagctgattgaaggctccggccaagaaaatcgtcaacaggaagtcagcgcggtgtcacgacagcttaagaaactggccaaagaattacatgtgcccgttatcgctctatcgcagttgagtcgtggcgtggaacagcggcaagacaagcgcccggttctgagcgatattcgtgaatccggctccatcgaacaggatgccgatattgtcgcgttcctataccgtgacgattattatcgtgatgctgaaggcgatgacgatgaagatcaagacagcggcgatgagggtgatgacaatgttggtgaagttgaagtcatcattgagaagaaccgttctggtccgcgggggacggttaaactgctatttgtgaaatcgtacaataaattcacaaatatcgcctataatggcccggatcagtaaattgtatttaaaagattggataaataacgaccattgacgaacaagaaagtgagggatgccgcatggatgccattttaatgagtttaatgacagcactcaatgaacacctgctgatcaacgtttaccagcgtgataccgatgatttttacactggatatgtgcaggtactgggtcacgatgcggttgttctgggaacttataacgattcagggattgcggatggctgcgctttgattgccttttcagcgattgatcaggtggaatttgccggggatgatctcgacaacatgaattttcggattgacttagcacagtcggagcattttttgacgcttcaagggaaagaaacgccgtacaagtttgacgccaccaagagtttgatctggcaattggcgcagcaggcaaaagcaagcgggcagatgatcatggtggttgttgctgacgatgacgcttatctcgagggccgggtcaccgcggtggcagatgatcgctttagtatggcgattttcaacaagtttaactatacggatgtccgtgccttgcaagtcgacttttccgatattttagtgatggaatttcacggcttggatttgaagctggaaaccgagctagtccgcaagcgcgatcaactacaccacgtcccgaccaagctgtatcaaaacgacggtcaacttgaaggggtatttcagaatgctttggcggagaatcgattgatttcggtggtgccaaaagggcctgaggatcaattcttcgtcgggcgcgtcaaagcggttaatgagcatgtggttgtcctcagcctcaaggatatggcgggccagtttggcggctacattctgatgaccctaccaagtattcaaaatgtggccaccgcatcggattatttgcagacgatcggcttttacgagcagtgggaccaaacccatcatttcagccagcagccagtgttaaatgctgatcgggaattcgaccctaacgataatctggttaaggcgatcatctccgaggcagccgggtttgaacgggtggtacgcatcaaggttgcggatagtgatgagcattttctaggctatccggaacatgttgacgaaaccgacttcgacttgaatctggttggcccagacagcggtgaaacggttcgcattcgttatggacagattcgtgagattgcattcggacatatttttgcttatctgcaagaggcacagttgaaaaatgctgaccgttaatggcagtttgttaacggcgcggatgttggtggtttgaatatcagcgtagggcaattaaaaaagcatggttttcacggttaaagtgaaaatcatgctttttatttttctaccgattacaccactatttgctagtaacggcaagaacatcatcgcccgctgtgatgttgcgcggggcgaagtcggttagtgatgcgacgtgatccatgttggtaatgatggtcatcaccgttgtctttttgcccgcggcttgaacggcggctaagtccatggtggcgattggctgaccggctgtgaccgtgtcttgatccttaacgctgaaggtgaacggtgcgccgttgagttcaacggtgtctaggcccatgtgaaccagaatttccaagccggttgcggttgtcatggtccacgcgtgcttggatggcagcacactaacgatggtgccggatactggggcgacaatcgtcccggatgtcggttcaactgcgaagccatcaccgaccattttttgagaaaaaacgtcatcttcaacggcggaaagggcttctaattgcccagtggccggtgcgacaaattcagtggtgccaggttgagtggtaacaggagttgcggctggttggttgaccggttcaggttgcggggtagctgtttcgatgaccgtgccgtcagctgtggttgcgaccatcgcactcttaggaaccccgaagaagtaggtggcgatgaatccgcccacgtatgaagctaaaaggccaaagacataacccagccactggtggttagcgatcaacgggataagcgctgctccggatggcccgatggtgatcgcaccgacattgccaaacagtccgatgaccgcaccgccaatgccgccgcccacacaagcggtgataaatggccgtccaagtggcagactgaccccgtaaataagcggttcgccaacgccaagaattccgactggcaaggcacctttaatcaatcgggtgagttgcttatttttgcggcatttgacccacaaggctaacgcagcaccgacttggccgccgcctgccattgccagaatcggtagcaaggcggtaaacccgagatttttgatcatttccagatggattggcgtgagaatctggtgtaatcccagcatgaccattggcaagaaggcaaggcccaaaacaaatcctgagaacggaccgccgacttgaagaatccagttgatcgagccgaccagtgacgttgaaagccagccggcaaatggcataatcaggaaaatcgtcagcaccccgatggacagcagactcagcatcggcgtgaaaataatatcgatggcatcaggaatgaagcgatgcagttgcttttcaaccagtgaaagcagccaaactgcgaagataacgccgatgatgccgccttggccagctgctaacggttggtgagtgaagatgttggtgatggtcacgggcgcaacaacccctggcaggtaaatcagtccgccgacaatcccgcctagtccggctgtggcaccaaattccgttgcggcattaatcccaacataaatgtttaggaaagtgaaaagaccgccgttgataacctttaataccgtgatgaattcggtccagcttttcggcagatcaccagcggccatcatgttgaccaaaataccggcaaccccggaaattaagccggcgccgacaaatgccggaattaacgggatgaaaatggcggagatatgcttcaaagcggcccgccaccacgtttgtttcagtgcggctttgtgagcggcatgaacttcggcggccttggcttcaaccgcagacttgttatcttgatggtcattgccaaccgaagcacttcccgggaaaggatcacctaagccaacgccgacttttgcgaccatggcctgcgcgactttgttaacggttcccgggccgacaatgacttgtaaggtttcttcctgaacgacaccaaggacgcccggaacttttttcaagcctgcgacattgaccttggcttcgtctttaatggtcatccgaactcgggtcatgcagtggattaattttgcgacgttttgtgggccacccacctgtgcgtagatgccgtcacccattgcttgatacttatcttgccccatcttctgtttcctcctgacttaacgcaacggctttactaatgaagccatttgcttgattgagtaatgtttgagcggtggtgctaggttgattcgttaagatcatgacgatggctaatttgacatggcgattcgccgcttcaaaggctgtttgtgcggttttggcatcgcatccggttgcctgctgaataatgcgctgactgcggacaaccagtttttcgttggtgggctgaacatcgaccataagattcttatagactttgccgatgcccaccatcgcaccggttgacagcatgttcaaaaccagtttctgcgcggtgccagctttcaagcgggtggaaccggttaagacttccggacccgctggcacctcgatggcaatctgagcatgctggctgatcgcggcgttatggttgcaggctaggctgacagtagcggcgccgatggattgtgcatagtctagcccgccaatgacatacggcgtccggccactggcggcaataccaacgaccgtatcattttgggtcaaatgccgctcctttaagtcggactggccaagcgcaaccgaatcctccgcgccttcaaccgcaacagtcatcgccttcataccgccagcaatcaatccttgaaccatttctggagcggtgccaaaagtcgggacacattcagccgcgtccaatactccaagacgtccgctagttccggcaccgatgtaaaaaaggcggccaccgcgtttgaaagaagtcgtgatcgtttcaattgcggcttcaatcgcaggtaaagcatggctaacactctgcgcaacggtttgatcttcggcattcatgaccgtgacaaaatcatgaacactcatggtatcgagttgcatcgtcttttcattacgggtttcagtggtcatttggtctaagttaatagtcgccatgttaaggtcctctttctttgtgagcgcgttatagtgtgagcgcgagccagcgcacatcatgatattttgaatcgaatcgcctgatgcggtccgatttggtcaagtaacggtaaattagatggttcaattttgccaatcacattcacccgcgggtcggctggcaagtcgcagcgtgtcaactgaagctcgccggcatagcgaccatacgcactattatcaagtgtgatgctgccgcggggacggggatcggtttgtgctggttgtggcgtggcgaaaatgtgttccagccgtgcctcggccaaacgcacgactttttgcgcgatgtccgggcggctgtgccatgttaggtggagaaggcgttcatcgtcagtctgcacctggattaaaagtacctgatcgtgaacatatgactgaaacgcggcaatactgcgcgggctgagttgcggatcaccgacgtaaacatgatcgatcgccagttgcctgagttccagataggcagcaagcggaagtaagccacggtgagcttcaagtgttggtaaaccagcgaataaaggtccgcgttgttgcgcatcgccggaaataaatgccatggttttaaacccaagtgcgtgcagccatttatttttttgcgcaaaccatgccggatccagtccggtttccggtcgtggataaaagttgtgccaagcttcgatatggcaaagattggccttagcgttggcaagctgatcaatcatgcaagcggaaagtgtgctggcattgagcgcaattgccatggtgtgtgacaacgcggctactgtggtcatgtcgatgccgtcatcaatgcgcaaaccgtctaatcccaacgcttgaattgcttttccgtcgtgcagtgcgattcccaaacgttgcaaacttgcagcagagacatccgccataattgtcagtccaagctgatggcaattggcaaccaattgatccaaacgctggcggatgatttccggtttggcttcggataattgcaatgaggtaaagaccccagtgaatccggcttgctgcatctgtttcagataagccgcttgctgttcggttgccgaatcatttaaatagcaggaaaacccgatcatcccaattcctccatcaagaaacgcccgcagaagctgttagtggtttgcgggcaagtgtcgatcaatagcgaaaatctgaaagccctttcgtgaacttagcgtacatgatctttgatgatatttcaacatatttctaaattgtttgaaataaagtttcaaaagggagcaaaaaataacgcaccgttggccggtacgtaaaggcaggatcatttgaaaccgtgccgcatgaattctttatacgctgtgactgccgccttggaatcatcggtttgcttcttagcggcatcgtagtaacggctaacgtaagcgtaatataaaatatcaattaacataaactgggcatgtagggattgcgtcgcggcaaaacgattgggcgcctccatcggttgtgacgtttgaatcacgatattggcataatgggtgagggcgttactgccaagtttggtcgtggcgactaccggtaaaccggctttcttagctaatttggcccctaagacagcctcgggtgattcgccggaattggagatgaaccacgtgagcgtatgcttcggatcggcagtggccgcgactggcaggaaaaggtttaagtcatcgctaaagtggcaagcataacccagccggctccatttttgagcgatgttttgtacggatagataagaggcaccaacgccgaatagcaggatttggcgactacggtgaatcaaatcaatgatagtttgaaccgtgttttcgttaatctgatcaactgtttcggctaaagagcgggttgcattggttttcaacttggttttgatcgttgtcaggctttcatttttttggatttcctgatgattgatttcgccgacttcgccattcaaatcggcggctaattgcatttttaattcgttatagccgttaaattgcaaacgctgggctgcccgactgacagtggccgggcttgttccggcggctttggccaattcataaacactcatggtcaacacgtcttgcgtatggtttaaaacatagtcgacaattttcttttccgcttccgaaagttctccgcgggtactttggtagttaccttcaacactcatgctagcctccttggatcatcgtagtaatgttgccgatcaacttaggccggcaaaccattatggcatgaataaacggtgctgccaatggacgcggcgttaatgaacggttatttttccagcgccaataattggtacggcgatagaaagcgggttttcatcaaaatatcgacaatctctgcttccgagcgcgggttcgtttcatttaaccacaattggatgatatcgatgatgccatacacgatgatctgactgacgtatgggtcggggatgtcgtggataaaatgcgcttcacctttcaattcagcgaggtgaccgagaattttatcccgtaaaagtttggcgattcggcctaaaaagcttggatcacctgctggactaagcagaaattggcacagatcgcgctgttggttaattaaatgcaccatgttgaccatcaatggagatcgctggccggtagcaagggtgctgggatccatcgaagtgtccatcccgaagtccaggcaatcggttaattccttaagcaacgcggcttcggttttagccaccagatcgtctttatcgagatagtgcaaatagaaagtcccacgactgattccgcttgctctagtgagatcggcaactgaaacctttgctaacgtttttttacgccctacagcaatcaaagaacgaacgagggcctgtttggtttgcgcagtttgttcggctttcttcatgatctcgctcctttatacaaccgtttaacattcaagttggttttaaagatgattaacacgatgttcatcataaaccattttggtagggaatacaaagattattgagcgacttcattttaaaattgcctatatgctggtttatacgtgaatgagtcggtatgtcaacggcctgcgtagaaatatcactgaacacatctgaaaaaattgcctatagtttcctgagcctgacgggtttaagctatttttgtaagatgattaacacgatgttcataattattttttggaggtcatcggcatggcaaaatttatcacggtaaaagatgaaaccagacaatatggctcaggtgaaagtactgtttatgccaatcataatgtttcgtttgaaatcaattcaggtgagatcaccgtcattttaggggcttcaggtgcaggcaaatcaactttgctgaatattctgggcgggatggataaagccaccagtggtcaggtcacagtggcaggtgagaacatttctcaatatgatgcgcggcagttgacaacatttcggcgcgagcaggttgggtttgtcttccaattctacaacctggtaccgaacttaaccgcactggaaaatgttgaactagccagcgaaattgcgccggacgcattagatccgcaaaagacgttggtggacgtcgggttgggcaaaagaatgaataacttcccagctcagctttctggtggggaacaacagcgggtggcgattgcgcgggcgattgccaagaacccgtcactgttattggcagatgagccaaccggggcgctggattataagaccgggaaaagcattttgaaactttttgaagacttttcccaccaaactgataagaatgtcattattgtgacgcataactcgttgattaagcccatggccgatcacgtcattgagattcatgatggcgaggtcaaagatgactatcacaatgatcagcccacaccggtcgaacaattgaaatggtaggtgacacagtttgagcaaaaaaatgctttggaaggatatacgcaaatcctttacaacgtcatggggccgatttttctcgatcttgcttttgatgatgcttgggtcatttgccttggtcgggttatgggttgccggtccggatatgcgagcaacaggcgcaacctattttaaacaatataatttggccgatttaaccgtcattggtgaagatggtttggatagccacgatcaaaagacgattcgggcgacaactggtgcaaagcaggttgaattcggttatcttaaagatgtcacgctcaaaggcacgcattctagttttcggattatgtcaaaaccggataagatctcaaaatataagcttgcttccggacgcatgccgactaagacgaatgaaattgcaatcgatgctaactacaaaggcaaatataagttaggtgacacgattaagtttgtgcaacgagcggatcaaaccggcagcaaggtgcttaagcggacgcaattcaggattgtcgggtttgtctattcgcctgaagtcctgtccgccattaacaaaggcgacagtacttcgggtagcggtgatctcaaaggatacggggtcgtcacagcgaataacttcgatagcgacttttatatgatggcgcggatcacgtatcaaaatacccagaagctggatccgtattccgatcaatataccgatcggattcaaagtcataaaacggctttgaacaaacgattgaaagatgcgccgacagatcgcttggcggctatcaaaaagcaataccaaaagaagattgacgcgggtcaaaaaaagcttgatgaagctaaggcacagttagactcggctaaggaacagctgacaaccggccagcagcaattagccagtgccaagcagcaaattacggcaaagcaacaggaacttgatacggccgttaaaaatggccaagcacaaattgccagcggggaagcacagttacaacaagcagcgactcaactttcacaaagcgagtcgcaactagccagtgccaagcaacaattggatactgccaatcagcagcttgctaacagtcaggcgcagttggctgccgctaaacaagaaattgaagcagcgctggcgaataacccgcaaatcgctcagctgccagcattccagcagaaacaggcgcaatatcaaaatggtatcgcgcagtataaccaaggccttgaacaatatcaaaataatttacaggcctataacaatcaagttgcagcctggaatacggccaataaccagcttcaacaaaagtaccaagaatataattctggcgcgagtcaattccaacaaggccagcaatcctatgcggctaagcaacaagaattagaacaagctaagcagtcattggcgactcagcagcagtcgggacagcaacaaattgaggcagctaagcaagaaatggcctcaaacgaagcaacgctcaaaaccaagcaggctgaatatgatcagcaagcaccaaacgcagaaaaagaaatccaaagtaacagtcttaaacttgaggatgctaaagaagcgctgaaaaatcttaaagcacctacgtacacggttgacactcggcgtgaaactccaagtgggcaaggctacatggtttatgacaacacttcaaatatcattgattcgctagccaatattttcccattcttcatgtactttgtcgcagcgttggttacttttaccactatgacgcggttcgttgatgaagaacgtatcaattccggtacattggttgcactagggtatagtcggcatgatgtcatcaaaaagtttacagtgtatggtttcctgtccagcttaattggttcgatattagggatcatcaatggacatatcttactgccattgattgtgtacaatgcctaccatggcggggttaatgttccgccaatcgaattgcatttctatccaggcattagcatcgcggcgttgttacttgcgatgatcagtgcggttctgcctgcatggtgggttgcccggcgtgaactgaaagaacggccggctcagctgcttttaccaaaaccgcctgcaaacggctcaaagattctgcttgaacgggtcggctttatctggaagcgcatgagctttacgcataaagtgacggcgcggaacattttccggtataagaagcgcatgtttatgacgatcttcggggttgccggatcagtgaccttgctgttttccggtttagcggttcagcacagcatcggcggggttaatgatcggcagttcaacgatattatcaaatacgatatgatcgtggcacaaaaagacaatatcaccaagaatcaacaaacaagtctggataagctttttaacgaaaacgcggttaagaagacgaaatcagttcactacgaaaccgtcaccaaaaatgccggcgccaatcatgatcggcaagatatcaccatgattgtgccgcagtcaacgaagaattttgacagctacattcatttagcaacgcgcaaacgtcaaaataaactgacccttcaagataatggcggcattatttccgagcggctggcgaaactgttaaatgttgacgttggggatacgatcaccgttaaagaggcagatggtacccgtcgcaaagtcaagataaccggcattaccgaaatgtatatgggtcacttcttattcatgaacaaaacagcttaccaaaaggcctttaataccaattacaaggtcaatgggcatttggttaccttaaatgatcggtctatcagtaatacccgggcccatgccgcgcaattcatgaaagaagatggcgttaaaggcgtggttcagaattcttctttgaggaatcaaattacgacagttgtgaaatcgttgaacaagattatgggcgttttgattgtgttggcagctgttctcggcgtcgtgatcttgtataacctgacgaacattaacgttgctgagcggatgagggaactttcaactatcaaggtcctagggttttatgataaggaagtcacgctttatatttaccgtgaaacgatcctgctttcgattattggcatcttcgtcggctggggctttggtgaactcttgcatgagtatattatcaccgtcgttccgccaaataacgtcatgttcaatcccgccctttcagcgccaactttcattattccaaccatcgtgatcaccattatcaccgttgcacttgggttcttcgtcaattactcgttgaagaaagtgaatatgttagaagcgctgcaatcagttgattgatgtggcttgaggtctttccccaagtgttctaaaaagaaacaggtggcttaagttggaaaaagaccattgatttcgctatcgcatcggaaacggtgtcgagcagtctcctcgcagtgcctgcgttgaggttgctcgattttcgtgatcgtcaatggaaaaagaacagataaactaaaggagatacgaacaacatggatggcacaattgattttcacacacactttttaccgaaaaaatacgcacaggcacttaaaaagcacattcccggtgatccggacggctggccgacgccgggatgggatgaacacctgacacttgggttcatgcgcaagaaccacattagttattcaattctgtcgttgtcttccccgcatttcaattttggggataaggacgaaaccgttgagattgccagggatgctaacgagaccggttcgcaagtcactcaacggcaccgcgataaattaggttactttgcctctttgccattgccatatctcaatgaaacgcttgaggagattgactttgccttagaccatgatgcgctgggcttcaccgtgccaaccaatacgcggggtctttatttcggcacgccgatttttgacccaatttatgcacgccttaatcaaaagaaagcaattgtcctcatgcacccgaaccggccatcgcaaggaccgttgaacgtcaacattgacatgcccacaccgctgatgggtttcttcatggataccaccatgacatttatgaaccttatccggtatcacttctttgatcgctatccggatattaaactgattgtaccgcatgcaggggcttttctcagtattttggctgatcgtgatgctgcctttgtgaagcagcaatacaacgccgatatgtatgcaattttgcgccatgtttatttcgacactgctggcgcggttttcccacgtcagttaccgatgttgctgacactggcggatgagtcccatgtgctatatggcagtgatattccgtacacagctccgatgatcgccgcacaaatgttgaaactgtttgagcctgagacataccgcgccaaaatggcaaaccggattaccaaattaaaacactttgatccggttatgacgcattttaaaaagttccgtgcactaccaaccgtgctgaacatgtcgagtaaaatgctgaccggtgcggaaattttgtcaccggaaatggcgcaggatattttggtcaataacgggcaacggctgctcggtaaaatttgaccgggttaaagcgtaatatgccttatgcggtggcgggatcattcgtttcgagccgctgaatttaaaaatataaataatttcgttcggatttttcgcgaatagtggttttatccattattaaagttcgtattttgcttgtcatcaccttgcgatcctgttagactaccaattggcgggcaaaatcccgcactaattcgtgaggagcgattaattaatgggaactgtagttattgtcggcacacaatggggcgacgaaggtaaaggaaagattactgatttcttgagccaaggcgccaaggtggttagccgttatcaaggcggtgacaatgcaggccataccattcatgccaatggtcaagtctataaattacgcttgattccgtctggtgttctttatccgcatcagttatccgtcatcggtaatggcgttgtggtcaaccctaagagcttagtcggcgaactggctcgacttgccgaacaaggggtaactggtgaaaatctacgaatctcagatcgcgcccacgttattttgccttaccacattaaactcgataaattacaagaagaagcaaaaggtgccgataagatcgggacgacgaatcgcggcatcggtccggcctatatggacaaagctgcccgggtcggcattcgaatggcggaccttttggataaggatatcttcgcagaacggctgaaggcaaacctgaaagctaagaacgaagaattcgtcaaggtctataacagcacgccaatgacgtttgatgaaatttttgaagaatattacaactacggccaacagttgaaacaatatgtctgcgatacctcgattgtgttaaatgacgcgattgatcaaggtgagcatgtgttgtttgaaggcgctcaagggatcatgctggacattgatcaaggaacgtatccgtttgtcacctcatcgaacccagctggcggtgtcacggtcggtgctggcgttggggcctccaagattgatcgcgtggtcggcgttgccaaggcatacacgtcgcgtgttggcgatggcccattcccgacagaattgcttgataaaaccggcgacttcatccggaatgctgggcatgaatttgggaccgttaccggccggccgcggcgaatcggttggtttgacgcggtggttgtgcgccattcacgccgcgttgccgggattaccgacttgtgcctcaactcaattgacgtgctaaccggtttggacactgttaagatctgcgtcgcttatgagcgtgacggtgaacggattgaaaattatccggcatcgctgaagttcctgagtgaatgcaagccggtttacgaagaattgccgggctggaaggaagacaccacccatgccaagacactagccgatttgccagaaaacgcacggcattatgttgagcgcatcaccgagctgctcggagtggatcttttgaccttctctgttggtccggatcgtgatcaaaccaacgtaattgcgaacgtgtgggataaagtgaagtaaccgatttaattaactaaaattttaaagaagctgtcaggtgagttttctcgcgctgatggcttttttttgctgagcgcgagccgccgcggttagaagtcggagtgtaagcggcctcaggcgtgatggccgggctttggccattgtgcctgaggtccttacacgcagtcttctgcgacggggagcgcgttatgatgtgagcgtgacctggtgcggttagggaccggagtgtaagtggccttgggcgtgatggccggactttggccattgcgaccaaggtccttacatgcaggtccctgcgccaaggagcgcgttatcgaaagtgagcgcaaatgctttgccacatttaaaaaagcatttttaattgacttccgaacccaaacccggtatattcaagttgttatatgaacacatgctcatatgaacattaaatataagggcgggattattgatgataacaaacaaaccaattggcttttatttgttaggtgtggctgcttttatcggcggcttattcatcacccaaccgttggcacgcgcagggctcttgattgctgctgcagtcgctgccggctatcacgtgattgcagaaggcgtgattgaaacgattcaggactccaaaaagcaacatcgatttgcgccgaacattcatattctaatggcattggcagcagtcggcgcgattgcgattggcagttatgaagaagcggccatgttgattctgatttttgctggcgcggactttcttgaagactatgtcgagaataagagtcgcaaagagattaccgcacttttggcaatggcaccacttgaggcccgacgctatgggcatgatggcgagtttgaagttgtgccagttgccgcattgaagatcggcgaccgcctgcagattctcaatggtgctcaggtgccgacagatggcgtgattattgccgggactgccagccttgacgagtcggcgatcagcggggagagtatcccacgggaaaagcaggtcggcgatgaagtcttcggtgggacgcttaacggccagtcaacctttgatatgcgggtgaccaaggccagtgacgaaacggtttttgccaagatcattcaaatggttcaaacagcacaagcgacaccgactaaaatggccagcgtgattcagcgctttgaaccactttacgtcaaagtcgtcttggcagcattacccctggtgtttctggcgggaccgttattactccattggtcatggatgacgagtgtgtatcgcaccattgtttttctggtggcggtttcgccttgtgccttggcagccagtgccgtgcctgcaaccttggcggggatttcgaatctggcgcggcatggcgtgcttttcaaaggcggccggtacttggcaaacctgacgcaattaaaggcgattgcgtttgataaaaccggcaccctgacaaaagggacgccaactgtgactgatagtgaatttgctgccgatgttgatcaagcagcggtgatggcagttgtcacggcgatggaaaagcaaagtaaccatccgttagccaatgcgatcgtgactcattatccggcgactgatgtggtgatcgacaccgttcacaacgaaatcggcaaagggttaactgccgattatcaaggccatacctatacagtgggtaaaccgcaacgttttacgcatgcgcctgcgcttttccggcagcgcgccatggcgttggggcagcaagggaaaaccgtgatttttgtggcagtcgatcaaacggtggtgggcctaatcgcgttgatggatgaagccaaaagcagtgctaaagcggccattgcttacttgaaacatcatgatattcaaccggttatgattaccggcgatgcgaaacaaaccggtgaggctgttgccgccgatttaggcatcaaacaggttgtgaccaacgtgctgccagatcaaaaagtagcggtggttaagcaattgcaggaaacaatgcggccaatagcgatggtgggtgatggcgtgaatgatgcgccggctttggcaaacgcagaagtcggcattgcaatgggttcaggaaccgatgtcgccattgacgttgccgatgtggtgttgatcaaaaacgatctctcccgacttgcatttgcccatcaggtttcaaccaaaatgaaccgtattgtcgttgaaaatcttgtcttttcaatggccgtggtgttgctcttagtcacgctaaatgtgctgcagttaaccaacattgcctggggcgtctttcttcacgaaggcagcacgctcatggtgattctcaacggtttgcggcttttgctaacggaagaaggaacacattcacaaacaccgcatgtgcaaccacagctagggtaacgggttcggctcggtgaatcgttgcataacaaactgcgcttttaataccaaagtctgctaaaatgaggcttaagtatcataaggagcgcattgcgatgacaacgaatgatgttcatgcggtagctgccaataacagtgaaattccggatgacgccgatttacgagatgttcttgatgtattcaaaaccatgagcgatcccacgcgaatgcgaattattctcgctattgcacaaggacccattaccgttaacgatcttgcagccatgctggatcttggccagtcgacagtgtcgcatcagttacggttattaaagcaggctcgattagtcgccggtgagcgatccggcaagcagatttattatcatttagtcgatgaccatgtgttggagatttatgcgttgaccaaggcgcatattgaagaaaagcagcatgggcagtgatgaggtgcgataacaggcggcgccaacgtgcagcctggcattatcttttgtaaaggcaagtgtctttccggctatcaggaaggcacctgtctttttgcgtttattgccgtttatcttagcagaagaaggggctgcgtctaaaagctgatatttacattattagaagcaaatgataccatcattaaatccctgcgctcgggcagtttgctaaatggtagcactcatgacagctaatacgtccgacttaagcattggcgagccagcgtctcttttcatttgtagactagggatttgaccgaacgaaatttaaaatgaaagcgttcgaaacttaaaggtgttatggaggtgttatatgtttgggcggcccataagtaatagatataagtactattggtatacagtcttcacgcaacttagatttaccagaatcatcaatatcatctttgttgtccaatttctaaaattcaatttagtacaattcggacttttgcagtcggtatttttgttatcgcagtttgcatcggaattgccgagtggtgttttaggcgatctttttcgaaaaaaagcggttattatttggggcttggttttactgacaatttcgcctatggtcatgatatcggccagtttggtaggtcacaattttatgtttacgaccttgttaggtgcttttttattggaaggcgtgggtaacgctttgcttagtggggcggatgaggcgcttttctttgaagccattcgcagagacggtctggccaaacagtacgcaaagattcgtggtgaggcacagtttatcggggccattgttgtaggcgcggcaacttttttaggcggcgttttatatgcaattaatcgcgtgttaccgtatttttttcagtcgttaatggtggcagttgcgggtctggttatcttttctgtgcgggaagataaacgtgtcactgcaacaattgaaaaagttaaggaacctagtcaagttaagaatatcctcaccgtttttgcggaaattaaagcatcgaccaatgttctgtccttatttatctttacggctttgatatctgcaatggtaaatgccatttttgcgatgttgccggcgtatttttccaaactcggcttttcttcctctgcaaatggactgatatttatgctctttagttttgtgggcggattggtggcagctcaggcttatcggcttaccaaggtcagttctaaaacattggcgcttatcgtagccggtattttagggctgggggtgatccttcagatgcaagcaagtatttatttcttctctgcaggtgtttgcttgttgtacataacagtggatattctagatccgattgttctggaaatgttgaatctgtgggtgaaagactctgcgcgggcaactttaatctcaggcctttcatttgctactagtttggtgacgatgctgctcaatccgttaatcggtatgttgattcaagtatatggaaccattccgatgctagtgatggtttcaatgttcgcgattgtcatgatcctttttttcgttcattttagtctaaaatcaaaaccgcaagaaagcgaataaaatgttgtggacagttcaccctttgtcgcgccaggaaatgagtaaatgactttgtatatatgcgttacattaacgcttatatacaaagtcatttttgcgcataaacaagatattgagaatcattgtatcgcagcagttgattttgatacccgtaagtttacccaagctcgatatacataacccaatgcgaccattacaattattatagaaacagaaaagaggaagccgaatggaaattaatgtcggtgctgtcatcagtgcctttcggaagcaaaagggcgtgacacaagaggcgttggctgattttgtcggggtctccaaagcctcggtatcaaagtgggagactggccaaagttaccctgacattacgctgctgccaattcttgctgcttattttgatgttagcatcgatcaattgatggcatatgatgctcaattgcagccaagtgaaatcaggcgtatttatacgtcactgaagcaggcatttgaaactcagccgcctgctcgggtgttgacgtccattcgtaatttaattcgtcgttattattcgtgttatccgttccttttgcaaatggggctgctgctgttgaataactatgacttgttacctggtgaatcacaaacagccaaaatgaaaacttatgtgactgaagcacagcaattattcgtccgtgtgcaccaaaacagtggcgatctgcggttgactgctaaagccgttgagttggaaggttatagcctgctattactcaaacggcctgatgaggtattggcgttgttgggcgaatatgtccctgaacaattaccggcagatagtttaattgccggagcgtttcaacaaaaaggcgatttgaaacgggccattgcgacgagtcagagtgggttgatgcaggacttgagtatcatgatgagtcagctgacgaattatatgacgttgcttggtgacgatccccagaggttgaagaaaacgtatcagcgcggccaagccattgccgcggcgtttgatttggtgcacctgaatacggcggtttgggcgaactttcagctggctgcgttaacgagctttgcccagcaagtgcaagcagacaatgccgaagcagtattacgccgctttgtgcgggctctgatgacaggcgagttaacctggacactgcatggcgatgcgtattttgatgctattgacccctggctgaatcagttggacttaggcccgcaaatgccgcgagctacgagtcatgctaagcaacaagtgattacttttatcttggaaagtccaacactggcagctttacgacagcggcctgggattcgacctttgctacgggaattagaacaacttaagacacaaaaataacgcgtttatcgaagccattttcggtggacacatcatggaggatttagaatgcaaacaaattgggcgttttttggtacgtattggccgtttttagtcccgttaatcattttggagtttggcttaatgattacggccgtggttcatgtgttgagacatccgcattatcggatcggcaaccgtacactatggctggtgattgtgatcttcattcagatcattgggcccattgcttattttgtctttggacgggaggatcagtcgtgaccattttgacattgcagcatgttagcaagcgtttcggaagcaaacaggtgcttaaggatcttaatctaaccttaccgactgggtctatttacggctttgtcggtgaaaatggtgcaggcaaaacgaccacgatgaagctcattttaggcttggtgcgcgcggatcaggggaagattgaagtcgcaggcaaaccagttcgttttggtgacacgacaaccaatagcgtcactggttatttaccggatgtgcccgcattttatccttatatgacggcgccggagtatttacgcttatgcggtgaactgaccgggttgcgcggggcggtgttaactaagcgtgtgtcttcgatgttggatcgggtaagtttggcgggtgttaagcagcgggttggcggtttttcacgggggatgcggcagcggctgggtattgcgcaggcgctgctcaatacaccacagttgctgatttgtgatgagccgactagcgcccttgatccgcaagggcgcacggaatttctagcgctactggcaagtttgcgcggacagacaacgatcttattttccacgcatattttaagcgatgtggaacgtatttgtgatcacgtcggcattttgcatcaagggcggctacaagtgagtgcctcgctggccgacttaaaaaaacaatacgccaaacctcaattgcagttaacgtttgaaacgccatcgcgagcacaacaagcagcggctttgttagcatcgcagcaacatgacggttacgtaaaacaggtgaggacaagtggatctgaggtaacagttgcttactcggaaagttacgctgcaacggctgatcgggttttgacggcgttgttgaccgcgcaactagtacccagcagctttagacggcgggaagcgaatcttgagcaggttttcatggaggtgatcaaatgactgccgcgatggtttttaccaagaaggaactgatcgaaagttggcgcacgcaccgctttttgattttgacggttgtctttctgattttcggcattctaagcccgttgatggcaaaattgttgccggagttattaaaaagtggactaggtggcgtgaaggtgaccgtaccgacgccgacttccttagattcctggacccagtattataagaacctcacgcagatgggcatttatgtctttgcactgatgctgggcggctgtgtcagtcaggagattcaacaagggacgcttatcaatctggtgacaaaaggattgccccgctggtcggtgattgttgccaaatccgtggttggcctattgcagtggctttggtgtatcggccttgcatttgcggtgacctgggcttataccgcttattatttccccgatacacacagcccccatgtgttattagcagtactgccactggtaatcttcgggtttttctttttgagtctcattgtgttcggttcgacgctggcaactaatcagtacggtggcctgttgttcacggtgatcatcgtggcgttgctgtacgtggcccagatgattaaaaaaggacacaatctgaatccgatcagtttgatcagcgacaacatgaaaattctggtagatgcagctgattttgctaaactctggcctgcaatggtggtggccttggtgatcggcggtggcttatttttcgccgcaatcaaggtcttgaatctaaagcgactttaaaaaaggacaagctgcttagtgaagaagtgttttctcggtaagcagctatttttatggctaaggaatgaatggctaacatgcgcggaggttataactcgctgctaaaatggtgttattttaaaaacaaatcgcaaacaatcaaatgatgtaaaaccactatatagtgtatgcttattttaacaaaccacaaaatttggtagatattccgttacttttgcttctgaatcttgtatactaaatacattgttacaagttttgcaagtaagggtacaggaggactagccatgatcgaattttatacacaaatcaagaaacgggatgggcggatcgttgattttgatgcgaccaagatcagcaccgcgataaccaaagcggcagaaagtgtggcgaaactgtcaccgcgcgatgtgttaaccattgaccacttgacggatacggttacggctaagattcgcgatcggtatcatgatgatgttgagattgccgaaattcaaacggttgtcgagcagacactcattgccgccgaaaagtacgactgggcagaagcctacacgcaatatcggctgaagcgtgatttagcgcgcaaacagaagcaagacgttaattacaatgttgcgcgactggtcaatcgcgataagagcgtcgtcaacgagaatgctaacaaggatagtcgggtgttctcgacccaacgtgatttgacagccggtgcggtggctaaagcgattggcttgaaaatgttgccgccagccgttgccaatgcgcatttgcgtggcgacattcattggcatgatcttgactataccccgttcatggcggaaaccaactgttgcctgattgattttgactatatgttgaatcacggcttctccattgggaacgccgaggttgagccggcccactcgattcaggtggcggtgacccagatgacacaaatcattgccaacgtggcctccagtcaatatggtggctgttccagtgaccggacagatcaggtgctagcgccgtttgccgagaaaaattaccagaagcatttgcgtgaattcggcgatgtgattgatgatcccaccaccctcaaagcgttggcagtgaagcagactaagaaggatatttatgatgccttgcaaacgctggaatatcaggttaacaccctttattcaacgcaaggacagaccccgtttgtgaccgtgggctttggtcttggcactagctggattgaacgtgaaattcaaaaggatattttgaaaatccgaattctgggtctgggcaaggaacgccggacagcgattttcccgaaacttgtcttcacgttaaaacgcggcttgaaccttaattcggaagacccgaactacgacatcaaacagttggcgattgagtgcgccaccaagcggatgtatcctgatgtggtttcctatgacacaatcaagcggctgactggctctttcaaagcgccgatgggttgtcgcagtttcctgcaaggctggactgatccgaaaacaggtaaggaagtcaatgccgggcgcatgaatctcggcgttattacggttaacctaccgcggattgctatggagtccaaaggcgataaagataagttttggaagatttttgaagaacggatgcgcatctgcaaggaaggtttgctttacaagattgaacgaaccaaacaagccacgccggaaagtgccccgattctttacaagtatggtgcatttggccaccgcttagccgataccgatagcattgacgatcttttcaaaaatggtcgcgccaccgtatcacttggctacatcggtctgtatgaggtcggaacggttttctatggctccgcatgggagaagaatcctgatgccaaggccttttccgtttcgattgtgaaggcgctggatgatcattgcaaggcctgggagaaacaatacggctatcacttctcggtttacggcactccaagcgaatcactgactgacaccttctgccgcgaagacactaagaagttcggcatcgtcaaggacatcaccgacaaggaatactacaccaacagtttccactatgacgtccgcaagtcacccacaccatttgaaaagctcgactttgaaaaggactatccgcaatacagtgccggtggcttcatccactattgcgaatacccgaacctgaagcaaaatcctaaggcactggaagcggtgtgggactatgcatacgataaaatcggttatcttggcaccaacaccccgattgatcaatgcttcaaatgcggttttaaaggcgagttcacagcgacagccaagggatatgaatgcccggaatgcggcaaccacgacccggctacctgcgatgtcgtcaagcggctctgcggttaccttggaaatcccaacaagcggccaatggtccacggacggcaggaagaaatcatccaccgcaagaaacatattacgttcagcctgaatcaggtggccaatcgccgcgataagtagggttgatcaaagtggcatggaaaaagataataggagcgatcgtctggagatcagacggtcgtttttgttttctagagactgaatataaatagtaatcggagacttttcattccgcccattcgcgtgtagaatccaaggcaagttcttgctgacggttaggctagcgtgattggaggtgtgccatgatagctggtgtatttactgttaaacaatggcaaacagcggagcaatggaataacgggtggctgattgttgcgattattgtcattttattcattatcttctgcctcctactcgtttctttttatgtacccaatccctggaagcggcggattatcgtacctgctatccttatttgcatgagtttgacggtttacagctggttgcgaaagggacaatgcggctaattaccaatttaatcaatgggccgcaaaaatcacaccgcagatccgcactaagaaagcggctctatttacttatgtctccgtcccggaaagtgaagttaaagggtatcgggcattaaatgattacccggcgcttacaagcttacccatgtatacgcgtcaccgagttatagcatcagtggtctatcttgggcgtgatgacaatgcgcgctactttaagttagacggcttagtttatcgttattccggaccaatacagatcggcgaacaggcggctttaagcggttatcgttttcggttaaaggatcgcggctatactcaaatgggattcataaatccatccaagaattttacagccgctctagtgatcccgcgaaatcggattgagcagcattaccatccgtctaaggaggtcgtcgtgacactcgagaagatggatggtgaatggacgacggaaaaggtctaccgaaagtgaaaagtttgcgcagtcattttgcaggctggcgttttggccagatgggctttgttaggataagcaagcctgcgccggcgatgatgatcaagattaattgaaggtctatgccgttaaaccagacgaggacgagtcctgttagtaaattgagcaatcctagtgcagagaaaccgacacccatgaaacggcgacttctaacagaccagtcggcaaaaatatccaccgattttggcgttatcgcatagctgaaactaaattggacagcaacgaatacccaccatatgagctctgcaagccatcgcgggaaaaagccaaacatagtcgttgccgccataccagccatcatggcatcagcagttgtcaaaacagccataacgagctgatgtcggctcactttactatccttaataagtttttcgtttaactcagaatcgtcgaggatcagggtatcaagcgacaccgaaaagatccgggcaatttgagtcactgtttctaagtccggtaagttgcgttcattttcccagttagataccgtgtgccgcgaaacgtgtaattgttgtgccaagtcagcttgcgtcatgctgtgtgcgatgcgaatctgctgaagctgttttgaaaagttcaagataaccacctcgcttggtttgattgtggcagaggaggtcagaaacagcaaggcaaggagaagatccgcagcgcgcgttattcgagacaggactattacccggggaattttgcattcggtggctggtgaaaaccgatgaccaaagcaaaaaattaaaataaatggcgatttgttagcagtttctgttcttgcactaatcaccataatgtttgacaagtaaatcatcatgcttgtgatcaccgcacatttcatgctatactccattcggtgccaaaccacggtgagttcgtaacgatcggcgcgtatgcgttcagaaggtcgaagcggctcgccatttttttatgagcgcgagccggcgcggttagaagtcggagtgtaaggacctcaggcgtgatggccgggctttggcaattgcgcctgaggtccttacacgcagacttctgcgccggggagcgcgttatagaacgcaaaggcaaacaaagctcccaaatagaacgcattccagtctccacccacaatgtcacaacaccaaaaaaccgcagccatctcaaaaacggctgcggttaaacatatcactaagtttcacccaccgacgctgataaagtaaacttcaagcggccggctctgtatcaagcttctttgattttgaacgcattgtcaacgcttcccagtcaaccaatggcaattgcgccaccgcacccagaatcaagatcattgaccaggtgagaatcagactcatggtcacatcaccggtgaaatgcgcgagaatccggacccgcgtataagccatcaaagcaccgtaagcgaaagtgagccagaagactaaccgttgacgcttcggctggtcacgatcaacgaaccaagtcaacgtgaggatggtcgccgcggtttgggtatggccggacggaaaactcatgtgaccgttagcaccatttggctggaaccagctggtgaagtgagccgggttaccatttaattcgtaagggcggaaacgaccccagaaggttttcatggcgttcacaatttggtcggacatgatgcaaaccaaagtggcaactaccgccacttttaataagtaatgaagctgttcgtcgcttttacgtgaaagccagtattgactgccagcaaacacagcaacgtagagcactaggaacaagatgacgcttagcccacccggaagagccagcttgctgccatcagaattggccattcccattggcttgccggcgttgatgtcgttgattgaagtgatcaccatcgtcatcgcgtatttcagataaccagcccacagttcccagccggcatagatgacactaccgatcaccatcaagccgcgaatgtaccatgcgagttgcgatgatcgcagcgcatagtgacaaacaacattacaactcaacataataatcagtggcgcagtccagaggccaacgtcttgaaaaagggtggcaaacggatcgttcatgttaccgatcgtttgagaaatctgccaatcaaagccagcagctgcagccaacaataaaagtaagataccagcaacaatcagaaaaatatgtttgcggatcggagcgtttaatttttgcgtttggtccatatcttttccctcccatgtactttgaaaatagcacatagtttacagaaaatggccggatttacggtacctgtacgtaacatttaagctgccgatacgaaatttacagagggttgctaaagtaaggctcgtcaacggttagctggcggtgatcaaagtcgatggttgcctgcaaaccatatggcaaaagggtgcggggataagcgtggccgaagtttaagttgtagagaatgggcgtttgataaggttgcgtgacatccaagagcacctgctgataatccgcaaaataggtttcgttttgaggcttacccactaagatggccttcacttgttgcaagacaccgtgatcagccagatgccctaggtactcacgataggtggcaggtgaaattttatcttctgaagtctcgatgaagagaatcttgtcagtccaatcttgcgggaagaggtgatactttttggcaacttgcggctcatcgtcgtaacgcaccgggtagagcaagtcgtgaaggctatccaaacagccgcctagcaatgttccggtaacctgaccatgcccacgcagcgctaaatagccatgctgctccggatgcgctttccgcggcacccctaattgatccgcggaaaagtcgatccgctcttcgtaccaagttggactggaagtgatggcagtcgttgccggattctcgaaatagtgccggaagctggcagcagtatatggcaataagtgcgtatccagctcagccaagtcgttcaagaagttcggtccgtaaaaagtggtcatgcctagctgataaaacatgagatggtcaatggtggtgtcggaaaagccggtaaaaattttaggctgggtttgaacagacttgataaatgtcggatcgtcaagtaggtaaggaacaatgcggtaagtatcatcgccaccgatggcacaaatgatgcccttaatgtcgggatcggtcatcgctgtttttaaatctgcggctctggcttccgggtgtgcgtttaaataatcgcgtccgcgtaaagcatttggcataaaccgaggtgtcagccccatatcctccaaacgcttaatgccaagttttcgttgatgggcagcaaacgcctcgccaagtgtgccggcactgagactgacaatagcgacttgatcatgcggttttaaagtctgtggttttttcaagggtatccctactttctagtgtgaaaaattgattttcgtggatagctttctttttagtgtatcgtttaaactaacctttgtcttgtatcattttttgaaagcttgccgtgcttctgaccgatgccgatattcaaactgtgaaccagttgcttgttttccaagccggtaagctggtacgatcgaatagaggattgaatgaactgattttaaaaaagtaaattgaccatttttgccaggatttaatggaggattgagccatgtacaccattcaaactgctgcaaccattgccggccgcggtactgtaattacgattgctccgccgattgagcgcattcgagccggtgatcccgttcggctgaatggcgcaacagtcggcaaggtgtgtgcgcttgaaaaggcccgccatccgcatcatagtaacaatcagccgtgcctgagcctactgattacggaaccggtggaggtcggcgataccattgagttccctaagtcacaatgttggcattaggcatcatatttcttttatgtgggtaacggatcttcgtgccataaccgccctgaccacacacctacatagaaaaagcgttgcaattgtcagatgaaagctgacagtcgcaacgcttttcgtttacttgttctagtgattggctgtggtcataatgccggcttccgtcatgccttctgcgtaaagtttcagtttaccgttgataatgtccataacgagatcgccatattctacgccatctgcttcggcttcctgtggtaagagcgaaagtggtgtcatgccaggcaggttgttggcttcgatcacccagacgcccttatcgttggcaaagaagtcaatccgcccatagttttgcaatcccaaaacgtccatggtttgtaacgagacatccttcattgcttgatgaactgattcatccagattcttaggcggcgtgatgaagtcggtgtagcccgcttggaatttgtgcttgaagtcgtaccaaccggaatgcactttaatctcaatggcagaaaacgcccggccattgacaacgcctaaagaaaattcgcggccaggggtgaattcttcgacaatcgcgctgttatcgaaccggaaaacatctgcaatgccattttccagttcctcttgattgtgcgcaatgtgcgtgccaacactagagccgcctgatgtaggcttaacgacaaccggaaagtcaaacggtaccgtatgtttaccattttgattgcgtttgaattctttgaacgccgcagtctggatgccgtggtataacataacttctttgctgaagaccttgttcatggtaatgccggaagccagcggaccggaaccggtatatttgacgttgttcagatccaacgttgcctgaaccttaccattttcgccatcaccaccatgcagtgccaagaacacaatatctgcagccttgcagatcgccaaaacgttaggaccaaacagttgcgtgctgccgtctgtccgtaacttgttgatgtcggcgtcagtcagaatggcatctgaaattttcagatccttactggtgttggcatcgtcaaacacttggtcaaccgtttttccctcaaggtcgtagccaagaaacaggtcaatgaaggtggcctgttgccctttttgtcgcaaggcgttcgtgatccggtagccgctggaaatcgacacattgcgttccgtgctccggccgcctgctaaaacgacaattttcatgtgatagtacctccgcgtattatccgagtttgatagaaactaaagtgtagcacaatcaaggcgcaaccgctatcaggacgcgttgaattgtagcaaaaattaacatccgtggctaatacggttaggcgctgatatttaccaaatttgagcgagtcggaccagctgccatccaaagtttcaaattaacatcatagcaacatttcattagcaacttataaacaatggcttggcatatttagtgataaccaatgagaaatggaggtgaacgactatcgccactggattgaatatgatgatcgggattgtaggggggattgttgtcgcaatagtcgctaatcgcattaacaggccagcgacgaaaacccgcggcatcgtcacgaacacgcttggcatcacttttggcgctttaggtgctcaggctgctgatcagttgctgtatgaaggtccgcagttgtttggtagccaaattgtaccggcaattgttgggggtattgtgcttgcgtttgttgtgatttatgcaggcaagaaatggtttcgtctaggttccaccaattaagggagacattcagaatgaagcaaagaagacgcgtggtcacgatgctgttgacgggactttttaccataatagccgccgtgatcttcgaagctggcatgtgggtttcaatgtattggtgtatgaagttgttctaaatacttaataatcccggcagatcgttgggtagttgtcgccgtttgagatagaaagaggtttttgttgtgaaaaaaagagcgaatagtcttcagtctaaacacattgttggtgggctagttgcgttaggtagtctgcttgtagcaatcctatttcctgctttcaagagataaactgcaaccctgaaccaaacaaataaccaaactaaaacaggtattggcgatgcattgcgcaaccgtcaatacctgtttatttgtatgctttacggttaagtgatacccagcatgattgtgataatcaatcatgcgtttgatcagtgaatctggtactgatcaatgctcccaaaccgatcaaaaccagtaagctgccaacgcccattccgaaaatgccggttacctgattcgccatttcctgttgagctgacaacaacgcatattgcgtcaagacaatggccatggcgccatctgccagattaaatgtttttaggaaaaataacgcgccatggtgaagccgccggactcgtaagaagccgatgattgccatggtaagcttgtaaaagccaatggttgcaactgtaatggcggttattttaccaaaccgtgcctgatagccatcgtgatacatgatgaatgcacagatcgtaaaggccagtcctaaaacaacataagcgaggccagcggtttgaacaaataccttggtttcaggtagctcatcatattgacgagatcgcgaatagtggtgtagaaaacttgagcgagcaagcgataagatgaggtaatagccgccaaacaataatagccataaagaaccggtgaccagacccaatcccaacttgacgagtgcaagaataaaattaatacccgcagccaaagttcccatgagtgcggttcgatccgccggggtactggcatgacgatgaaacaaccggcgtaatcgctgcatggtaaccctccaattaactaatgtttttggtcttcagcgacaaccacttctggcgttttagaagatttaacactttttagaatgatgatcagcatcaagacgacgatgatcgacatactaataaaagtagcattcacgccaccaaccgatgccaccacagtttgctgtgctgcaccgcgattggcgataaacgacattaacgctacgctaaccgatgtcccgactgctccagcaacggttcgtaaggtggtcaaaacggcagatgccgaggcaatagctttgccggttagctgggtgacactccaggtgaccagtggcatcattaagcaggataagccgatacttcgcatggcccatacaacggtcagatagatgattgaagttgaagtcgtcaaaaagctggtgccgagactgctaattaggactagcagaacgccgataattgcaagcgggcggatgccgtaacgatcgtataatcggccggtgatcgggctcataattgccatggcaagcgaaccgggcatcatgatcaggccagacatggtggcggagaggtgatggacggtttgtgcgtagatgggaaaaactgtggaaaccgccatgagaacggcatacattaacgcgcttagaatcactgcagtccggaagaccggatctttaaagacgtgtaaatcaagtaatggttgatcaacatgcaaggcacggtagataaatgccatcccggccacaactgctatcgctagcggcgcggcaattgccaaactcagaaacggtgcggtaccaagattaccgaagccaacggtaataccggtaaaggcgatactgatgagcaagaaagactgccagtcaaattgcagcttttcggtcggcaagacatctttgataacgattaaagcaaaaataatatccgctacggcaacgatgacgccgacccagaatatgacccgccagctcatgtaatcgattaagaggccggtaatcgtcggcgcaataatcggggcggcactggcagccaagccgtaaatgcccataatgccaccttgtttcgaaacggggaaaatagttaaaatgacgacttgcgttaacgacagcaggataccggttccgagtgattgaataattcggcctgccaataaaatggcaaaagttggtgcaagtgcagccagcagtgaaccgccagcaaacaagagcatgctggcgatgaacaaggccttggtcggaattcttttgatcagaaatgccgttgcaggaatcataatccccatggccaaggaaaagccgctggtgagccactggccggcgttagcagttacgccgaaagtcttgatgatatcgggtaatgcggttgtcagcgcagtttgcagtaaagacgaaatcagggtacctgtcaataatacagcaaaaatcaaatttcggttcttgggagcagattgtttcattctttttagcctctaatctgaatattagtgtgacgatcaaaaaggaatctggagggcgcattattagttcagcagtaaaaaagcggccttgcttgtctcggcaatggcatcaaattgttgatcaatcagaggatcaattcttgccgaacggcgggcctgccaccagcggtaagcaaaataggcacttccccaggcaagaaaaccgggaatagctaacataaccgatagcaaaatcaatgcggcctcccaggcaaaaaccgagccagccatgaatactgtgccaacgatgccgatcaacaggctcagtgaggttgcacttgattgtttcgatttttccaagcgcacaacatgagccatttgttgttcaaattgcttctgtatccgattaagttcgcttttgtgggtaatggagcgatcgcgcttgaatgctaaagtgacaccgtgcagtccttcttttgactcctgtaattgccagccgaagtttgcataaccgtctacataggtggcttgcatactgggagaaaccgtctgggtcaaatattcataggcgataaaactgtttttttgcataaagagaaaccctccatatcttgttataggcgtttgccaagccgatttcgggtggctaacgactgctcatggtttaagcatacggagggcgtgtttttgaattattcatgaaatgttgctgaattgttaattttcactttgcggaagagatacggtgaaggtagtaccttggtgagggttactttggacactgatttttgcattaagcaagcgaataacctgcgccacaatggcgagcccaaggccatttcctgcacttgcatgtgatgtatcgccttggtaaaacttgtcgaaaatatgtgcctgcgtattttcgtcaattccctgaccatcgtcgtgaatatggacacgtagcgtggtatcgtcagcttttgcgagaatcgacaggtgaccacgtggcggtgcgaatttaattgcattgccgatgagattgtgccaaacgatctcgaggagttggggattactgataattggcagtgagtcgggtaaatcaattgttagatgtaactgtttagcatcaatcgcattggcatcatccagtaagcagcgcgtcagttgcgcactgagatcgaatttttggtaatcaggtgccgtgacttgggtttgtagtttgttaagctttataatattcgtgacaagcgttgctaaatgggcgaccgagtcactaatggtggtcaaataaagttgctgtgttttccggtcaagccctgactgttgtaatgcttgggcataaccttgaatatttgccaacggtcgtttgaactcatgtgacacattggcaacaaagtcactacgcagggtttcggtggagcccagttcggcgaccataatattgaagttagcaaacatcgcgtctaggtagtcgtaattctggggtgcatgaaccggttgtaaataaacatcaaagttaccatttgctacttgttcagcggcatcgctcaaagctttaagtggcttgtcaaaagcgcggtatttctgccaggcggtgaatgcggagaagccggcagcgaccaacgcccagtaaagcagataccagcctaataacggggtcaacactagatgccaattattaccataaagtattcccggtaaggctgctagaatgctcaaggtaaagaaggagccaaagaattgaaaccatgaaaagtgttgctttacttgtggttgaacggcttgctcatttactgatttcataaggttaacaccgccttgtaacctaatccatgaatggtcttgatcgtaaagccatctgctgctttgaatttctcgcgtagttttgtaatgtatacatctaccgcgcgcatgctggtatcactggcaaggtcccagaactcgttgataagttcggctcgggaaaaagcgtgatcaggatatgaaagcaatttataaaggatctggaattcccgaactgtgacatcaaccgtttgatgattgacttgtgcagtaatcgcctcgttgttgagagtgagattgccaacgatcaacaagttgtcggccgtaatttttgcgcggcgtaacaaagctttgattcgtaatagcaattcattgaagttaatcggcttaaccatataatcatcaatgccgctattaaaacccttttctttggacgcaatatcatctcgcgccgttatgaagaggatggggatgcttggatcggttcggcgcagttcttgtgcaaattgataaccgtctacctgaggcatcatgatgtctgataagacgagatcgaattgttcggattgcagtaaatcataggctgccggtggattttcggcaccttgaacagtgtaaccattctgccgtaagatggttgcaatcaggtcgttaaagttgcggtcatcttcaaccactaggattttgaccaaagtaagtctctcctttttggtacgtgtaagtcgggttttacgctgcgggtcgatgggtcgttgtttgctgaacagtatactgatcccagacatatttgtcatggcttagcgattaggtggataggctggcatcactgatagcaacgagattcgcgataatattttttctgagtgggcgattttttagtggaaaggatttttctatgcaatatacatggctaaacatgcctgagcacaattacttgattgtggtcgatcaaggtaagcttgcttttgtcggatcgccggatgccaaactaagcgaagcaacgcgttatatcaaagggccactggtatttgatcgcgaggagatgttgccttttcgcaatgcaatttatgattatttaagcggtgacagtcgagagatcgcggtgccgttagtctttcatggcacaaaactgcaagtggcggtatggcgttatttgatgacaattccatatggtgaaacccgaacttacaaacaagttgccgtagcagttgatcggccacgtgcttttcaggcaatcggcaatgcggtcgggcggaatccattaatgatggcgattccctgtcaccgcgtattacgcacagatggcggactaggcgggtttcgcggtggcttaacgttgaaacgcaaattgttagctttggaacaagggcagcatccaaccttttaatcagcagtaagtttttcaaaaggtagcggttaaacgttctattttacgagcataatcttgtatactgatgaatggacaaatcgaaatcaaggagatattgagaatatgaagattattgcatatggtgcacgcgtggatgagatccaatatttcaaacagtgggctaaggaaaccggcaacacgctggaatatcatacggaatttcttgatgagcataccgttgaatgggcaaagggatttgacggcattaactcactacaaacgacgccatacgcagctggtgtgtttgaaaaaatgcacgaatatggcatcaagtttctcaccatccgcaatgtcggaaccgacaatatcgatatgacggcgatgaaaaaatacggcattcgcttaagtaatgttccggcgtattcaccggctgccattgctgaatttgcgctaaccgatacgttatatctacttcgcaacatgggaaaggttcaagcacagctacatgcaggcgactacgaaaaagccagcaccttcatcggcaaagaacttggtcagcaaacagtcggcgtgatggggaccggacacattggccgcgttgccatcaagctcttcaaaggttttggtgccaaagtgattgcttacgatccatatccgatgaaaggcgatcatccggactttgaatatgtcagcttggaagaactattcaaacaaagtgacatcattgatcttcacgttccgggcattaaacaaaatacccacattatcaacgaggccgcgtttgatcttatgaagccaggcgcgatcgtaattaacaccgcgcggccgaacctgattgatacccaggcgatgctcagcaacctgaagtccggtaaactggccggcgtcggaatcgatacgtacgaatacgaaaccgaagatctgttgaacctcgccaaacacggtagcttcaaggatccgttatgggatgaactgctcgcgatgccaaatgttgttctcagcccgcatattgcgtactacacagaaaccgccgtgcacaacatggtttacttctcactgcagaatttagtcgactttttgacaaagggagagacgaatactgaagtgacagcaccggcgaaataatttaatctgcaaaaataagtagcaggcgctctgtttttcggggcgctttttttatgtgcaaaaattcattctatgactaacttgtcctaaatttacgtaggatcttagcgtggcgctaagaggggaaaatcaatttacaaagaaaccgtttacaacatctggataatctgctaatataaagtcgttcgaatgaatagtcgttcgaatgaatatttaatctgacgcgcgtctacagttggaatgtaaccctttattcgaaatgcaaagtgaggtaattttttatggctaagaagacaatcatgcttgtttgtgctgctggtatgtcaaccagtatgttagttaaaaagatggaggatgcggctgccaaagaaggtgttgacgcaaaaattttcgcaacgtcaacagctgatgcccacgacaaattagattccgaaaatccggatgtgttaatgctcggtccacaagtgcggtatttagagggcgagttcaagaaggacctgagtattccggtcgaagttattaacatgcaggattacgggttgatgaagggtgataaagtccttaaagcggcgctcgatttaatcgacaaaaagtaggaggctctcatggacgaaaaacaacagttgatggtgatgcaactgatcatggctggcggtaatgtaaagggatcggcatttgaggcaattaaagccgcaaaagttggtgactttaagacagcggacaccaaactaaaagaagcagacaaattcttggccgatgcgcacaatgcacaaaccgggatgttgacagatgaggcacaaggccatcatcaacccgtttcgttactaatggtacacgggcaagaccatgtgatgaatgccatcacttttcgcgatttggcaggcgaagtcgttgatctttaccggaagatttcacaggagtcgaattaattaagggagtgtgaaagtcgtgccaaaaccgagcgagtcgaagtatgacaaaggccgccaagagctgagtctaaccagtatgttttttaatcgctatctattgattcgatatacgaccgcggctttcttttttgctaatttatactggttctttttgagctttagtgctgtaggacttgcaaagtggtggcctttcactttgatcctcacgaccgcagcggttgcagttgaacaagttagtaaatactggcgccgggataataagctaccggtaactaaagtcggatatgcaggacaacttctgagtaactttttggcactggttgtcattgtgaccggtcatggggcaagcattttcccgtttttcgggcaaaaaggaatttcgctgatcaccacagttttattaattggtctgggtatttgtttttatattttggctcgggttcatttaatcgaaacaaatcgtgatcgctatttaaagcgaatacgtcaatttgcccaaagtcttcaataagttgaaacgaggagattaaattatggattcgagtaataacaaactatttaagtttatgaacgctcacctgatggggccaatggggaagctggcctcgtttagaattgtgcgtggcgtgatggcagcagggatggcatccattccgtttacgattgtcggttctatgttcttgattattaatgtgttaccacagagttttccaatattgacagggctgtggaagaactcatttgacaagatttcaaacctctacatgttagcaaacggcgcaacgatgggaatcttgtccctttacttttgtttagtatttggctatgagtatacgcggattcaagcacaggaagagaagattgatgtgaatccgcttaatggcgctctgctttcgatgatggcattcttcatgtgcgttccggaattggtcttcaagggtgggacggcaactttaatcaccgagataactaaggacagcaagattgttgacggatatgccattgccggtggcgtcacacgtctaggaactactggtatctttacagccatcattatgtccattattgcggtaaaactatacgcatggtttgttaaaaagaatattgttgtcaagatgccagacaccgtaccagcaggagtttctcgatcatttacggcattgattccaactgcagcaattgcactaactgtcattgtaatcaacggtatcttgatgatcttcaataccgacatttacaaaattgtggcgatcccatttggctttgtgactaatctgacgagcacgtggctaggattacttgttgtgtactttatcatgcatgctttatggattgtcggcattcacggggcaacgattgtgacctccttcttaacgccgattgtactttccaacatgcaactgaatcaaaagggcgccaatattccatttgctggtgaattcaataactgttttgtcacaattggtggttccggtgccacattaggcatggttatcttcattgcattctttgcaaaatctgctcagcttggtgctctgggtaaagcttctatcgtacctgctttctttaatattaatgaaccgattttattcgggatgccgattgtttacaacccatacactgccatcccattcttcttagcaccaatggcttcgatgaccattgcatattttgccattgacttacacatggtgaaaccgatgattgcacagcccgcgtggccaacaccacttggtttgtctggttttattggcacggcgggagactggcgggcaatcgttctagcctttgtttgcgcattcgttgccttcttgatctggttcccatttattaagttttacgatggcaagctgtatcaagatgagcaaaccaaaggcgcacaagaagcggctgcctaaggttttgttaacggtgatttagatgatttaaaaggaggaaaaaagttgtcagcatttcctaaagattttttatggggcggcgctgttgctgctcatcaatttgagggcggatggtcagctgatggaaaaggaatcagtattgccgatgttatgaccgctggagataatcaaaccaaacgtcgaattacagatggcgttcaaccgggtgaaaactatccgaaccacgatgccattgatttttatcaccactataaagatgatgtcgagcttttctcggaactggggcttaagtgtttccggacgagtattgcctggagccggatttttcctaaaggcgatgaagaacaaccaaatgagaaaggcttgcagttttatgatgacttatttgatgatttgcttgcccatcatattgagcctgtgattacgttgtcgcattttgaaatgccttatcatttggttcaggcttatggtggctggcgcaatcgtaaacttatcggcttttttgttaaattcgctaaggttgtctttgatcgctataaagataaagttaaatattggatgacctttaatgaaatcaataatcaagttgggatgcttaatgaatggtcgttatttacaaattcaggattgatcattcagccagacgaaaacaaagagcaagctatgtttcaagcggctcattatgaggcagtagccagcgcactagctgtccaaatcgggcacatgattaaccccgactttaagattggctgcatggttgcaatggggccggtttatcccgcgactcctaatcccaacgatgtttttaaagctgaacgaatgatgcagacaaattattatcttgcggatgttcaggtgaaaggacactatccggcctttttagaacactattttgcccgacgccaatttaatttggatattacattggaggatcgcgatgtcctactggctggtaaggttgattacattggtttttcgtattatgcatctcatgttgttaaagctgctgatgatgaaccaactgatttcataacattgggatccaatcaggagattaaaaatacgacattacaccgctcagattggggctgggaaattgatccggttggccttcgttatgcgcttaactggttcagtgatcgctatgatgtaccgttattcatcgtggaaaatggcctgggcgcgtttgataaagttgaagaaaacggcagtatccatgatgactatcgcattgactatttacgccagcatattgaacagatgaagttggctgttgaagttgatggggtcaagcttatggggtatacaccttgggggattattgaccttgtatcagccggaaccggccagatggagaaacgatatggcgtcatttacgttgataaagacgatcagggaaaaggaacacttgccagaagtaagaaggattcttttgactggttccataaggtcatccaaagcaatggtgaggatctcacctgaacttgtctagataaacagtgatactgatccacgtttaagctaaaaagaagcccaagagaattttttactcttgcggcttttttattgctactttgaggtgattgtcttttaatatgacatgctactaaatggattgactagttcatctattgaaatggggttataattcaggctaagactttacgaacgagtgtgagtgacgaatatagaggagtggaaaagttgtcacaacgggaaagcagttacagcacaaaggaacttgtgaatcagctgctgaaagatattcaacaaggcatgatccaaggcgcagatggacaacttccaactgagccggagttgatgaaacagtatcaggttacgcggtatacgttacggcaagcattgaagaatcttgccaacctgggttatatctatcaagctcatggcagtggtacttttgcgcgcccgcatcatgtggaaggcgcaatttcacttcaaaacaatgttggactgacggcagaaatggcaaggcaaggcaaaattgttaagacaaccggcattagtcaacaaattgtgccattatcaaaggcagcttttgtacctgagagccagaagttggcgcaagatactgaactcatttcagttattcgccagcgaacattggacgatgaaccttttttagtggaacattcttattacttgaaatcaatggtaggcgaaattccagatagcgcactaaaaggttcgttatttgcttttattgatcaaaaacctggactaaaagtaggtttcattgattctgtcattgaatgtgaaatgataaccggcacaccggcgcagttttttaacctagcagatggcagcccgagtttagtggttcgtgatgattcgtatcttagttctggaaaattatttgcgttttcaaaaatattttatgatttccgaaaaactaaattctttatgcttaagaagatgcactagttttttatctaaccctgaaaattaaaaacgagacgcgctcaaattgacgaggcgtctcgttttgatgtttactttaaaaaatcgaattacccagcagcgccatgacataaatgaataatgccgcagcgttgaccagcatggatactacgatgatcgtgaagcggaccgtgtatggccgcgttccggttgacgcatcaaaaaagcgggagtgtcgttgaccacgataagcgaaagtgaaaccgattaaaagaacaacgatgacactctccacaatcgaaagcagtaagaagatcggtgggtttgggttggcggtcacgagaaaataaccaccaaatgcaatcaaatcaaggagcaaagaaatcagaaccatcagcatacctccgttgtcaatggtgagtggcgtcggtaagtatcattattcgggaaagaagagcgtcaagcaagtaaaagcgccgggaatagcctgaacaaagtaaattttcttactcatcgttgcaccgccgtataagccgacaatggccacaaagccggttagtaaacgaagcgtgatcagttgattcgggccatttaacagcaaaagacttagtggcatgataacagccagcgcaccattgtaaatgccctgattcttcaacagcatttgtgcatgcggttgtttaacaaagtcaagcggtaatgccagattttgcgcctgactcgttggtttgccgaacatttctaaagccatgatggtgagatgcagcagactgagcaagccaacaagcaggaaactgatacgtgacatcgggaaaatcctttcttgggatctattagctcagagcgacattaaataaacggtcgaaattgtgctagtgcaaagccgacaaccgtgacgagcacgaacgctgcaatggcactccagatgatgattttactcagatgctgctgctttttgtcggcaaacgccatttcgagcaaaccgatcaagccaatggcaatcagaatcttgatgaccgttaacatgggattgcggttgaaagaaaaccgcattaagaccacgccgctgatgatggagacgaggtaacaaactcgcgcaatcatcgtccacatgacaaattgacgagtacgactaaaaagcgcaatgccggcagcaactgccaagacggcccatgaaatcagatgtaaccacagccacataaaaataccccctttttctgaaatcaaaagtactagtcccactataccgctttccgaaaagacgtgcgatagccagtgaaaattagcaaaacacgaacattaaacacgactgtttgaaaaataaacgtattttctattgcaagttgcgacattcttcggtaaacttttcatattcaagttaggggagcgtgtcatggaaaacttttttcatttaaagcagaataagaccacgccgatgacagaagtcatggcggggcttacaactttttttgcaatgtcatatattttattcgttaacccgcaagttttgtcacaaaccggcatgccggctcaggcggtgttcttagcaacgatcattgccagtgcggtcggtactttggttatggggttgtttgctaacgtgccgtatgctttggcaccgggcatgggcctcaatgctttcttcacttacacagttgtcttcgcgcttggttttagctggcaagaagcgttggcactggtgttcatctgtggtgtcattaacattttgattacggtcaccaagattcggaaattgattatcgttgcgattccggaagccattcaacacgcgattggcggcgggatcggtgttttcgttgcttatatcgggatcaagaacgctggctttttacagttcacatccgaagcatctagcattaataccatcaacggccagccgcttaaggaaggtgcattgaccctcaagcacgggattgaatccgtggtttcaaacggcggcattgttccggcgctggttaacttcacccaagccggtgccgtgttagccttgattggtttggtcatcatggtgatcttgaacgttaaaaaggtgcctggtgctattttgatcgggatcctattaaccacgattatcgggattccgatgggcgtgacagatttacatctcagtgccgccaactcgtttggaagcacatttgcctcactacagacaacttttggcgctgctttttctgctaaagggatggggtcattgttcgccaatccggataaaatcgtgctttcaattatgacgatttttgcctttagtttctcggatatttttgacacgttgggtacctttatcggaaccggccggcgcacgggtattttctcggacgctgacgaacaggcgctggaacaaggatcaggtttctcatccaaaatggatcgggcgttgtttgctgattccatcgcgactggggttggttctatcttcggtaccagtaacgtcaccacttatgttgaaagtgccgctgggatcggtgctggtggccgaaccggtttgacttccgttgtcgttgccggcatgttcctgctcagttctgtctttgcgccattcatcgctattgtgccgacccaagcactggcaccagctttgatcttagtcggtatcatgatgatgagtacctttaaggaaattgaatgggatgacttgtcacaagcgatcccggccttcatggcatcaattgtgatgggctttgtttacaacatctcatatgggatcgccgcgggcttcatcttctactgcctgatcaagctgatcactggcaaggtgaaggaaatccatccggtgttggccattgtgacaattggcttcatcttgaactttgtcatcttggcatcactttaattcgaagcttagatagacttttaaaagaagctgaaacagccaccgttacttactaagtgaataagtagggcgggctgcttcagcttcttttttagttgggtgacttgtagtatcctcatgctgaggtgatagacaatggcattaaaaacaatttttcatttggacacaacccaacgctgggcgcatttggcttcaaatctcaacaattatctaggcgctgaacccgacgctgacatcgaagtactggtgaatggcgatgggatcaccgtttatttcgatccgcaagtgactgaattcatcgccgcccatccacaggttaaattcttcgcctgccacaactcattacagcagcgccacttagatgaaaagcagttgccagcaacggtcaaagtggttccagtcggggtcgttaagattgctcaggctgaagcagatgggtatgggtatatcaaaccgtaaaaaaacagacccgttcgattgaacaggtctggtcaatgaaatggcagcagcagcaccaacaacagcagtttcacgttattttgccttttctgctgtctgcggttctgtattaaacggaaccaattgccgctcgattgcttcacgctggtcttccaagaatggtggcagttccaaatgcacgccggcttcttcgtaagtctcgtcaagcaggaagccaggaccatccgtggcgatttcaaaaaggatgtcgggaattggccggaagtactctgaagcaaagtagaagcgatccacaaagccagaagaattcaaaccagcattcccgattttctcaatccagtattgcaggctatcacggtcgtcagtgcggaaggcaaggtggtggacgccaccaaagccttgataagctgcgggtatcaaccgctgataatcgatgatgacttgcgcaccgtggccgccgttgttcagttcaagcaaggtgtattgaccgtccttggcgatttgtttaaagccgagcagatcggtcatgacgctgattaactcatcatagtgatcagtcgtgatgtactcaggaccaagaccgccgattgcaaattgtgggtcaaccgtcgaatgtcgccaaggggttcccgctggcacgccttcattgtgttcgtcactgatcagctgatattgctggccatcaaaatcatgaaaacggagaatcttggcgccaaatagttcgtcaatcgcatcatggcgcacgcggtgatcatcaaatcgtttgatccaatacgttaatgcagcatcagaaggaacccgaaaactagtgcgggcgatttcgttgttgccgtgttgtgctttttgaatgccgggaaaatcaaagaaagtaatatccgttcccgcagttcctatgtcatcggtgaaataaaggtgataggtacgaacatcgtcttgattgacggtttttttaatcaggtgcaagcctaaaataccactcatgaaccgaaaaatccgtggtgagcttgatgtaattgcggttagatgatgaagaccggtgagttgattagccatttcgtatccctcttttgcttacatttagtaagtaaaagataacatggctcaccttgaaaaacaagctttgcgttttggttaaaatcattaaggtcttatcaaaatgcccgttttcggccaagttgctgggcgatcgcgtgatatgctcatttcaatcatacaagtggatggcaaaaaggagcgcatgacgatgttcaattttcaggataatccggatgagtataaacggttaatgcaacttgaagttttgattgcggttgtggccatcgcggcgagcatcgtgatgttcaattttggggtcatgaccggcgctttgtttgcggcaattgccggggcctttttccttatggatgcaattgttgagggccttcgtttgctaggagcatcgcgcggttttagccggttcattggcacggcaatcgcgattcctgctttggctggttatctgatcatgatgttcaatcgattcccggtgcaagtggcttaatcaaagttacttggctaccacgctgtcagttagcgggtccggtaacaccgaaaccatgacgtattttaatcgcatttaaaaataggctcctgagataacacggttaagctgtgttttctcagggcctattttgtttgggtatgagtaggggtcacctataagtcggccggtctaaaaatggaagtcttccttatccgcaacatcttcggcggtcaattcatagcgaaccagtggaactttgctgccgtctggtaaggtccggtcatgatgataatcgccgactttggtaaagaagttggtggtcaataacttggcgccgcgttcattggtcgcaggcaagatgacataaacccgcttcaacccaagctcaaaaaaggcaaagcccagcatccgtttgatcacttcactcataatgccttcgccttgatggctggcaagggtctcaaagcgtacttgcgccacggttttcttttggctgaaattccagatacagaaactgccgaggaattcgtggctggcgcgatccatgatgccataaagtaaggcgttgttgctcattaccagccgcatcgaacggttaatgtagcgggcagtgtctgtaattttttgatcaaattcgcgtccggattcggcagcaacttggcgatcggcgcgcaactggaaaatgtctttgatcttaaaggttgtcagccaatccatggtgtaatggacggacataatcggatggtatttttcaaagctttgcatgataggagcctccgtaaacatgatgttaagtatgcgtcagcccaatttaaagcaggcgtgtgagttgcaacttccagtatcgtgacgcatctaggtcatggtactcatcgtttcctgcttaggcgtttgggactgagaacacttgctggagttagcttaacataaaaaccgccaatacactgatttgaaaaccattcgcaatttggtacggaccaaaaggctaaagtcaagtcccgatcttaattaaaaaacacttgagcagacgtatgttatcaagatgtggtagcgaaaacttggagattttcaaataatagcgggctttcttggcctgtatggacgcggtttgtttaccgtcttaaaaaggatttttttatttttttagcaggcaaataaaaactgaaaatgacaacatatagttttagcttatataatcaataacatcgcaaagggggtgagtaatttgaaacagcttttttttggctcatgtcggggttaatgctgttacaaccggttgggttaaacgtggggcaacaagttgaatcggcgctggcgagtcaaccgacaacatctggtcagccgtcagttgcaaccagctcgtcatcggtagctagtcacgaaagtttacaaacaccgagcgcggcatcggctgcaagtgaatcagcggcaacgcaggcatcggtgccagcagtggtcggcgagaaaccgcaacaaaccagtaccacaacgccggcagaatcaaccacgctgaaacgatccaaacgggccgcttcatcgaattcaagcagccaaccgcaaccgtgcttggtccaaaccgccaaagcattggccgaagcggtacggcgaggtgaaacctatatccgcttgactgctgacattaacatcggtcgcgcggcgattccggtcaagcattcactcgtgattgatggtgatcacaaatacacttatatatacaacggtggcgaaaactggcatgtcggtttgtactttgccgccagtaatatcagtatcacgttcaagaatctgaaaatcggtgatccgcgcgtcaagaactctgccaacaattattacggcattgcaccagcggagaacctcattaagaacagcaagattattgttgaaaatgttgattactattctgatcgcggggcccagccgttccacattcgtaacgcaagcaaccaaatcgtcttcagagggaaaaattcatttcataccactaaaattgctggatcggttttagttcaggaatttgctgaagcgactaactttctttttgaagaagattcggataccacgattaatatggaaaacacagagctgatcggtactttctggccatcaaccggcccgctgaacctaaccctgaaaaatcgggcgcgactcaaagtggttagcgccaatgcactggtttattcagatggcggggcgttgcacaagaatcgcataacagttggggaaggcgcggtcttagacgttaagctcacagacaaaaaagatggcgtgctaatgtaccatgaccacgatttaaccattgatgtccaaaaaaatggccgttttctagccgaaacagttggagcaaacaactttaacaagaattccagcctgaatttagggccgggtgccaaagccgaattgaaaaacactcacggcgatttctataaaaatggcagtgggacgattcgactcgacaacgctgacgaattgctgatgacctcgggaagtcatgggaaaaccagtccaaccgggttgtcggcgtcgaaaccgacgttaacatttgcatcttttaccagtgagacaaaaggatatggcatttatgccgatgatcaatgggtcacggatcaagctgatacatcatcgtgggcatttacgccaacccggatcaaacgcagcccgaccgctttgacgagagggcaggaacaccagattcaggcggcctcacgctttaaggtggttcgtaatgcaactaaaggcaccaccgaaagccctaagaatccgccagtcgtcacaccagctaaaaaacccggtcagctgtttttgaaacaagtaccggattttgattttggaccccgtctgatcaagccggagacccagatcctaaggcccaaagttgatggtgaattcattattgaagacactcgaacggcggcagctaagtcagtcaaagtctatgtcaaagttataaagccgtttaaaaatggcaatctcgatgtgaccagttgtctaagctacatcaaccgctcaggcacggaacaacaactctccgatcaagctgttttggcagaggaggtagacatgacgtcaccgcagtcgttaagcagtcagtggaatcaggccactgacgagcaggctcgtgggctcaagttagtgttgccagtcgagaagcaaaagttgggaacttttacaggtgagtttgaatggtcagttcaagatgtgccgaccaattaagagggtggttccaagtgatgaaaaagtggctactgctggtagttttgctaatcggttttacttgtccaccatcgcaagcgctagcagtcgagacacaaacatccggtgaaattagcttctttgaagttgaacagccggttaatcaaccgtcaccagaacagatcaagccaaagcaacaggtgaacgtaccaccaccgaccaaagaagaccagctaccggcattgggaatgatgaccccactgcttgtgagtttaatcgggctactactggtgttgctgatgctactgattttgttgacaaaacaatctaacacaaacaagaaagaggaagaataaacatgaaaaagttttacgtgatggcatcgatgcttggattaggtatgttgggtttggctggagtaacaccgacactggtttctgctagtgatgtgacttcaaatggccaggttaagtttaagttggatcaaagccaaactgacccgaaaaacccattagatcccgctgataagaacccaggcaagccgaccgatcctactcagcctggtggcaaagttccgggtggcaccgggggcccgttgtcgatcgactttgcttcaagtctcatttttggagaagctgaaatcagtcatgaagatgcaacgtattacgcaaaaccgcaaactttcacacaagacgatggcacaaccgttgaccgcccgaactttatccaggtgaccgacaagcgcggcacatttgaaggttggacattaaaagtgaagcaggaaaatcaattcgcggttaaagacgatccgaccaaggaattgaccggcgcccaactgagcttcacaaatggtaacttggtttcaagcaccgatgcacaatatgcaccgaagttccagaagtcatttgatctcattccgggccaggcacaaattgctccggttgaagcggctgctgatcaagggatgggcacctggatctaccggttcggcgatgataaggagatggccaagtcaattgcgttgtcagtgccaggcaagaccccgaaaatggctaaagcctacacgactgctttaacctggtcattggaatcaacaccagcgaataccacaagtaccccaagcactacaagcacgccaagtacaacgggtaccaccaaaccttaaaaagctggaacgacactgatgatttttggctagcatcaacggtttgctaacggacttgaaacattcaaactcattggagaaggatacgatgacggcactaggccgcatcgttgggggaacttaatcaaaaggagatactttgtgaagaaaaaacttttctgcttcataacgcttattgtgatgttgatcatgcctgccactcaagtttttgcttcggaattaaactttgctgctaaagccgagttaccggacaatcaagtgaatcctgatgttagctattttgacatcaaaatgaatcctggcgctcagcaaacgttacatgttcagttgcgtaatgaaaccgaaaagccagtgacactcgatgtcgagcttgccagtgccaccacgaatctcaatggcgtggtggaatatacacccaacacgattaagccggcaaagagtttgcaattcaacatgaaggattatgttaaagcgcccaagcaaaccgttattccagctaagggcagtaccgttttggatttagctgttaagatgccggataaaagttttaatggcgtcatggctgggggaatcacccttaaagaacatggcttgagtgatcaaggtagccaaacatcagggaaaaaggttgcgatcaaaaatcgcttttcctatgtcatcgggctcctgatgcgccaaaacttagccgctgttccagctcacgttaaattgaatgcggttaagccaagtcaggttaatgcacgcaatgtcattttaacttcgatggaaaatgatacggcaaccttcattcagcaagtagccgtggatgcaaagatctttgctaaaggttctaaccaggcactttaccaagttgccaaagagggtctgcagattgcgccagatacgaactttgattttccaattgcgttggcggggaaagcgttaaagccgggaacgtatgtggctaaactcgaagtctatggtaatcggcagccaaacggaaagatcttacgcacaacggcagaaggtaagcaacattaccgggatcactggaccatgaccaaacaatttactattaccgaaaaagcggcttcaacgttaaatcagcgggatgtgacgatcaagccaagccatccgcagtggacgtacattctaattggtgccgtgatcgtcctcatggcactgatcatcctgctactgattttgctactgcggcgtcaggctaagaaacaagcttcttaatcaaaattgtctgagcaaggtgtttgcaagtttagaaaactggcggcatcatggacacaaataaaggactctgagaattcgtgaacgatattgatccagaagaaacgatgatatctgaaaattcgcgcctttggttatcagcgatgtttgatgctgatggcaaaagtgggcggatttttgccgtgagttcccaaagccgggtgagttatcgttggcggcgtttgaacttagccaatttagcgtatcggcttgccggaaaaacattgttggctcaatcgaggatagaacgtgctaaaaagtaaggtggatcttgtgaaattagttgaactgatggaaaaaaacgaccaaaagaagcttcagttactcaattatcttgatcaatatccgaatcgtcaggtaagaaacagcgagttacaggataagctacaaatttcctactatatgtttaagcgatggacaaaagaaatcgtggacgatattgctacttttcaactggatgatcgttttagtcttgaagtaacggatgcatcaacgatcttgcatgagcaccataataccaatacttcggtctttttggcgcactatctgaaactgtcaccaaaagtcaatatcctgctgacgctgatgacccaacaagccacgtttaacttagcggactttgccgaggcgaactatgtgagttacacgtttatgtataaacgctatattgcgctgcgggagacattgaaaaagtggcagattactttgacgagccaaggcgagctgacgggcaatgaactcgcgatccggctgctattggccaaaatcatggtggtcacacatgtcactgaagataagtttaatcatgaggttcggcaggccttagccgaattgctgggcctcatgaaaacaaccgatgccaagccgtcaatgagccaactgattgaaaccaaggcttatgtgctaattagtttgctccgctgtcaacagggctatacaattgcgagttcccaagaagtggctgatttggtggccaatattcgtcaaggtactttggcaaccagaaacaaagcgattgcgatctatcaggctcattttgacgccagcgatcaggcgattaacagcgaatgtgactatttagggacatttttggcgattcttggcattattaattccgaggaaatcgtttttcctgagacaattaagcagcgcgggcaagcttttatccacggatttgaagccaagtttaaagtgacgttatctgcagttgctaagctgaagattgcgtatgccgtcaataaatgttttgtagatgtcttagtgttaccgtttcgcagcgagtttttcgatgatcatatcgacattagctacttctttaaaacttacccgggattttttgagtattgtcagcattttgttttaaaccaggccttgcacttggaaagctcacaggcacagtttttgttttaccactgtttgttggcactcgccgctaatgttccgttgagcaaggtattagcaccattgtcgatttgcgttgactttacatccggtcacgactataacgcgattattacgcgggatattcaatcattttcaactttgaacattcagatgacccagcaagttgaaccggaaacacaactgattattaccgacttggtgaatgcttatcatgattacgatattccaaaagtgatatggctttctccgccgcggcctgaggattgggaaaatttaattaatgaattactgcgattacgcgagcaggcacaagaagaattccaaaaacgctagaaatttttcgttgtttttttgcaacgaagaattagttgtgaaaatagtgtaaatggactagccacactggattaagcccctttggataacaacggttattcaaaggcgcttctttttatttaactcaaaacattttgatattaataaatgtaatggtatactcgccctattcaaaaacggaggcgagacaccatggaaaaggaaacaggtttttggccggcaattaaagactttttctttcgtgccggtgattttaatggcgttagttcacgctcacagtattggtgggtatttctggcacagttcttactaggtatcgtcattggctttgtatcagcacttacaggctctatcttgacgacaaccacgcattcttttggcgaaagcatcatcaaatcagtggtcacattattatttatggtgccgatgtatctaagctatccacaactgagtttaacgcttcggcggtttcgtgatgctaaggtcaacccgtggtggtaccttgtgctggtgttagttgcattggtcgggccactgttgaccgtcagcggtatgggcttgttgccaatgatcattttgccgcttgttgtggccctcgtagacctcatcattctgctgttccctagtcgtgagcagactgtgaagccttttccagttcacccgcatatgggcagcacaattggcgtaacttttggggcggcggtcaaggatctgtttcttcgtggtggtgacttcaccggaaaatcgagccgcagtcagtactggtggagcgtcctgttttcagcattgattattgtaccggcgttctttttcctcatcttttcgatcactgccgcccttcttggtagcgccgcattaggtaagctgcaaccgcaaaatatcatcaatacctttaattcattgggtattggggccgtgattttggtggcaattatcctggcaatcgtctatggctggtcaatgcttgctttgcctgttttaacggttatttggcggcgttttagggatgcaggcgtcagtccttggtggtttgttgcttttaccattgcctcgaatatcgtttcggcagttcaaacaagtgccccaaatgtcccattaaacctggtaacactcattcttcttattgcgcaaatcgtcatccttgctttaccacctaaagttcaaaatgacgaagcataaagtaatctgtaccacgcaaaaagtgcaaccttccgcagcggaggattgcactttttaatttgcgcttttaattgcagggtgaatcaataaatacccttttcgtcttcatcaaccagtggatcattaaagtttttgtggaagtacgtgctgtcgataactttaaacttgccattcgaaaagcgcgcaatgatttcgccgtattgaacgatgagtggttcggtattgggaatttcgatttttaggcggccaataggcgttttggtaaggtattgaaaattgtcgccgaagaagccttttaggtcttttgtagtggtgccctgtgaatacggtaagaaatgggtcatttttgccgttgaaaatgccgcaaattcgccttttggaaatccttccaaagatgaaggttgagccatggtattctcctcctaagctaagcgtgagccggtgggcgcgttcatgtgtggggatccgaagcgcatggatcgacttgggcattacatctcaagtctttccacacaggtttatgcgccaatgaacacgtgatgtttgagcgcgttataatgcccggagaggttgtttggacaacatcgcgagtttatgaatttacttatcattatgttaacacaataatagaacaatggaatgattgcgtcgcggcctgaaaacgcttaaaattgaggctggacgttgatcggaggtgagcatatggatcaaagtctgtttcaaaatggtaactttcagccgttagcaagtcgcatgcggccgcaaacgcttgatgagtttgtcggccaaacgcacttgttaggaaaaaacaaggtgttgagtaacctcatcgaacatgatgagattagttccatgattttctggggtccgcctggggttggtaaaaccacattggcgcgaattattgcccggcgaacgcaggcacagtttgtcacattttctgccgtcaccagcgggattaaagaaatcaagcaggtgatgaaagaagctgaacaaaatcgtgaattgggtcaaaagacgattgtgtttgtggatgagattcaccggtttaataaagctcagcaggatgcgtttttgccgtatgttgagcggggcagcattattttaatcggtgccactaccgagaatccatcgtttgaggtgaatgccgcgctactttcacgtactcgggtttttgtgctacacggcttgacgagtgccgagctggttgatttattgcagcgggcgcttaaggatcctcgtggttatgggctgcagcaagtcaaaattagcaagaagttattagcacagattgctgattttgccaatggcgatgcccgcattgcgttgaatacgctggaaatggcggtcaccaatgctgagacgaagcatgacgtggtttcagtaacgcaagctgatgttgctcagttgttgactaagaaagccttattgtatgacaagaatggcgaagagcactataatctgatatcagcattacacaaatcaatgcgcaactcggatgtggatgcagctatttattggctggcgcgaatgttagaagctggtgaagatcccttatacatcgcgcggcggctcgttcggtttgccagtgaggatgtcggaatggcggattcgcgggcgttagagattgcggtcacggtttatcaagcgtgccagtttatcggcatgcccgagtgcaccgtccatctgacgcatgcggttacttacctctcacttgcaccaaagtcgaatgcgctttacacggcatatggtgctgctaaaaaggacgcaactgaaaccttggctgaaccggttccgcttcaaatacgtaatggggtaacggatttgatgcaggatttaggttatggaaaagattaccaatatgctcacaacacaaaagataaactgacaactatgcaaaccatgccggataatctcatcggcaaaacgtactatcatcccaccgaccaaggcagtgaagctaaggttaaagagcggcttgaacaaattaaagcgtggcatgcacaacacccagcccctgaatcgccacagcctaagaaaaagtcgtgagtgggacgctgctagtgggcgttaacactatcgtcagcttgtaacagttcaatgtgctgatgcagagttgaatcatcatgcgttattcggcggcgagggtttctaagcgcgccggctcacgctcatcataacgcgttcgccggcgcagggatctgcgtgtaaggaccttggtcgcaatggccaaagagcggccatcacgcccaaggccgcttacactccgatccctaagcgcgccggctcacgctcacttgtttaaaattaggaggaataaaataatggcaaagattctcgcagtcaatgcaggtagttcgaccctgaagtggaagctttttgatatgccggctgaagtgcagttggctgaggggttggttgatcgattgggccagccgcaatcgaaggttaaaattaaatatggcgacggtcagaagtacgagagcgataccccaattgccaactatcaagaagcagttgccagcttgatgggtaatattaaggcgctagggttagtggagcatttgcacgagattatcggggtcggccatcgagtggttgctggcggcgaaatttttgccgaatcggttgttgttgatgatgagacgttgctgcagattcagaacctgcgcgactatgcaccgttgcataatcccgttgaagcggactatatttcggtttttcggaaaatgatgccttgggcgaatgaagtggcagtttttgacacggctttccaccaaacaatgcaaccggagaactttttatatagcattccatacgaatattatgagcaatatggtgcgcggaagtatggtgcgcatggaacaagtgtccgttatgtgagcgctcgtgctgctgaaatgttgggcaagccgctagaagatctacgcatgattgtcatgcacttagggtctggctctagcatcaccgcggttcaaggcggacagtcaattgatacgtccatgggctttacgccattagcaggtgtcaccatgggcacgcgatcaggtgacattgatccgtcattggtaggctatctcatgaagaagttggcgataccggatgttggccaaatgattcatattctcaacaacgattccggtctgctaggtatctccggactcagcaatgatatgcgtgacttggaagccgccgaggacaccaatacacgcgctaagctggcactggatatttttgtgaaccgcgttgtgaaatacgttggctcttacgctgctttaatggatggcgtcgacgtgctggtcttcaccgctggcattggcgaaaacggtgacgagatccgtgataagattatgcggtcgcttgattacctcagcgccaaaatcgacaatgatctgaattacaagtcacatggcgttgaagcagatctaagcacggcagattcaaccgtgaaaacgctgctggtaccgacaaatgaagaacttatgattgtgcgtgatgtgatggcactgagctaaacctgaatcacaagcggttgccagtataaaaattgaacattaccaagacgctcctccaaaaaagcgctagagatgagttttatgacttgtctctagcgcttttttgcatacttgttgcagatacgctacccatttaattaatgcgctcaatcgaaaattcggatgtggttagcgcgagctgcattaacaattgcttcgggcatcactttgtcagtagcaatatagtcaagcgtattcatcggggcactcatatacagttggtgtttaccgactttggtgtgatcgactaacaacatcacttgatcagcgtgagcagcgaaagctcgtttgatgttggcttcctgatcattagcatcggtggcgcctgtagcaatgagaccgcggcaagaaaaaactgccagatcggcttgataattctcaatatcacgagttgctttgtctccgctgatattctccagcattttattgacagttccgcctaccaagctaacataccaaccattgcgcttggaggcttcaagcgcaaccaagatgccatttgtgacaatgtaaagttcatcaatatccttaagctcgcgaataaggactaaagaggtggtgctggaatcaataaagagactcataccacttttgattaatcggtttgcgcgtgtggctaccacccgtttagcatccagattcaaggtgaccgaataatcatatggaacatctttaggttcttcacttaacgttacgccatttaaaacccgtctgattaaaccacggttctccatatccaaggtgtcacgcctaaccgtagcaggactgacgaaaagttgttttgctagatcgctgtatctagcgaattgctgcgtattaaggatctttaaaatttggttttggcgttgaaatgagaccactaagaaccccttctttctcaaggtgcatcattttatgcaaaattatagcaccgattcgaaaaaaagtgaaaaattttcgatatggtcgtcaactattgtcaaatattttcaatcccctatactacgagatgaaagcggtttacaaacacaaaggaggtacatcaacgtggcacttatgggattggatctcgggacgaccggtgttaagagtacgattaccgataatgaaggaaatatcctttctgctgcttaccgagaatacgagacatcggttcccagagaaggcgaatatgaactagatccgagtgtggtctggtcagcgactaaagaagttattcaagagtcaaagaagttcgtgaaagaagatgtgctggcagtcagcgtttcatcttttggcgaggcatttgtagcagttgatgctcaaggccaaccgttgatgaatacgatgttgcagacagatagccgtggaaaagacgagttgaatgacttgttaacgcggatttcagccgaagaaattcgcaataaaaccgggttgaatcccgcggtcactttcgcggtacctaagattatgtggatcaagaagcatcgaccggagatctatcaaaaaattcatcgtatcctgctttatggggcttatattctttacaaacttggcaatgttgatgccattgactacacgttagctgatcgttcacttgcatttaatgtttctaccaacgactgggattcagatatattggctgctgccggcattgaccgtcaactattacctaagtgttaccggcttggtactgtcgttggaacgatcaaaccagaattagcttctgagttgggtgttaatcccgacatgaagttggtgaccggcgcgcatgaccaaatctgcgtttcaatcggtgccggaaccattgatgttggggatgccacggatggtatgggatcggttgacaatatctcgccaatctttaccgacactagtcatctcaaagaaaatgccaagaaaaattatccgaccgttccttatctggataacaaatataccacgatagcttatatgtacgatggtggaacatccctcaagtggtatcgcgatacttttggctttgaagaagttcaagcagcacagttatccggcgtgagtgtctatgacatctttgataagtacgttccgcaaaagccgacaaatttgctgatactgccgcacttttccggcgctgcagttccttatttcgatgaggatgcacgcggtatgattctcggactctcaggagctacccgcaagcctgatatttatcgggcattgatggaaggggtggcctttgaaatgcgaatgaatctggacaatatggaagctggtggcatgcatgtcaacaagttgcgggcgaccggtgggggttcacgatctgatacctggctccagattaaagctgatgtcttcaatcgagaagttgatcgcgttcatatgaaagaatccggaacgatgggcgtcatcatcatggccggtgttgcggttggcttattcgattcttttgagtctgccatgaagaagctggtcacgattgataaggttttcaagccaattccggaaaacgtggcgttctataatcgtcaatataagaaatatcgtgagttatatgcatttggtaaaaagttacggagcttataggagggtaaatcatggttttagttaatacaaaagaaatgattaaaaaggctaaggaaggccattatgcagttggttcatttaacgtgacggacattgaaatgattcgcggaatcgttggtgcagcggagaaggaaaactcaccggtgattatccagtttgctgaattacatgataagtatgtaccactggatgtgattgctccggttatgctaaatgttgcgcgcaaggcttcagttcccgttgcagttcattttgatcacggggaaacctttgataacatcatgcgagccattcgattaggcttcacttcggttatggttgacgcgtcacaggaaaattttgctgataatctggcccaaactaaagaaattgtcaaaatttgcaagcctctgaacatttcggttgaagccgagcttggaccaatgaatcgtgaaggcagtggcgataagaaagttgattatgccgatctaaataagacgtatacgaaccctcaagaagccaagcaattcattgaagagtccggcattgatatgttggcggttgcatatggaacggttcatggggtttatacccagaagccgcacttaagtttcagtcggttaaaggaaatttctgatttggttgacttcccactcgtcgttcacggcgcttctggattgacagatgaagaatatcgtaagtcggttgaaaatggtatttgcaagatcaattactattcggaaatggttcatcgagttgcgttgggtgttcaaaagaaattagaacaagatgatagtgataaacaactatttatttcggacgctagcatttgggaaaccgaaatggtcgaagaagaaattcgcgggcgactacgggtcttcggttcggcaggtaaggcttaagcaattcggaaaacaggcggataggggactgtccgtctgttttcaaggaagaaatgagagcgcttcagtttagagaatagacggcgctcaacatataaggaggctttttttatgaaatttctggttgatatgctcagccagccttccatcattgccggaattgttgtcttggtgggcttgatagcattacgtaaaccgtttaccgaagtcattggcggaaccgttcgagcatttatcggttttgtcgtcatgcttgcaggtaccaatattattgtcggtgcgctgaataactttgctaagttatttaccaaggccttcaacatgcatggcatgattcccagtaacgaagcggcaatcggagtgacagttgctaaatacggaacagttgcaacttttatctttgtctttggacttgtattgaacattgtgttggcgcgtattacgaagtttaagtatattttcttatcaagtgaccatgcgttttacatggcatgttgtttaacgccgattatgatcttaggcggcttaaatacggttgaagctatcgtctttggttccatgactttaggtgtcattctctgcgtcttcccagccatcgcccatccaacgatgaaaattattactggacgtgacgacatgagctttgcccatttcggcacattggaatactggctatcggcaaagatcggatcacttgtcaataagaataagaaatcgaaatcgattgaagatattaatttcccgaagtcattagcatttttacaagatagcaatgtttccgttacgattgtgatgaccatcttgttcttcgtggtgacggcagtggccgggccggcgtatgttggtaagctaactgacttgaatccatacgtttgggcgctcttgcaagctgctcagtttaccgcgggcattatcgtcttagtccaaggcgttaatatgttattagctgagatcacaccggctttcaaagggttcagcgaaaagattgttccaagcgccgtacccggttacccatttgccattctgtttaagggcacatccaacgcattactggctggtttcttggtaagcttactcggtggtttactttctatgggggttcaaatcataatcgggacaaccattgttattccggggattgtgatgcacttcttctgtggcggtatcgcggcaatctttggcaatgctacgggtggtcgcaaaggcgcgctgattggaccgtttatcggtgggattattctaagctttttgcctttggtcgccactggcctttatggggggttgggttacactgcaacttattggtctgatagtgatttcaatacaatcggggtgttacttggacttgttgctaaagttggtaagtggccgattatgctggctgcattgattatctttgccttcccatttgtctttagtgctttacacaagaaaaaactggttgattaatagcaatttttgaattaatagcgctgatatataaaaagtcgatctcatgaagagtggccgcatggcaaacgcgactgcttttcaggatcgactttttatgtactgcgtagcgatctgagttttctaatgcgcagattttcagaagttattcggcgttaatcccttggtcagagtccaccatgacgcccttcgtttcatcaaacacgcaaatgttgccatagttttccttaaatcccatgtgattgcccccatcaatgaaataacgcggcgattcatgggggtactgaatgactttaaccggacatttcggatagtttccagttaagggagtttcgggaactggcggtttcacatcgccggcatagtcaccgtagattaaggcagttggtgtatgtccggtaacaatggttttgttaagcggattgtgcgcaaagatgggatgctgacgcgtttgggtttgctgcatgtcataaatataaggctcccggacccacatgcggttaaacggtgtggtctcttttaaagggttctctaaggatagatctaatccggcgtgaatcagtaaaagcttgtcaaacgtcaccgctgtgggcatttcagcaatgaatgtaatcagaggcgcgatatgttgctgcaccgcttgccgtaaattggacttttgcgcgttggcggggacaaaatccttgatcatttggcgcaacgttactttaccgccattgatgaaccaaggattatctttgtccgccaaataatccagcaacatctgatcgtgattgccccgaactgcaattgcctgactattttggacctgttcgtaaatctgactcaaaacgcggccgccatacggatagccgtcgatgtagtccccgagatagacggtgagtgcatggggatacttggcttgcatcaagcgaacacgatccattgtttttaaattgccatgaatatcggatacaacaatcatggtcatcgcttttgcctcctcacgtctttgtcgtcaccttttttgctgccggctgtggttttatttaacatgctagttcatacacttataaataacggttacgtctagtttactttatttttgcctgattgtgcgatattaataagaggttaggggtgaaaagatggataaacggttaattgtcatgcacaacttgagtcagcactacggcaaacagtattggtggcagcaaaactcactggaagattggttgatgatgatcctgatccagcgcaccagttctaagaatgtcgcgcaggcggtgcataatttgcggccttacatgcaggttgatcgcttgctggcgttatcacaaccggaactggaaacacttgtgcgaccggccggattttaccgccaaaaagctcagcgcattcatgatctattggtgtggtttgtggctcaaggcggcagttttgataagattgccgaaaagccgacagccgaactgcgcaagactttactggcattaaacggtatcggcaatgaaacggccgatgtcatgttgatgtacacctttggcaagaaaacgtttgtcgcggatacttatgcgatgcgcttattcaatcgcttaggtttcggaccctataaaaattacgctaaaatgcaggccgattttaccccattgttggcaggcatcagtttagatgatgcgcgggaatggcacgctcttatcgatgaacatggaaaaacgcaggtacggcatgcctatgatgatcatttcttgcttcagcccaacttgcctgaagcagcttggccaccggaagcaaaacaaattgagcccccgcatgacgatcctggcagcggcaaatggcgccgaatgtcagagcagtctgacaagtaggcaagccgccaattttactgaataatgtcccggttaggatcgcgccagttaatgacaataacgaggagcatgatgatgacgaccatgatgaaaacaccgtggaggccagtgagaatggcggcggcagcatgaggatcgtggacggtggttgctgagttggcgctgatcgctgcattgacggctttaaaggaagtgccatgcagattagcccggatcacaagcgttaacacggccccataaacccccgtcataatcgtttgtcccaacgatcgccctagagtcaagatgctagttgccgagccgacatagcggtcaggaaccaagtgttggctaagcaccgtgttcatactaatgacaatccccatcaccgttccgttaatcatcgcaatgacataaaaagcccaaactgggaatgaggacgaagcaaatgtgagcagtaggtaggctaacgtcagaattgtgaccagggccagtgtcaaagtacgtggcaccatccgcttaatcaaagggccaactaaaaacgacgaggttaaccataatacggaactagaagtcacaaccaagcctgcagcggtggcccctaaatgataaagcgactgtaaccagataggaaaataaacctgataaccgattaagacgccactaagcagcaaagccgttaagatttggacggtaaaggtgaaccgatgaaacatctgcggcgcgatcaaagggtcaacagcgcggtgttcttggcgaattaacaggtaaccgccgacaatggcaagaacgattaaaagtgcggctaaccacggctgctgatcaagtgcctgaatgcctaaaagcaaggcaaccaaggtgacagccaaccaagtgatcccaagccaatcaatcgtaagcgacacatgttcccgccgcggttcccgatagccgatttgaattaagccaaagaccagaattcccagcggcacattcacaaagaacacccaatgccatgacaactgatccaccaggaaaccgccgatcaaagggccaaccaaggcggaaagtccccaagccgtattgttaagtgccagcacattcgcgcggtgggcaaaatcgtaatagtccgcaatgatggtaaaagttaatggcatcaccgcaccagcgccaataccttgcaacgcgcgcgctaaaatgagcagtaaaatatgcggcgctaggccactgagcagcgtgccaagcgtaaacagcaccacaccccactgaaaaacgccacggcgcccaagcgtatcagccaacttgccataaattggggttgtaatggcagttgtgagtaagtaagcactcatgatccagctttgataagccagcccatgcaaatcactaataatcgcgggtaatgccgtcgtaacaatggtgacttcgaccgaggtcatgaaagtcgcaataaaaaccgccgccataacgaggccgcggccttgaggttttgtcgatgtagacatgtggccaaccatctccttaatagctctattgtaacaattaaggtcaagagttttgaatggttataaggccacaaatagctttattaaagatatgcaacgcgatgtttaaagatgaacagtaaagtcacaaataagatgattagcaaaaacagattcgtaccaagattgattaaaacgaacaatggcggctggttaagaccggtcgtgatcaagtacgggcgatttgcagccacagttaaaatcaagaaacttaaataaagtagcaagccccacgtttcattaaacaccgttgtaagacaaaagaagatgatggtaccggtgatgatgctaactagccaagcgatgccactcagccaatcaaaggatggatggcagagaaggacaggtaagaagccaaaactaaatgtggtaagcagacagataatggttattgttgcgtaactggcaagggtataatccaacttttttgataaacgtacgtcaaccatgatcgaaatgaagttgcacaattgatcaatggtcgaaaataaccaaatgggtggtaaaaggtaaactaaaagccaaggtaaatgcgccatcagccaatgaatcagatgctggtcagcatgatagctttggaaactgaatgcatcagaagaaccgaaaataaccaaaagtagttgtaatggcataaaagtgaccaaaatgatgacagaaataaaggaatgttgtaagaagatcattctggtttgagctgctataagtcttgtcactgcgcaccttcttttctaaatacgacatgctaataaatctcaattttttgaactaactcggcatttaagtagttaaaggcaaagatgagcagcaaacagctgaccgttgtgacgacaaagttacctttaaaccaactctgggcaatgaataggttgtaagcattgttaagatgcgggcttgcaaacattctggcaaaacaaaccgtaaaaataagcgccagacaaatcaaaagcggcagtatattggctttgggtagcaagtaagtcaacgtgaaaaagacacttcccatgaggcatccgttaagtgcaaacaaacaagcgtcaatcagcagtgaagggacgacaagatgctgaataaaactgccaataatgatccagtaaatgaacgaagaagtccaagcgtggaccaacacggtgaataggttgcgcctaaaaatggtcatccgatcatgtacgcgaacaagtaaaaaggcgtcgtgacgctgtttgcacaagaacagcccgattatgacgaccataagataaaaggattcaacgttgggcttaacatgagtgaaaagcgagagttcgtacccgaccgatttttcgccaaatataagggccatgattgaaaggctgaaagcaagctgaatataaacaaaaagcttgaggttacgtttacttgatgtcatcagtttgcaccacccgccaataaagaatggcgattaaaccggtcgtcaagaatagattgaccgccattaaccaaggcgttattacgttgtatccttgagaaggaatgagaaaaatagccggtgaaatttctgctaagccaaccaacgggcctatgagccattcactaaggaaaacgataaagacaagcagaatggcgatagatctgcggttagttaacttgaaaataagaaatgtggtcgttgccatcatgccggagaaagcaaaaaataatccgagatagcctaataagaattgcaaaggactatgaataaaagaagcaaagtaagttgttcctgggctgattacctgaccagaaacagtgaatggatcaatgatgacaccttgttcacgggttagcgcgatcaaagcatcgagtacaagtggtaaagtaagcgcgccaccgccaactaagaaggtaaccaacatgttgacaagggtatatttagttttaccaagcttggttatttcaaaaaaataactgtggtgagcgcggctgtctgataacacgaaagaaccaattaaactagcgacaaggggaaagactaagtaataaagactagataatgacgaaaagtcaaaaccgatcatgatttgataggcagtcggagcagtattccaagaaccgcgagaaatggtagtggtcagctggtggtaaatggcaatcagtccggctataaggagccatagcgtgaccatccgattgtccaggagccgcaataactgagttttgaaataagctttagtcaaatatcatcacctccagtaaggttatttagttaataaaaaagtatgtcgggttcttcccggtaaatcggggttatcaacagataaacgtaagctgtgactgttgaaggcgccggataactttttggagaggcaaaaaacatagcgataactagaggcatagcggcgagtgccaaaaggtgatacttcgtaaatgttgttattatcgacatttaaggtaatatgctcgcttgaccgatagcttgagactgccttaacgacaatgaattgttttgtttgatcatcctttagtattcgttgttcttgctgattgaagactttggcaaggtcggtagtcatctcaacatgggtgatgcggaagggatgcttgcgatataacagcgctgtttgccctaatttgatatttttctcctgataacagtactggttagtgtttagattctttacacttgccccgatgatagtaacgatcatcaccgctagaatgagcatgaggcaatatttggtttgcttaagcatctcgcaacgctcctttgaccatgccgttttcgatgtgaatgacctgttgaccagggacctggatttcttgatgactgtgtgtggcgatgataatcgtggtgcctttttgtcgttgcacttcaataagactgttcagacggactagcccatcagtatctaaagcattcgtcggctcatcgagtaatacaacttcctgattttccataaatgcttgcacaatcgctaatcgctgacgcatgccgagcgaatatttggtgaccttttggtgttgataggcagtcattcccatctgtgacagataatgctgtatctgttccgggtcaggagcaccattaattgaagctaagaatttgagattctggaaaccggtataagtgttaatgaagtccggggtttcgatgatgacgcccatcgtgacaggcagctgcttgccgaaactgattttcctttgatccactgtgatgctgccttgatccggtttaacgagaccacaaatggtacgtaagatcatcgtttttcccgaaccgttgggaccttttagaatcgtaacggtacctttttcgatgttaaaagacatatgattcaacaccgtgacgcctttgattttctttgaaacgtcattaacttggatgtacatgtgactctccattctgttgatatttaggcaaaaaagccataaaaagtagtttatcgcagtctgtgacgatgatgacctgagtatcggatacggttggtcgcttgcaagagcatgcttctctcagatctaaaaattttttgaagtgctttcagcttatcctaatagaaactataactcaacatttaattattagttacagaggttatttattcagggaggttaattttaatattcttttataggcaatgaacgagtgacaaccattaataatataataagttttcaaatacttattcaaaagaaagattatggtcatcactcggaaaaagtgcgataaataaatgaaacccccgcaaccactagcaatactgcttagtggttggcgggggtatgctgaatattgaacgttacatcgccggccgtcttggatgatgcggcgtttgagtttgatcaatggcgactgcgcctaacatcaaaataataatgatgacagctgccattaattgcccaaagaccatcaaactaaaagcgccgatgaaggcaaaaatcaacaacaaccaatcaagctctgagaatgacaacccaatcatctccttaaaagtcagactccgaggcatcgtaacccattgccttgctaggcgacacatagacgacaagctcatcgctaaatcgcttgagacaataggcaatgatgccaatagcagcaagcgttgtgacagtcttaatcagcggctttttcatgctctcgctcctttgcctgtacattatcctgtacactatatagaaggtattaaacacaccttaagtttacacccgctgcgtgaagatagcagaagcgaggtgggaaaattgagctcatggttcgagatgcgctatgatcggctagcaggcactgatggtaacaacatttaaggcaatttaagcgaatttaagtcaaaataagtgctttttgccaaaactgtggtatactgaaggcattaaaatcgaaagtaggtatgagcatggatacaaaagtaaagaccgttgattactcatccaaggaatactttgacaagatgactgcttattggcgggcagctaactatgtgtcagttgggcagctttatttgaaggacaatcctttactggaacgaccactgaaaagtgaagatgtgaagccacatccgatcggccactggggaacgattgctgggcaaaacttcatttatacgcacttgaatcgggttattaataagtacgatctcaatatgttctatattgaaggtccgggtcatggtggccaggtcatggtttccaactcctacctcgatggttcgtattcagagatttatccacgggtttcccaggataaagaagggatgaagaacctgttcacccaattttcctggccgggtggtgtggcatcgcatgcgagtgcccagacaccaggctcaattcatgaaggtggggagctaggttatgcgctgagccatgcaaccggggcgattttggataatcctgatgtgattgccgcggttgtcaccggtgatggcgaaacggaaacaggtccgttagccgcatcttggtttagcaataccttcattaatccaatcagtgacggggcaattttaccgatcgtgcatatgaacggcttcaagatttctaacccaacgattctgtcacggaaatcagatgaagatctgaccaagtactttgaaggcatgggttggaagccatactttgttgaaggcgatgacccaaccaagcttaatcctgaaatggcgaaagttatggacgctgcgatcgaagaaatcaaagcgattcaaaaacatgcccgtgaaaccggcgataccacgatgccacattggccagtgattattttccgctcaccaaagggatggacgggtcctaagagctggaatggcgaaccaatcgaaggctcgttccgcgcgcatcagattccgatcccggttgatgctgaagatatggaacatgccgattcactggctggctggctgaagtcgtaccatccagaagaattgtttgatgaaaatggcaagctgattccggagctggccgcgttaccgccaaagggtgacaaacgaatggccgctaacccgatcaccaatggcgggcttgatccgaagccactggtattgcctgattatcgcaagtatgcactggataacaaagaacatggtaagcaaattaagcaggatatgattgtgtggtcagattatctgcgtgatttgatcaagttgaacccgcataacttccggatctttggccctgatgaaaccatgagtaaccggctttacagtctgtttgaagtcaccaatcgccagtggctggaaccaattaaggaaccggctgaccagtacttggcaccggctggccggattattgattcccagttgtcagaacatcaatcagaaggctttaatgaaggctatacgctgactggccggcatggcttgttcaccagctatgaagcatttctgcgcgtggttgattcgatgctcacccagcacttcaagtggattcgcaaggctcatgaggaaccatggcacaaggcttatccgagcctgaacgtggtttcaacttcgacgtccttccagcaggatcacaacggctacacccatcaggatccaggcattttgactcacatggcggaaaagaaagccgaatacatccgcgaatatctgccagctgatgcgaatagtttattggccatttcaccaaaactgttcagctcacaaaacacggttaatgtgctgatcacttccaagcagccgcggccacagttttacagtattgatgaagcaactgttttggccaatgctggcttgaaacggattgattgggcttccaatgatgatggtgttgagccggatgttgtcattgctgctgccgggaccgagccaaatatggaaagtcttgctgcgattaacttgctgcatgacgctttcccagacttgaagattcgcttcattaacgtgcttgatcttttgaaactgcgcagtccagaaatcgatccgcgtgggttgagtgatgctgaattcaacagttacttcacgacggataagccgattctctttgcttatcatggttttgaaggcttgatccgtgacatcttctttacccgtcagaatcgtaacgtcctgattcacggttatcgtgaagaaggcgatatcacgacaccatttgatatgcgggttctaaacgaacttgatcggttccacttggccaaggatgtcattcagcatgtaccggcatatgctgaaaaagcggctgcctttgttcagaagatggatgatacgttgcaatatcaccacgacttcattcgggcaaacggcgaagatattcctgaagttcaggagtggacttggaaatcaattaagtaataccaatcgagtcttggtacaatcgctcagataattaacaaatcggtattagcaggtgaccgctaatgccgatttttattttgttaaattaaatttagatgataactattttaatcgatataaatacgagtggcgatgtaaccgcatacactcatggcgatgaaccggtttaagaaaaaaggtcaccgactgtcagccaaaaagtgaacaaaatatgaatactatggcaaaaattgtgtaaaaaacacctttacatctcacgagttctaatatactcttaatgtattatcattttgagggtgagtagatgaaagctaaacgaatgatcgccggggcaatggtagttgcctcagcagttctcttggttgcatgtggcagcaagagcagcagtagcaccgaaacgtttaatcgaatggaaaaagatgtcatttcgaccatggataacgcgcatattacagatgttattagtggtcaggcagcggtcgatacgggcgatggtctgtatcgttacaagggtaagaagttgcagccggctgtcgcaaccaaagtggtgaagccgactaataaggggcttacgtacacgtttaatctacgtaagaccaaatggagcaacggtgatcctgtcacggctaaagattttgtttttgcttggcgccgggcaaccgatcctaagactaagtcagagtatgcttatctgttctcgggtatcaagaacgctgacgatattactgccggtaagaaggcgccatcaacgttgggggtaaaagcagaaggcaattacaagctggtcgtaacgatggaacgtccgattccttatttcagtactatgatggttaacccagtcttcttcccgttgaatcaaaagacggttgaaaaatatggtaagaaattcggaacgcaaagcaagtatctggttttcaatggaccgtttaagctgactaactggaacggcacagggaattcatgggacgaagtgaagaataagtcgtattggaatgccaagcaagttaaactagacaagattcatgttcaggtggttaaagacgctaacactgcggctaacttgtttgcaaccaagaaacttgacgatgctgttttaaccggtgaaatcgctaaacagcatgctaaagataaagattacgtgggcgacaaacagggtcggacctcttatcttgatatgaacgaagaaaaggttccggacttcaagaacctgaagttacggcaagcggtggcaatggctattaaccgtaaagagttcgctaataaggtgatcggtgacggctcatttgggatttcgacacttacgcctgaaaactctggctcaaatcctaagacgggtgaggacttcgccaaggaagcagctaaagaatctgaaacggttcagtcatacaacttgaaggaagccaagaaactttgggctgaagggctgaaagaagttggcaaatctggcgaacaagttacactgacgacagacgacacggatgttgcgaagaagtcggctgaatatattcaatcagctttggaacagttacctggtatgaaggtttccatttcctccgttccattcaagactcggattcagcgttctttggatggcaccgcccagttcattctctccggctggcaaggcgatttcccggatccgatttccttcctggatctttatacaactggaaacacgtataacttcagccactggtctaacaagcaatatgatgagctgatcaaggcttctgagaccactgatgctaacaacgaaacaaaacgttacaatgatcttttgaaggcacaggaattgctttctaaagaagccccagttgcgacactgtatcaaaccgttcaagggcatttacgcaatccgaagttgaagggcgttaccttcagcccagccaacatgtataactttgttggtgcgtatatggctaagtagtaaagattaaaattttcatttgaaagcccctgcttgcgttggcgtacttcaccaacgtaggcaggggctttttgtgtgagcttcagctagcagatattaaagagtttgtattgtggtatatattatctaataatttcaaaaccgataattctacccaaggccggattaattatgatgtaagataagtacaacacacatatgttaatgaataatatttcgataaaaataatctttaaataaaaataaaaatagcttagaaatatactagagcttaataaattcgtgtagaaataaatatttatttaaaaacggattgactagattggattttacaccgtataatttctatgtgatgttctagaaaagacaacacagggcagttaatccttcacatgggcatcgctacgagttttatacgaacacaaggctggatatgtacaattgtgtgattggagactgttgttctgggattccaacaactgtttacatgcagagctggagcaacggcaatgctaacggatggcggaaaccggatatttaatattttggaggttctatgatgtgccgctctttataagaatggagcggcctttttgggggattgatctctttgagaaataaacaatactggcagtcccgatcaaccatcacggctttgttactcgcagttttatttatttcgagccacctgattgcaaatgccggctatgatgcagatgggggaaagcatttgacgggtttctactttttttcgccatatatgaactggttgccaattgatatttcttcaagtttacctgttgcatggaatttggctgcgccgcttttatcagttcttgccggtggtatgatcgctgcttcccatgggcgcagtgggtatgccaagttaatgcgatttcggcacagctttgtggcttatcgcaggtcggttttcttggctgcgggcgttcttggtgcaattgtgccaatcatggtactgagtttagacttcctgggtttgcttgcgattcatcctaatgtgctgccgaatcaatggctcaataataatgttgcgattagttatttgggacttggggggaatcttttttatacccatacttgggcctacatgttgggatggattgctttactagccttttacggggcaagctatgctattttttcgaattttctctattttgtcacagggaagatggtgctgtcgttgattggggtcatgatggttcagttaatattattaagcatttctataatctttaagacgagtttagcgcctattacttatttacagattgttccaactattgggcagccttcgctagcctacgttcttttatggcccgccattttaattgcaatgagtatttttagctttcgagtgccaaaaatcgaggcttagtttatgaaaataagaaaatatcagttgtttctacattttatttcacgctggcaaagcattttgtttttgatgacagtgcttgttttcgccctgactttcgttcttgccggaattatgacgggacggtttgagatcagccaattggatgccaacatttcggttcaacgtgcatttggacaggtgatattttatttgcccatcgttgggatgatgacgtttttacttgtgagtcaagctcaaaacacgagtcttctcataagaattggttccagaagcttgatagcaaaatatattttgcgggggttattttatttggatcttgtgatatcggtggcggtctggatggtctggataactgcggtgctgttcttatcgcgaggtcaaggcgggatgacgtcagttgcggctaatgctaatttattgatgaatatctttaccgggctgtttttgtatacgctaatgatacttgctctttgtatcgtttttaggtctagagtgattggcatttccttagggctgagtttgattatctgcttttatatcgttccttttgtcaatttaactgaagtcgcaaatctggtaaccccgaagttaactaaagatgcaatatggccgatcaatattgctaggcagtggttggcaatattcattggcgctcagataatcacgatattatttaaccatgttcgcttgcctgtcgaggggtgaagcttaatgaagatacaatggcaaaaaccgcttattgataagcgcatgatagtggttttactgcttgaggtcttactcttgataagctcgctagcgttgtattttgatcaacagaatagcaagttattgcaacaagttcacgatccggtgatgactgtatttatgggcgcaatgccggatcggtttgcgagcagtcagttatggtggttgcttctgtgggttggattcatgtctttacccatcttcatttgtgccggggtgacagatgcttatcagcgtaacttgtatacgtttcttagcttgcggatgcatcgaagacttggtgcttatatctggcctttaaagcaagtggttttgagggaggcaagccttttattggtaatgggcattgcagtcggcacactgacacatttctttttgaggacgcagcaatttggcgaggctggcttgttcattattcttattattgtgagtcaaacgtttttagtggttttagaagcggttcttgaaggttactttggccccatgattggggttgtcggaacgttaacgattatctttttaagttttctgcaaatgccgttgatgcctttgcgttttgccattgcaagtacctttgcaacggatccacagttattaggtgcgattgggtatcagatcattttgatcattcttttgctactgattcaactcttttatatgccaggaaggtggggccgatatggcacaggtcgggaataaatcaggtgttcgtgttgatatttcacatatgtccgtgatgatgagacggaaaaagattcttgatgatctttcactttcttttgtctctcctaatatttacggcattgttgggccaaatgggtcaggcaagacagtttttttaaaagcaatgttgggatttatacggcttgtcagcggtagtgtgacgatgaatgaggttccaattgatccgcggcgggcttttccgataagtgtcggcgctattattgagcatccgggttttatgaatgacatgagcgggcatgataacttattggctttgggacagattcgtagtcagcttgatgatgaagcgattcatgccgtgatgactcgagtcggactgccagatgacaaaaagccagtcgcaacctattcgctagggatgattcaacgtttgggaattgcccaagcgatcatggaagatcaggaatttattgtgttggatgaacctactaatgcactagatcgtgaaggtatcgtgtttttgactgaattattaaaggaacttcgcgaccaggggaaattagtgctgatcgcaactcacgaccttttgtggttgcaatcgctagcagatcagatatttgagttgtccaatggtaaacttcagcaggttgaggatgtggtttaatgatgaagccggcgcatcggcgaatttactttttaatcggcggttgttcaacagtgatgataattcttgtagggctgtttgtttggcgctatcaaacccttaatgtgaatgttgcacagccggcagtttgtacgcgacggctgcggttgccggcaaaagtggttctgaatcagacaacggtcgtgctcgaaaagctggaaacaaaggtaacgaatgggcgttggcgggtgcgactggtttttaaacgcgcaattacgaaacaaaaccttaagcacatccgcattcaaatcgcccaacaccgcgaaggaagcgaagtagcaaatgaacaacttgcggtaatgagccgggataagaaggtattgactttgacggatacctattatagtcaggcgaaatacaatcgtgttgtcatgacgacattgccaagggttgcacgttcacaaaatctcgttcagattgtaacgttcaaggaatgagatcgtgttaacataacttgatgactgaatgcggtttagaggagttgagcgctgtggttcaagaaatagacgacttgagatttcaactttcaccacatgctaaatttgatttccgtgctgccgttttactggtgcatgacaatcaagtgttagtaacggtgcagcctactagtggtgttgccattgtccccggaggtgcagtgaagtttggtgaaacttccggtgtggcggctaagcgagagctatatgaagaattgcggcttcaggttgatgagccgccactagtaggcgtacttgaatcattttggcaacagcctgatcgaacctatcaacaactgatcatggtgcatcgcttggtactgtcccaggcgcaaattgacgaactggtttggcaggaggggctgcaggggcagtggttgccgaagtcagaggtggctaaacacttgcaaccgcgcgctttggcacaatttttagaacctagtgcaacacttttgcaccttgtcgatcgtcattcggaatgaaacttgagtggttttccggtttgaaagcgtgcacacggcatctcaaattataaaatatataattagaggtgcttattttgcctttctttgtcaaccttgatacgcttaaggtaggctacagccggaagggagttgcatttttatggatataacgactagaccgacgttgcagcaatttttagcggataccaaacagggtccgtatgtatcactgtacatgtcttggccggagcatacaccggttgagaagttgcggatccggttcaagaatatgcttaaacatgtcaagacggtgatggcggaaacctattcgggcaccgactttgcgccatatgctgccgaacttgaaccatatgagcaagatccgatgttttggcaagacagcgaagcaaacgggattggtatgttgacgaacggtgcgcaaacgtatgtaaccccaatgtatgaagcagttgatgaagtggcaatggtaactgaagtgccacagattttgcctttgatgctggatgaggcaaccgcaacagattttgatattctggcgcttaatgctgatagtattcagctatatcataaccatggtcaccaagtgcgcccggtttccttaccggatgatgcgccacaaacattgaaaggcacacttggaacggaaattcgcggcggcgagttaaatagtgtgtctcaaggcggtggccacgtcacttaccatgggcacaacgaaaaatccgccgagaaggcaagcgatcaacgtcgattctaccaggcagttgatcaatatttactgacaaattattcgaatcctaaaaaaatgccgctggttctcatgggcttagcagagaatgtagcggtattccgcgagatttccaagaaccatcatttactgccgaaacttgcagtggtcaaaagtccggcaacgcttgattttgttgagctggatgacttacttgaaccagtgcgcgccacattgcgtgatcggcgccgacaacacttcgctaatgtcattgaaaacgcacgcggcaatggcagttacaccgatgaattggcaacgattgtatcggcggcattgcgtgggcaaatcgccatcctctttgttcaagccggcgcacgcattcacgcgcggcttgaaggtgatcagattgagcgcgattccaaggctgctcagcatgcgaatctgttaaatacattggcggacattgtattaggccacggcggtcaggttgaacttttgcccgaagcccatttatcagctaaagtcggcgctacgatgcgttatgcttagtcaatgattgtgaacaaaaacgagctgccaagttggcggctcgtttttggttgatattcaaatatcgcgatactagtgaatcacccaaaaatcactttgacaatttgttcagcggttttgaggctcacatcattgaccaatggccgcgggctggcagtggtgagccagtgaacgccttcagtcgggacgccccagaagaaaaggccggcttgtggatgttctttttggtcaagtagctgttgggtttgacggtcaatggcaatagcgcctgactggaagcgtttgtcggcgttgagctgcagttcataagtgtgtgcgtacccgtcatgaagcagctgctgtactaatggattttgggcagtgggcgcattgactgccggaacgcgtgcttctagcaaggttttggcttgaagcgaaaactttggatcgctcggggtttttaaaagaaattggccgtcaatacctttgatctgcatgccgggcggtaaaatagtgacgataccggcacccattagtgcttgcagttggtcaatccgcaaagcaggcggtccgattgaaagaaaatcattcagtgagttaaaccagcgcaagaagaagtccaggtattgatcctgactgagaagattacgctcaacgagttggcgaattggatcgcgcatgtcgcgtaaaacttcaagcgcgctggtcagtggtccggttttggtgccgcgcatcgcttcttgggcatcctggcgcagataatgccgcatgaagtcttggtacggctgaccgcttggatgcgccttggtgggatcagccaaagcatcccaatcgagacgatctttagcggcgattggcagtgctcccaaggtggcaacagggtcggcaataaaatcgcgttcaaaagctgcctcgtcaatttctgggtagcgttggggcaacaaaagccgatagtaaatcaactcggcttcgtgctgtaaggcttcccagaaggtttgaccgctcacttcgccatgagtttgccaagcgtcaatttgttgtggtgtcaagaaatgcggctgccattcttcacccggtcccttttggttacggcctttagcacgataagggaaaccgcgtcgggagccggcaaaaatatgtggttcgcggccgctgggatgataaacaagcagaccgtccggcgctttttggaattgtccgccgcggccttcagtgagacgactcatcaaatcaaagaaactcaagcccagtccgcgaatgatgaccggtgattgtgcttcaatgccgctgagatcaccttcttcggggaaacccggttccaggtaaaagagctggtgtgtttgcgcataatcgtgcaatgccttttggtcgcgcgtcaatgagttttttagatttcccaaggccatgaccacttgatcggtttgccagctttcttgggtggtggtgatggtaaatccggcagcttttttatctagccggttcacggtttgctgcttataggtgatgatgttggtgccggcttggtgtttttgcaagtcaaagaaccactgttggtagacgccgtacaacgcgcgggacgcatagctgttgggtcccagattggcagcctggcgcatcagaatcgaacggttgttaatttcggggtgagcatcgaggtaatcggcagcaagcgtgagcgcccaggtgcttaagtccggaccggcaataaacggtcccacgcctgtcactgtttgatcggtaaataaggtgatttgtgccgcagcagtattcataatgagattagggtcttgatcgatcttccaaacgcgaccgccaattggataaggatcaactaggaaaacggtaagttggcgctggggataacgggtccgttgccaactgataagccgacctaaaagcattaagccacgtggcccggcaccgataagcgtaatgtgcatgccgcatctgctcctttatgagatgataaattaagaagtaacaaatttattatacttggaagtgtccctaagcagttagcgacttgctttaggtttcaccgttttcgtgtcataatgtccttattaaccatctagaagggaaggcagatgctgatgaaagttgtcgttgtgggctgtacgcatgcaggaactgcggcagtgcgcgaactgttgatgaggcacccggaaacggaagtagatgtttttgaacgtcgtgaagacatctcttttctttcatgtggtattgccttgtaccttgaaggcacagtcgggcggctggaggacatgttttacgcaacgccggcctcactcgaagcattaggtcccaacgtgcatgttcacttaaaacatgacgtcttatccattgatggtgccggtcatgtgattgtggctgaagatttgaagacaggcacacaacagcattatccgtacgacaagctgattatgacaactggcagctatccggttatcccaccggtttccggtgtaagcgttccgcgggtcttgatgtgtaaaagttatgatgatgcgcgcaaaatcaaggagagtgccaaagatgccgaaacgattgcaattgtcggtggcggctacattggcgttgaactggcagaggcttatagtcgtaatcaaaaacacgtgattttaattaatggggttgcgccattgctgagccattatgtggatttaccgcttagtcgagaaatttcttcagtattaacggagcatggcgttgaattaaaagtcaacacggtggcacgccatttcgatagtgacgcggagcatgttttcattcagacggatcacggtgagattcaagctgatttggcggttgtctgcgttggttttcgtccgatgaccgagttgttggttggtcaggttaaaatgaatcatgatggctcaattcatgtgaatgattatatgcaaactagcgatcccgatatttttgcggcgggggatgcggttgcggtgcattttaatccgactggtaaagatgcgtatgcgccacttgcaacgaatgcggtgcgtcaaggaaaaatggcaggtgcaaatatttttggcccaacgatcaagtatatgggcacacaggcaaccagtgcgttaagattgtatgatcatagtctggcggtcacggggctgacgcttgctcacgccaagcgcaatcaactgccggcagccagtgtgacgatggttgatgattttcgaccgccatttatgccgcacacggtgaagattaccatggtgctggtttatgataccagtaatcgtcaaatactaggcgcacagttttacagcaagtatgatgttgccaatgcggccaatttgatttcggtgatgattcaaaatcgtaataccattgatcagctggcctatgtcgatatgctctttaatccgaattatgataaaccgtggcattatctcaatttgttaggacaattggcagtagcacaagcagacaactcagcggtgtagggggaaaattatgaattcgtggaatcttatcggactgttcgcgtgggtgatcctgatcgcctacctattcttcatcatttggcatattcggcggcgacatattaaagctatcgtcaaatccgggcggcaggtttccccttccgtcgtgttggttgatctggtagaagtagcggtgttgttgctagcggtcgccggaatggtatgggtgagttggttgcgtccgattgactaccgggatagccatgaggtgacgattagccacagtgcacaaccacttattttgcagaccggtgatgaacattccttttatgtacgggttcgcacgggaaatggtaagaatccgattttgtactatacttattggacagaaggcgccaagtatgaaaacacgagtcataacgcggaagtgagctccggcagccaaccactgacaccgcgagcggccgcatatccgtggtccaaaaaggaacttaaaaaactggatcaaagcgctgatcgtgcatatgtcgcaactgtatcggcgcagtataagcctggttttcttaacggcttaggcatgcatgtcggtcacagtgccgatcggttttcgattttacgggtgcctaatgatacatttgttgaaattgatccggttgaagattaaagcgtgttaactaaacaatttgaaagatcgttggtgtgaaatgcggcatcagcgatctttttttcgattgacaagcttagaaaaaacgaagcagccgcgattctgcgtgtgttttttagcttagccgaatcgattagtccgcggtacatggtatgatgaaagcattcgaaatgggtaatataaaaggtgcttgtctggttctaaccgcgccggctcgcgctcagttttactaggagatttgctaatgaggcatcgtagctggtgattgctgccgttgttgctgcttttgggctttggtcttgcggggctgcaaccggtttaagccgcttcaggtaaatggtatcgagataatggcaacatgatgggttctgaaagtaagacggttatcaaaaagctgaacgaccaaacctttgccaaaataaccggtcatccccaaattgccgtgatcaccgtcacgtccctgcatgatgacgagattgaagactatgccaatgagcagtttgctaagcttggaatcggcaagaaaggttgggataacggtcttttactggtgctttcacgccgagatcgtaaatattggctggaagtgggttatggactggaagatgtggtgccagatggcagtgccgatgagattgtcactggctcggtcaaaaaactgcttaaagcggaagactacgatcatgccattgcgttgtttttgacaaatatcggtaagcgggttgcggctcatcaaagcgccattgccacgccgacgcagataaaagccaagcgtgcccatgatgccgccgttaagcagcttttgataacggtagccttggtagtggtcggcatgatggtgctcttcttcatcattcatgctgccataaccgctcgcttacgtgatacgatgcggcatgtagctgccatgcagacgttaccgatctatgccgctgtgactgctgccgggattaaactgcaattagacacggcggcggttccgctatttcgctttgcctggtcgcatgacaaattgcgcgtgatcgggatggcgaatttgacgaggcggggatttgaatcgtggacgcgaaaagtccgaatgatggtgccgcacccttattggtactatgacaacgttcgcggagcccttcgcaagttgccagatcagacgctggtaaatgcgccgaccattgccgcggtggctgaattgttaagcccggcgctggcagatcggtttaaaaccggacaaccttatgaagcagctttcacggcctggttgaatgaacagaaaagtgttgccgggcaagcagcggtgacgacttggtctaagttcctggcaaaagttaaaccgactgataccttctcagatgcaacgctagccgccactttttccgctattcttttccatattcgccatcccgatcaagatcaggatttgagtcaatccgatgtgccattgtgggttatcagtgattttggctcggcgactagcagtcatagtggcgactccgatgactttggaagtggcttcggtggcggttctagtggcggcggtggttttggcggtagttggtaagccagacccgacccttgaaagtgacgcaacacgtaggctaacataaaaaatatatttaaaacgatgggtggcaggtagctaccgccattaaattcaaaaatgaggctagataaatggagcagatgttgttgttaatgggtaccgggttgctaggcggtattctgggagccgtgctaggaatcggcggcgggatgattattaccccgattttgacaatgttaatgggattaccgattcaatatgcgattggtgccagcattgtctcggtcattgcgaccagttcgggtgccactattgcttatctaaaagatgaaatgctgaatttacgggtagccatgtttttggaaattgcgacaacggttggggccgtcattggtgcggttatcactggcctggtgaatggcaaggtattgtatatcttatttggcgcattgttgatattttctgccttcaacatgattcgcaagttgcggatgaaagacgatggtgtgcgccaaacaacccctgatgcgatggccacaaaattacgcctgaatgggacgtattttgacaaggcaactggaaaagaagttaattatacggtaacgaatgtgccaggcggctttgcgatgatgtttggtgccgggattgcatcagggctactgggtatcggaagtggcgcttttaaagtgattgccatggatacgattatgcatatgccgttgaagccatcgagtgcaaccagtaacctcatgatgggagttacggcggccgccagtgcaacagtttattattttggcggtcagcttcagccacaaattgccgccccgcttgccatcggaattctcgtcggggcaacggtgggctcgcgggtgatgcaggttctgccaaataaagtcttgcggctgattttcattccggtgattgggtatatgggcattcagatggcacttaagggatttggggtgaatatctgatggataagaaactcaaaaccgaaatcgatgatgttgaaatcatgattggtaaagtgatgcagattggggtcattttggcggcagttgtgattatttttggcttgatactcttgttggtcagcggatcgaccggttatccggccggtgttcatccgacgcgaattggtgcgattataagcggcacggtggcactgaaaccttacgctatcctgatgacggggatctttttgctgattctgacgccggttttgcgcgtcgtggtatcaatctatgcgtttgcggttgaacacgatcacttgtacgtgtggattaccaccgccgttttgattatcctgctcggcgccatgacgattgggtatctgggcaaccgttaattaaaaaatagcgcttttgcaccgggttattgatccggtgcaaaagcgctattttgatacttcgtctggatgatgagtggcgtttagcacgcaattgttcatccttcgcggggcgtcattacttaccacttggcttgtgttccatgtagtccttcagcgtggcaacgacggaagaatccggcatctcacgcatggatttaatattgtgaatatgttcaactgatacatggctgttaagcgccatctctgtgtccgttagatgatttttacgctggaagtcgataatttcccgtgaaaatgcactgatttgatctttttcagccaaaacgattcctcctcgtgaacctttactaacagtataacgatttttgtcattatgcgcacgtatgacatccaatcgtaactttaacaccattgatttgaaggttttcaagcatatcgtaacgatgactgaagaaaagtctaaaatctccagatgctgtgttcgtaggctaaatacatgaacgaaacttaatgattgcaaagccgaacaagcgtttgtataataaagatgcaccaaggaaatgggatcgcttcgttaattaagaaccgcatctgttagctgcaatgttggttagttgattaggagtgccaccatttaagcggatggtgtgtaagttcatatgcgtgatgatcgcgatcgtaaaatacacgccttgacccgatggcgacaatgtatgcttgcccggttacaagttgttgataaagctttcttttcttgacgagctggatacccttcaacaggactttgaggatgataaaccaaaagctgattaacaaaagccataaccacccattggatgttgagtgaaaagttgaggcttgcagggttagcataagcggattccaaagcaaagcggtggcatcggtgattagctgattaaataaagcagttggtgttgcaaacagagatatgagtgtgatgccaaagataaacaatccccaaagcatataaggtgccatgatcaacacggtaagcgcgcggagtaaggaatttggagtatgcaaaacgatagcctttcgaaaacgatgccatgcatagaacggatcttgatcggctatggttatcatctcccagttgttagtgaaacgatttcgtttaacaatctctttttcatacagatattgttttgatgttttccggacaaggtaatcgctagtcttagaatagcgcaatattgccttgatcgaaaggtaaggtgagcttatggaacactatgcctatttgcaggatctggcagccaatcaaagggatcgggaactgcgcgtgcggatttgggataataagaatgtcattattcggcgaaacctcagccagcatcagggcttggctactcaggtctgggatgcatggttgcgtcaggagctgcgacgttttaacggttttgagccaattattgaagttgatgatttttccgggcatcaggaaattaagtttttcaaggaaaatgaattagcggatgccgttcatttcattcttcaaggcgaaggtgcggttgaaacagctagctaactgtagccagattagctgggcgtgtaagcttttacatcctctatgttatcagtatactgaaggtaatgaggtgaggacgatgaaggcgattattttatatgcatcaatcacaggcaacgcgaaaggaatggctcggattgagcagcagttctttgagcattatggttgggatgtcacgcttggcgaaatgattcagactgatccggcaacgattaaagactttgacgtgttggtgctggcaacttatacctggactggcggcgtgatccctgaagagacccaagacttttatgatgacttaagtaagctggatttttcggctaagccattggtatttggagtgctgggtacgggtgatccgtattatggcaaggattataataccgctccggaaaaatttgaagccgttttgaaagctagcggtgcagttcaaggcgcaaccgcggtcaagattgctttaaacgttaaacaagaagagatgcctcagtttgcgacatttacccaaagtctgatcaaaaaaaccgaagcgctgcaaaacaagaagtgacccgttggcgcgtggtatactaaagccagaaagcgaggggatcttcatgagtgaggaaattgttttcttcaatcccggcgatgcagttgccaatgatttcgacttcgcagctgctcggcgtagtgcgcagatttacaaagcacagcatgtcgttgatgaaggcttggtagttgccaaagataaagacggcaagtattcggtcttttatgaggctgccggtacacctgattcacaggctaaaggcgcatacaaagatgttggcaagtatacgatcctagctcacttatgacgaagacagtctggtatcgcgtagccttggtggtagttgctgtcattcttatcggagttctttatggtttaatgcagcaagaacaaatcgcgaatccttttttggttggcagtcttggcttaattctcggcgttgaccttgctttactgcttgccaatctttggcccgtgcatcattcgcgcaagccttaaaaataatcattcaaaaaatgccaatcaatccgcggccggaaaatttgcgccgtggcttggttggcatttttgcttcgttgaccggtaacttagtcgttgacaatatagcgtggctgtttgcctgacaaaatcgccaaagtgttgtccgtgacaatttttgccatggcatcacgcgcctcgactgttgcgttcccgatatgcggggtcaaaaccacattatcaagggcctttagttctgagctaacgtggggttcggcttcgtagacatccagcgcagcaccagcgaggcgatgcgccgtgagttgttcaagtaaggcagcttcatcgatcaagggaccgcgtgcggcgttgatcagataagcgctcggtttcatggttgccagtgcctgagcatccaacaaatggtgggtagccgggactagtggcaggtgaagggtgacaagatcgctttgttgcaagagtgtcgcctgatccgtaaaggtggcacctaggctttgctctttttccgatggcagttgatgatgctgcgtgtaaaggatgttcgcatcaaaagcatggacacgtttggcaactgcttggccgatctgccccataccgataatgcccacggttttgccggcgagttcatggcctaagaagaaggttggcgcccagccggagaacccgggaccgcgcatgagccgatcgccttctgtgacgcgatgtaaaacggcgagcattaaagctagcgtcacctcggcagttgacgtggttgatactttgggggtgttggtcacgaggacaccatgcgctttagcagcagtgatgtcgatattattgaaaccagcgccgtaatttgcgattaatttcaaatgaggcgcttttgccaatgttgcggcgcttaccggagtcgatagcgcggtgataagcacttttgcatcgcttaaatgtgcctggagctcggcttcggtaatcaagcccttaccgcgataggcttcaaagtccacgcctgcacgtttcaaagcgttgttggccgatttcggtaaggttgcagaaatataaacttgtgccatgaatatccacctttctgtggtcatccgtatctgattcacttttagtttaatacagcgcagagaaaaaagtgtgggcgacgccaaactcagcgcgaaagaataaccttgttggtaggaacccagtaaaaaacgaggcaagatatgacgtgcacgactcatttgtgttacactgtttttggtaacaaaaagtaagcaaaggggattgatcgttgatggcaactttaacgcaagatatgaaagatatgatcggtgcacagctgaattacttggcgacggctgatgaaaatggtaatccgcaagtcggccctaaaggtaccatgcgggttttggatgatcaccacttgatctataacgaagaaaccggcaaacaggcttggcataacttgcagtattcaaagaaagcagccgtagcaacggttgattacaaagctttgaagggcttccggtttgaaggcaccgttgaatttcataacgatgatcaaatctttgaagacgcgcaggcttttgctaaggagcgtcatttgcctgcagctatcagtgcggttgttatcaatgtcgatcgcatctataagctggatgccggtccaagtgccggtgatctgatcgaaggctaatgccgcgttgatgatatcagcgtgattttagacttgtaaggcgatacggacagttccgttaatctttttaattagtaaattcataccccgccgttgtgacaaagcgcataacggcgggcttttttgtgttctgaattaaatactaattgttattattagcatatttattgcgaataatcaggccggttcgttaagcttaagatagtcagaaggatgtcaaccaaaagaaagggtgagaaccatgatgcatttaatttggacactgattattggtgcggtgattggttgtattggtcagctgatcgtcggacgcgacatgccacttggctggatcggaaatattatcggtgggcttatcggtgcatggctcggcacggcgttacttggtagctggggaccatcactggctggtatggctttgattcctgccattatcggagctatcatcgtcgtcttccttgtttccttgttgctgggcacgactcggcgcaaggcataggaggcggcaggatatgaaaccgatcacgaaagtattgttcggtattgttgcgatttgcggcttacttcagagtattggctttggcctgttgctgtggcccaatcgcgaatttacgcgcttttacgtacagcaggccggttggttacgtcctgtcatgattggactaaccgggcttgtgattctggcttttgccatcatgctgcttgtcgctatcttccgccgctccaccgccaatgctttgattctagccggtgacgatggtgatctgacacttgataaaagtgccatcgaaaatacggtagccaaagcgattgtcgaccggcattttgccaagtcggtggatgttgatgtcagcatccgcaagaagcaagtggcgcggatgcgaattgaggccttttccggaaacgtcaaggaactaaaacaagaggcgcagcgtatcgaagaaactgcacgccagaagttgcaagcgtgtctcggcgttccggtcaaacatgtccgggtacatttacttccagcaacgaaagtaaaagccaagactgcgcgggtcatttagttcaaacgactttgatggatcactgactgtcattcaaagcgggtggccgtaactggcaccggtggcagcagtggttatcagctacgaaagggtgatacacgatgcagcaaggaaccattggcgctgttgtcggcgtcatactagcctttgcctggatgcgtttcgggtttatgggcatgttgcttgtcttgatattcggcggtttaggctggctcattgaacgttatctggtgcctaattgggcgacgttcacaagttggctgaccgcgggcaaagatgcatttagcaaaggaaagtaggtgagtagatggatgcagtagcaccgccaaaaccagcatcagttgcaagccatcaagaaacactgatggccaacagtcgcttaacatttgaagataaggtcgtcgaaaagattgccgcaatttgtgcacaaaatgttgatggcattctagggatggatggttcggtgatggataacctgactgaaaccttctcaagtggcgagaacctgaccaaaggcatttccgctgaagtcggtgaaaaacaagtggcccttgatatggatgttttcctagaattcgacagcaacgcacaagccattttcaaacaattgtgtgagaaaatcagcgcacaaattgaacgaatgaccgggttgcagttagtcgaattaaacatgcatgtcaaagatgttttgacgaagcgggaatggcaaaaacgctaatcggcgctaagggaccccataacgcgttcgccagcgcagggatcagcgtgtagggatcttggttgcaatggtcaaagtgcgaccatcacgtccaaggccgcttacactccgatccttaaacgcgccggttcacactcattttaaaggagagattttaatggacaacaagaaacccaacggaatcaataaggaattgaagttcgatgatgctgtgatcgcaaaaatcgtcgggattacctgcaatgaagtcgaaggtgtttattcgcttgaaggcggcatgatggctaatcttacggatatgttcagcaaggatgaagacccaaccaaaggcgttaacgttgatttgagcgataaccaggacgtttcagtcacacttgatgcaacggtgcgctatggtgagaatgtgccggaaatcttcaacaaagtcaccatggcaattgccaaaaacgttcgccagatgaccggtctgaatgtgacagaagtgaaaatgaccgtcaagaacatgctgacaaaagaagaaattgcccgcaatgaagctaaaaacagcgacaagaacagtgacaaagaattacagccggcttaatgagtcaatatatataaaccggtaaaaagggatagcccatcatccatcgggggctatccctttttgacgttcaagaagcaattttttcgaccaacgcgggtagttctgtcagatttggcagggaataagtcggcgttatgtctggtagtggtgataattgctggcgattaatccatacgcaaggccagccgagtttatgacagggtacgatatcccaccaataccccattgccacgtggagatggggttggttgagtcgggtttcggccgtggtaaaaaaggacaaagttggtttataacaatgcgtttgctccggtaaaatggcttgatcaacttggtgctccagctggtcaaagtggtgggtcattaaatccggggtggaattggacatgatgatgattcgatgaccggcttggcgcaattgctgcaaagcggggatgacttctggccatggttgtaagttaatataggactcaaataaatcatgaaaataatggctaaatagtgaattggtgcgaaaagtcatatcaagatattgcagatcgcgcttcaataaggtggtgaaaggcaaggtggtctcgccatacatgaggcgatcctcccacgattcgaattggtgccatgcagcctgaccgtcaataccatgacgagcactgaaggtcataaactgggttcgaatggggcgggtgtctagcaaagtaccatagcagtcaaatgtaatatccataaaatcacctttttgagtatcttagcatgatcaaggctgagaacaagtctttaaaaacaaaggtatcgatatattcggcagggtcggggtgtcttcatagccgagaccaatatagtaggttagataatggctgttcttaatagttgcacggtttaactaattgacgttcctgccaataactattaaactttttaccaatatcaaagggggaacatcatggaatatttgaagctactcggcattgtcatcattgttgttggctttgccttgaaatgggataccaccgcggttgttgtgctagctgcgattgtgacagccgtgttttctggtatgagcattccggatttgttgacgacactgggacaaagttttgtggataatcggatggtgtcgttgtttttcctgaccttaccgatgatcggattggttgagagtcatggtttgaaagaagtggccgttaatgggattcagaaactgaagaaattaacgccaagccgaattttgaatctttacttggtcattcgtgaattaggcggcgtctttgggatttccttgtccggccaggttcaatttgtgcggccgctgattacgccgatggtcactgccgcggcagaagcgaaacgtaagctgacggataaagaaatcgacttgattaaagcccgatctgccgccacggataatttcggaaacttttttgctcaaaacttatttgtcgcaaccgctggcgttttgttgattgcgagcacgatgaagagtctcaagcatccggtagagccgatgcaggtggtgctggcatcaattccgatcgcgattatcaccttggttgtagtggcggtttataatcgctggtttgatcgacaatttgaagagacgccgcgtaaaggaggcaaaaagtgatggtcgacacgttactgctcattctttatgcactcatcggcgttgtcatggcgattgccgggattgaagcctttcgggcaaaagacaatccggctcgaatcggaaccggcctgttttggatcatcatggcaattgtttttgcgttcgggacgctattaccggcaatggtcgttggtattttggtcgttattatcggtattttggccttattcaagcagattcaaatcggcaagatcaagccggttgatggtgcgcatgcggctcaggcagccaaacgacttggcggctgggtgtttgttccaagtgttgtactggcgatcgtttcaattgccgttgcccagtttaccaagttaggcgggcaggtcgggatcggcattggcgcggcggtctcattgattgtggcgatcatcatgaccaaggcccccgtcaaaatggtttataatgatacccaacggatggtacgatcagtcggtgcagccggtattttaccgcagttgttggcaacattaggcgccgttttcacagctgcaggggttggcactttaacggctaagttgattgcaggtctatttccggcaggcagtcatcttggcggggttattttgtactgtgtggcgatggcattattcacgatcatcatgggtaatgcgtttgctgcctttgccgtcattacggcggcgatcgggattccatttgtgattgcccaaggtgctaatcctgcgatcgttgcggccattgggatgacttccggttattgcggcaccttattgacacctatggcagcgaatttcaatagtttaccggttgcgttgctggaaatggaagatccattgggggtcatcaagcagcaggcacccattgcgattctgcttttggtgattcaaatcggactgatgtatttcctggcgttttagaaaggacgattaagtatgaagattcttgtgacagggtttgatccttttggtgacgacaagattaatccggcgattgaagcggttaaacgtttgccagatgaaatcggcggggccaaaattgtgaagttagaaattcccactaaattcaatgtttcggcagaagtggtgcatgatgcgattgttaaagaaaagcctgattacgttctgagtattggtcaggctggcggacgttatgaactgacgccggagcgagtggccattaacttggatgacggccgcattaaagataacgctggctatcagccgttaaaccatacgatccatgaagacggcgaaaacgcctattttacgcaattaccaattaaagcgatggctaaagcgatcagagaagccggtgttcccgcggcggtttcaaatacagccggcacctatgtttgcaaccatattttctatcaagtgcagtacatgcgcgataaggaatttccgacgattaaagcgggcttcatgcacatcccgttcttacctgaacaagttgttgcacggccagagacaccggcattgtcgcttgaagatgacgttaaaggcattaccgcagccattgccgccatcgtcgcacacgatggcaaagacgaccttgaaaccgttgaaggcaaaaatcattaattgaagattcacgttgacattttccgcaagctcactagggcgtgcggattttttaatggccgatttttccgttttctccgggtgggcgatataataaaggcagagataaggacacggatacatcctcagtttggcaaagggaggttgtgacaacatgagtatcggaattattggatcaggtaatgttggacgtgcgttgggacagctttttagtcatgttggcgagcaagttattttgtcgcatcgacatggggtggcatcactggctccggtgattgcggagatgcgatcaacagttgaagcgggtacagttgccgaggcggccaatcaggatattgtcgttttggcggtaccgttcaatgcgttagacgagttgccggcgcaagtgaaagctgatgccgtggtgattgatgctacaaattattttcctagccgtgacggcgaacgatccgaattgacgagccaccaaatcgcttcatcgcaacttgtggcgcaacactttgggactaagaaagtcgtcaaggcgttcaatacgattgcgatgacgaaaattcgcagtctggctaaaccgaatcaaccagccgggcggattgcgatccctattgccggggatgatgcagcggcgaaaaagacagtcactgcattgattgaaaagatcgggtttgatgttgttgatcttggtgatttggctaatagctatccggctcaagcagatggcccgttattcctgttcaccggtgatgctgatcaagttcgggcgcaggcaaataagtgactgcagcatggtagctcactttgcacacaggagaaaaaattgatgattttcttttatggcattttgttcatcatcgcgctgactttcttgtgggtaattagcaccagcgagtacgcgcgattggttcaggaaggaaagtcgcggccaagggcgtttgtttcggccttgctgctgggctggatgagcattttttaaaaagccgctcgctgcaattgaagacatgataatcaaaaatcggccttagtggagaagctctctcactaaggtcgatttgtttgcggttattttgttattggcattaacgctgtgtctaattttgatatgtgctcactgtaccggctggccgatacgctttttgtgatttgccacaatcattttggcaatggctttggcgatgttttggttcttaaggactggaccgtgtgagtaactgccgatcgtattcttatagcgcatgccttcaacaccgtcttccggattgttaccgtagccttcgatcatctttcctagaggttttagcttatttttgtcgtcaaaataagttcgcccgctatggttttcaaatgccttgacggtaccgaactcggtttcgtatttggtgtcgccgatcatacgactgtccggtttgaaaacagtatgcagcggcaaaataccgagccctttaatgaccgttccttcactagtcttgtaatagtcaccgagtagctggtagccgccacagatagccagcatcggtttaccattttcgatgtagcggcccaaggtttgggcatagcgcagtaaatccttggcgacaacggtttgttcataatcctgaccgccgccaaagaaaatgaagtcgtagtcatcggcattgaagtcgtcaccaagactgatgttatcgacttgtacttgatagccttgttgattcagcaagtaacgcagaattttaacatccccgctgtcgccataagtgttcatgagatcctcatacaaataagcgattttgatcgtatcagccatggaccgagcgcctccgtttttttgattggcaacagcttaccacaagtgaagggaaaaagagaagtgagctgattgattggtgatggacaattaaagaaggcgggtaaagtatcagctggaacaacgccagactggtgctttatccgcacttagttgccctgccatatgaatagcaggatttaacgtttatgtgccttgatccaaggttgagccttttcctcaatcgcttgataaattgcatccatatccgagtagtcactgatctcaaacacgaattcatctggctgatcgtgaaaagtcggcttgttgtttaagatgatgttcagctggtcaaactggttgtcgccggtatctttgcgaatttggtaggtgaaaaacgccgcttcataattttgaatattgtcaggttcttcatacaacacttccataaactgatggtcggtcttgtagttgtcctttttcagcttatcccacagtgcctgatactgctgatgaagttcagttaactgagcatccgttaattgttcgttttctttaatttctttaccgtctaattccatttttttcgcctctgagttgaattacttccttattatcgaactgtgtcaggtgattgtcaaaagtgaatccttagtggtaagtgtcaacttaaaacaagataattagctttcactggccttaaagaagtcgagccagctcggagtatcggaaatcacttaattatagtagaactgagaaagagttggcctttactcccataacgcgctctccggcgcagaagcctgcacataaggaccttgaacgcaatggccaaagcccggccattacgcccaaggccacttatgctccggcttctaaccgcgccggctcgcgcttctaacgcgttcgccagcccagaagtctgcgtgtaaggacctgagtcgcaatggtcaaagcccgaccatcacgcctcaggccgcttacactccgacttctaaccgggctggctcacgctcactaagaatacagttgaggagatgccgcttttacgttacacttgacgggtacgtgaaaccctgtttgttccacaaaatcaaacccaaaaaaacggaggcagacatggatccaacagcttttgtccacgccttggctgatcacggtatcgtgttgaatgaccaccaacaggatcagtttgcggcttactatcagtatctgatcagtgagaacgagaaaatgaatctgactggtatcactgctgaaggggacgtctacctcaagcacttttatgattccctaacattaggcttggtggtgccaaaattgcaaagccagccattgtcgctgtgtgatgttggcgccggggcgggttttccatcaatccccttaaaaattgcgtttcctcagttgaagatcaccattgtcgattcgctgcagaagcggattggctttttggaacgtttaacggcgcggttagagttgaccgatgtgcagctctttcatgatcgggccgagacttttggtgccaaaaaatcgccgcaccgtggccagtatgatctggtgacagcacgcgcggtggcggcgctgaacgtcttagcagaactctgtttaccactcgccaagcagcacgggcagtttgtagcgatgaaggccgccgcaactcctgaagaattaatagcggccaaaccggcaatcaacctacttggcggtaaactcgttcaggatgcagcgctgaccttgccggaaaccggggatacgcgccatttgttagtgattgaaaaagttaaaccgacaccgaataaatatccccggaaaccgggaatgccgaataaacaaccattgggaggtgcatagcgcgtggcattatcattttttggccataaaaagtcagatgacgagacggtcgtgcaacaattaccgcttaaagctattgtccccaatcaatttcagccgcgaaaagtttttacttccgaatccattcaggaattagctgctacgatcaaagaacacggcttgttgcagcccattattgtgcgtgaatacgcgccagatcagtacgaaattattgccggagaacgacgctaccgggcaatgcaactgctaggttgggaaaaagcaccagccattgtgcaaaagatggatgatgatgaaagtgcgtcaatggctttagttgaaaacctgcaacgtgaaggtttaagtgcgattgaagaagggcaggcttatgttgcgctgatgaaactgaatcacctaacccaaggcgcattagcccaacaattaggtaaaagtcaggcttttgttgccaataagatccggctgctgaagcttagtgcgccggtgcaagaagccattatgaatggtcaaatcagcgagcgtcatggccgtgagttgttaaaactcgatgaatccgaacaagtaccagccttacaacaggtttttgcggaaaaactgacagtcaaggaaacagctgcgttagtaaatgaacggttgcgcccaaagaagcccacaccaaagcctaagccaaaagttcggcgatcagcggtgagtcatgatacccgcatcgcttggaacacgttgaaacgttcggttaagatgattcgggatacgggaatgacagtcacggccaaagaagaagataccgatgacgcataccgtatgatcatcgagattccaaaagagaagagataggaggaactcatgacacatatcattgctgttgccaaccaaaaaggcggtgttgggaaaacaacaacgaccattaatctgggagcgtgtttggctaacctgggtaagaaaattctgattgtagatgctgatgctcaaggcaatgcgacaagcggtgtcgggattcaaaaggcccaagtcgaaaaagatatctatgacgtgttagtcaatgaggatccgattactgaagccattttaccgacaaagcacaagaatctttttattgttccggcaacgattcaattagcaggagcagaaatcgaattaaccagtcagatggcacgggagatgcggctgaagttaggtttacacccggtggcggagcagtacgactatatcttgatcgattgtccaccatctttaggccagctttccatcaacgcgtttacagcaagcgattcgattttgattccggtacaaagcgaatattacgcgttggaaggattgagccaactgcttaatacggtgcgccttgttcaaaagcatttcaatccaagtttggcaattgaaggcgttttgttaaccatgtatgatgcgcgaaccaatttaggggcgcaagtgattgatgaagtgcgcaaatattttggtgataaagtctatacaaccgtgattccgcggattacccggctggctgaagcgccaagttatggcctgccgatcgtggattttgatccgaaatcacggggatccgaagtttacgaggcattagccaaggaggtgctggctgctcatggcgaataagaatagtaaaggattaggtcggggaatcgatgcgatcttcaaggattttgaaagtcccgatctaagtgccaacaataccgttgaggaactgccgctggtcgatatccgtcccaatccctaccaaccgcgtaaaacctttgatcaagaaggcttaaaagaactagctgattcgatcaagcaaaccggggtttttcagccgataattgtgcgcaaaagtgtttcgggttatgaaatcatcactggtgaacggcgctttcgggcgtcaaaactggccggcaaggaaaccattcccgccattgttcgcgactttaatgatccggaaatgatggaaattgccgtgttggaaaacctgcagcgagaagatttaaccccgttggatgaagcacaggcatatgatacgttgatcaaacgcttaaatctgacgcaagcagaggtctcggcccggctaggaaaaagtcggccttacatcgctaactatctgcggctattgacgttgccacaaccggttaagcagatgttgagcgctaatcagctgtcgatggggcaagcccgaacgctgctgagtcttaaagataagaccaaaatggtggcagttgctaaaaagacgatcagcgaaaatttgacggttcgccaacttgaacggctcattaatcaaatgaatgccggcaccaatcggccagcgaccaaggaaaaaccgaagtcgccgtatgtacgcgcaaccgagaatcagttaggtgagcgcttcggaactaaggtcaatattaatgaaggcagtaaaggcaagggcaagatcgaaattgattttagctctgaaaaagacctgaaccgtattttagccatgcttgacgtcaatattgattaactggcaaaacagttggaggtgggcgcatgtatcaactacatgatctggttcaaatgaagaaaccgcacgcgtgcggcacaaatcgttgggagatcatccgcttaggggcagatatcaaagtacgttgcaccggttgcggacatatcgtgatgatgtcgcgccgtgattttgagaagcgactcaaaaaagtgttgggtcaggcagaacaaacagactaaatagaaagtgtgaaataaccaaatggctttaacagcaggtattgtcggacttcccaatgttggcaagtccacgctttttaatgcaattactaaggcgggtgcggagatggcaaattatccgtttgccaccattgacccgaatgttgggatggttgaagtgccggataaacgactggcacgcatcgatgaactgattcccgctaaaaaaatcattcatacgacttttgaattcaccgatattgccggaattgtcaaaggtgcttctaagggggaaggactgggcaacaagttcctggaaaatattcggcaagtggatgcgattgttcatgttgtccgtgcgtttgatgatgacaatattaccagcgtcaccggtaaagtcgatccgctagaagatatggccaccattaacatggaactggccattgcggacttggattcagtcaacaaacgctatgccaaggtcgaaaaagtggcgcggacacaaacaaacgataaagaagctcaggctgagtttaaagtgttgcaaaaaatcaagccagtactcgaaaatggcggtatggttcgcagcatcgactttgataaagatgagcaaaaaattgtcaaaggcctttttctgctcacgagtaagccagttttatatgtcgctaatattgccgaagaagcgatggctgatccggattcagtcgactatgttaagcaaattaaagccgaagccgctaaagaaggtgccgaagttatcgccatttccgccaagaccgaagaagaaattgcggagttggacgatgacgaaaaagctgactttttggcagcggaaggcgtggatgaatctggcctcgataagctgatcaaagcgagctatcatcttttggggttggcgaccttctttacagccggtggcaaggagacccgtgcgtggacattccgtcgcggcatgaaggcgcctcaagtagccggtatcattcattcagacttcgagcgtgggtttattcgggcagaaaccatgtcctttgccgatttggataaatacggttccgttcaagcggttaaagaagccggacgttatcgctccgagggtaaagaatacgaagtgcaagacggggatatcattgaattccggttcaatgtttaagctgactggccaaataaggcccgcagtgatgatgattttttaagataggagtttcaaatggcagaaaagcatgaagcagacacgagtcaagcggtagacagtgctgcagttgatcaacagcaagcagcaggcggtacttctgaagcttcgtccgcaaccgatgcggcaagtaagaatgcccatgttaaacaggtgcggccggcttcaacagttccggaaatgattgaacaactcaccaaaaagaatgatgagtacgtgttcaagttgcggcgtgaattgaaagatggcggcatgtctgcaactgatgaagagaccttacttaagacgatgttgccggaaatgattacggcgcaacgtcaaggcaagcccgctacccagctatacgggccggtaacggtgaaggcaaacgaaattttgcatacgcccaagcctgaacccaagaagccaatgtggttactgattgtcgatcaaagcctgttctttatggcgattttggcggttatgtacggtgctttggcctacttcaatcccaagacccagaacacagctactagcggttttcttagcctcttgctgctgagttttatggccggaattttcttcgtgtactacgccgactggatgcaaaaagacaagaaagaacgccgcagtgcatggttggttcttggaggcggcgtcttattggtcgttgcggttaccttcctcagcagtgcgcttgcgttgctcaatacgccgctgactcagccgatgccatggtttgccaacattatcgttggggttgttgcttacggcattcactgggtgttgcagcatcggtatcatctcaagagctttttccaacggtagacttgggaaatcaaaggttgcggttcttgaacaactaggctcaataaactcaacgggtgctagaagacaggatgcatatgtcttctagtgtccgttttttctttgctgccaaaggaaattaagcgtgagtagcttgaaaactaaacgcctcggagctaatgccgaataataacaggtgattttatgagcatgattgcaaaagacgaacattaatttcgcaaactggcaaccgtttttattttgttcgggtcttaatgaacaattatgagattttctttcatttttaagcctatgataccggtcttttcaaaaaaattaacgtctacgtttgacgaggccaatttccggtagtacattagtcaacaactaaaattgaaagagggatttacgcaatgagtaattgggatacaaagtttgcccggcgtggttttacatttgatgatgtgttgttgatacctgcagaaagtcatgttttgcctcacgatgtcgatctgtctgtacaacttgcggacaatctaaagttgaatatcccaatcatctcagcggggatggatacggtgaccgaaagtgccatggcgattgcaatggcgcgtcaaggcggtttaggtgttatccataagaacatgagcattgaggctcaggctgatgaagtgcttaaggttaagcgcagtgaaaacggggtcatcgttgatccgttcttcctcactgctgacaagccggttagtgatgcagaagcgttgatgaagaagtatcgcatcagcggtgttccgatcgttaataatacaaccgatcgtaaactgaccgggatcattacgaaccgtgacttgcggtatgtcgatgataagagcgttctgatcgataccgtgatgaccaaggaaggtttggtcactgctccggctggcacttcaattgaagacgctgaagccattctgcaagcccgtaagattgaaaagttaccactgattgataagcaaggccggctcagtggactcatcacgattaaggatatcgaaaaagtggtagaattcccgcatgccgctaaagatgcccatggtcggttgttagtcgctgccgcagtcggggttacctcggatacgtttgaacgggcccaggcgctgttggatgcaggggttgatgcgattgtcattgataccgctcacggtcatagcgccggtgttattcgtaagatcaaagaaattcgcgaacattttccattggcaaccttaattgccggaaatgttgcaacggcagaagcaacggaggcgttatatgacgctggcgttgatgttgtgaaagtcggcatcggccctggctcgatttgcacgacccgaattgttgccggcgttggggttccccagttgaccgccgtttatgacgctgccagtgttgctcgcaagcgtggtaaaaccattattgccgatggtgggatcaaatattccggcgatattgtcaaagcgcttgctgccggtggtaacgccgtcatgctcggttcactcttggctggtaccgatgaagcaccaggccagtttgagatttatcaaggccggcgctttaagacgtatcgcggcatgggttccttaggcgcgatggcacaggctcatggatcaagtgatcgttacttccaaagcggtgtcaatgaagctaacaagctcgttcctgaagggattgaaggccgggttgcttacaaaggcagccttggcgatgtgatcttccagatgcttggcggcattgaatccggtatgggttatgttggcgcaccgaacttacaagaactacaggataatgcgcagttcattcaaattaccggtgccggattacgtgaaagtcatccacatgacgtccaaattacccgggaagcaccaaactactccgttcaataatcaagatattcagtttaagagcttgcagttacccacttgaggcagctgcaggctcttttttagtgagcgcgagccggtgcggttagcaatcggagtgtaagcggccttaagcgtgatggccggtctttggccattgcgcttaaggtccttacacgcagattgctgcgccggggagcgcgttatagaaagcgagcgtgaaccagcgcggttagggatcggagtgtaagtggcctcaggcgtgaaggccggtctttggccattgcgcccaaggcccttacacgcagacttctgcgccggggagcgcgttatgataatcgcgagcaagacagttttaacgtgcgagcttaccggttttgataacgtgtccgatgaaaagcagtcagtatcggtgtgccaaaagtggcggcaattgctaacggccaaggaacggggtgctctgtggtcgtcaacaatgtttgcagccattgcgcagtcggcagtagttttatcagccgatgactggagaattgggtaaataacagattctcactataaaataggatcaggtgccgctgtagaagcgggtcatggattggcaacagcaaatcattgctattattgcgatcacccaaaaacagtggcagtcctgcgaagtcgcgttgtaaatcaaatgtccggcttttatgagcactggccattgctggcgtgagtcgtaacatgaaaaccagtttatgtgctgctgcccacaacaacatattggcaatagcagcatcggttgccgtgaaattgaaagcaagctgctgtgctgcaggactggcgaatgcttggcgtagctttgactggagctcagtagtggtttgtttatctgaataaagcacctgcagctgccgaacaccgcgtagccaatgaaggtgggttgccaagcgtagggtcaaccattcgtcttggtggtgaagcagccaataggtactaccgcttgaatgggcaatgttaataccggcaatttgcatcgtttgcggcaaactggcagctacgagggttgttaattttggcaaaagaacacctcccacttgaaatgcaaagcacgcatggcgctcgttttcttagggttttcgtaaagaattcccggtccaattttggtacaatggacagtgatgttacagtccctaacgattgccgtataaatggagtcaaaattatgaagatattaattgtagacgatgataaagaaatcgttgaactattgagcatttatgttaaaaacgaaggctatgaacctattcaagcatactcgggcaaagaagcgattaccaagcttgtgaccaatcccgatattgcgttaatgattttggatattatgatgccgaatatgtcaggcatggatgtggttaaggaagtacgcaaggattcgcaaattccgattatcattgtgtcagccaaaacagcagatatggataagattcaaggattgatcaccggtgctgacgattacgtcacgaaaccatttaatccacttgaggtgatggcgcgagtcaagagtcttttgcgtcggagtcaaaatgaggtgaccaattcggagccggatgtgctggaagtcgggcctttgacgattaaaaaggatagccacgaggtcacaactttgaccggcaaacagattcagttaacggctttggagtttggaattctctacttacttgccagtcacccgaatcgcgtcttttccgctgacgagatttttgagcgggtttggcaacaggagtcaattgtatccgccaagaccgtgatggtgcatgtttcacacctgcgtgacaagattgaagaggcaacagatggtgagaaggtcatcgaaacagtctggggcgttggctacaaggtcgaggcctagttcatgagcgaaaaggtcaaactcactggtaaggaaaagtccgagttgtggattgaaggcattgtgacagttattttgttactgatgctgaactttgcgttgttagtgctgattaatcagatgattgcgcataatcccgggttggagaatgcaatctggggtgtgaagacgaatttgacttttggccgcggcggttttcatctgtggagctggtcgaatcttttccttaccttgatgggcattgcagacgtcattgtggtgtactggcgattggcacggcgatatcggcagatgcagatgcgccacgtgattgcagagttgcattatattgcggatggccacttggatcaccgaattaaatttgaggtgaataccgagctgcaaaaagtggttagcagcattaatgcgctggttgattctaccgtgaactctatggaagaggaacgacgaatcgaacagagtaaagatgagctgattaccaatgtcagtcatgatatccgcacaccgttgacctcgatcattggctacttaggcttgattgaggatcatcaataccgaagtgaagcagagctactcaagtacacgcacacagcgtatttgaaagcaaagcagatgaaggttttggttgaagatctgtttgagtataccaaggttaaatcaaccacgaccaagttgaatccggtccggttcaatatgattgcgatgttggaacagcttgccgcgagctttgagttggaagcccataagaaacacatgcggatcctagtcagtggcgaaccgaacccattaatgatggaagctgacactgaaaagctgggacgcgttttcaataatctgatcgtcaatgcgttgaaatacgggcaaggcggacggcacattttccttgacgcccagcgaattggcagcgaagtcgtcgtgaaggtttcaaatgatggggctcagattcccaacgatgccttaagccagttgtttgatcgcttttaccgggtggaagaaagccgctcccaagaaaccgggggcacaggactagggttggccattgcgcaaagcatcattgcgttgcatggcgggtatatttacgcagattccagtcctgaattaaccagttttgtgattcatttaccattaaaagttggcgcctcgctgacggataaacaaactaaatctaatgaggaagcaggaaagacgaaatgaagaagttgttacgtgggttggttgccgcaatggtcgcggtattaatgataggtggtgctgctccagcggcgtccgttgcagctgccgaaagcagtgatacaaatctggttaatgccaaagccgcggttgcaattgaacctacaactggcaaggttttatatgctaagaatgcaagtacggttttgccgattgcatccatgaccaagatgatcagtattgagttagttctcgatgccattaaatcaggcaagatcaagtgggacgacaaggtgacgttggatcagtcgatatggacaattagtcaagaccgtgatctcagcaatgtgccgctgcgacgtgatggctcatactcagtgcgcgagttatatgatgcctcgctcatctactcagccaatgcagccatgatgttgcttgcaaaggcagtagccggcagccaggagaagtttgttaatcaaatggatgccaaactcaagagctggggcattacagacgccaaaattgtcaatgtgacagggctgaataatagtcagttgaaagatgccaaagtaccaggcactggcgacaacgcggaaaacgaaatgtcagccaaagatatggcacaagtcgcgcaacacttaattaaggatcatccggaagttttaaaaacaaccagtattgccaagcagaccttccgtaaagggaccgatgatgcgatcaatatggaaaactgggattggatgctcaaaggtttggtttcctacgataagaacctgccagttgacgggctaaaaaccgggacttccgatgcggctggcgactgctttaccgggacggttgaaaagaatggcatgcggattatcaccgtggtgttgcacgcaaacggcgatgccaagacacggcgatttgatgaaaccaaaaagctgatgacccatgttctggaaaactggaagaccataacgcttgcgaatgccggacaaagtatcaagggctacagtaaggtcaatgtcaaccgtggcgcatcacggacaacaccgattgcaccaagcgcaaaagccgttgccgttgttcccgctgatgcaagtaaaaagacacttaagtatacttacacaccggctaagggtgtcaaaaagaacacaattgaagcacccgtcaagaaaggtaccacgatcggtaatttgaaggtaaccgcaaaagacgatcaacttggctttgtgggtgataacgcacaagaaggtatcacccttaaaacgaccaagtccaatcagaaagctaatttctttgtcctgattttccgtggcattggtgatttcttcagtcacattttttagtcggcactgctgacatcatgaggtgaatgttttggactcccggttggaggtcaacgcgttcgccttttttgtgagcgcgagccggcgcgcttagaagtcggagtgtaagtggcctcaaccgtgatggctgggctttggccattgcggttgaggtccttacacgcagacttctgcgccggggagcgcgttatagaaaatgagcgcgagccagcccgtttagaaaccggagtgtaagtggcctcaaccgtgatggccgggctttggccattgcggctaaggtccttacacgcaggtttctgggttaaaaaacgcgttatgatggaacaggatcacgaagcactgaatttcatgggaggctagcaagatggtaacgtatcatgaaattaccccggctggtttggctaatcttaaacaagaagttgcggatctcaaggcgattcggccagctaagattaagaacctggctgaagcagcggctttgggtgatcgttcagagaatgcagaatacagcgccgctaaacgcgaattacggcaattagagggtcgcttgcgatatttggacaagttgattcggtatgccaaagtgacgacgccggccgcggccaaccttgctgatatcggtaattgggtgacacttgaatttgacgatgatcaggatgaagacacttatgagttggtcgggccagcagaagcggggatgggggcagctaaacttgccatcaactcaccactgggagcagccgttcgtcgccatcatgttggcgatacggtcaccgtcacggcaccgagtggcacttatcaggtaacggttatggccattagtccgcatgcgcccggtaagtcagtcgagcagcacgactgaagcaaactcctcgatttatgacggaaactttcaatgctgatgcgaggatcatgttggccataaccgaatgtcagaagaacaagcatctgaggcgtgtttttcatcatggtttcaaatagatcaagatgaaagctgccacagtgcttatgctataatgaagcttgaattcacggcatataaaaaggagtagcagcccaatggcactatcacttagagcttgtattttattattgaaggaacatcacttattaaaaagtgcggcaattcagaccactgaagatgtcgatatgaccggcattgcctatgattcacgaaaagtttccgggccgactttgtttttctgcaaaggggacaaatttcggccgatttatctgtccatggccaaagataacggcgccagaacctatgttgccgaaaagccttacgtggaaggtaatggtttaaatgccttaatcgttcggaatatcacaaaagcaatggcgattctcagtgcggcctttttcgattatccgcaagatgatttgtttgtaattgcttataccggtactaagggcaaaacaaccgccgcttatttcaccgaggcgattttgaatgaggctcggccgcggcacatcgccttgttctccaccattgatacagtggttggccctgagccggatcagcggtttaaatcgaacttaaccaccccggaaagtttggacttgttccgggatatgcgcgaagcagttgaaaatggtatgacgcatttggtgatggaagtttccagtcaggcttatttacgtaatcgcgtctttgggctgacttatgatgtaggcttcttcttaaacattacccccgatcacatcggaccaaacgaacatccgacttttgccaattatctgcacaataagctgcagttgttggtcaatgcgcgcaaagtagtgattaacgcggaaaccgagcattttgatcaggtctatgcggcagcaaccaccacgacttatccggagagcatttatttgttcgccagcgctggattcaagcctaagcgcgacgacattgatattgatttccgatttgacagccaagaagctgatgtcgccgaaagtcgctttacactcgtgccggtaacggaaaaagcagcggcacttaatattggcggtcattattcgctggctttaatcggcgacttcaatgaaagtaatgcgacagcagcgattatcggcgccggcctggcaggtgtggatgcatctgctgcggtgcctggcatcgccaaagtcaaaattccgggacggatggaacattttcaggttccgggccacggtacggtttatgtggattatgcccacaattatgctagtatgaaggctttgttatcgttcctaaaacgttcctacaaagatccgcgcttgctggtcgttgtcggctcccctggtgataaaggggtttcgcggcgcccgggctttgccaaagtattaactgagttggcaacagaagcctttttaacaacagatgatcccggctatgaggatccagccaatattatcaatgaaatcgaccttaagattgatcacaccaaagttaaggttcacaaggtgcttgatcgtaaagaagcgatcacggaagcgattaaggccagtggtcccaaagatgttgtggttgttgccggtaaaggcgcagatccgtatcaaaaaattcggggcgtcaacacaccttggccgactgatatggccgttgtcaaggaagtcacccaatcgttacaggaaggctgatttgaatgcgtcaatttttcaccgttattggtggcatggggacaccggcaaccgagagttatgtgcgtctgctgaatcaacgcacgcatgcccatagcgatcaggaatatctcaattatattttggtcaatgatgccacagtgccggatcgaaccgattatattctggatcacagtaaaccgagcttcttcccggatttactagaagacgttcgggcacaaagtctgttgcagcctgaattcatcgtgatcgtttgcaacacggcgcactacttttatgatcaattagctgctgcatcgtctgtgccactgttacacatgccgcggctggccattcgcgatatgtgcgagcgattcccgaatgaggagcggatcggtcttattgcaacccaaggtacgatcaaagatggcatttacagtcatgaaatcgaaaatacagggcgcaaggttattttaggagatcaggcgttgcaggacatggtgacagagctcatttataagtacgtcaaagaaaagggcgaagtcaatgccgagttatatcatcgcatcttgaaacggatgcacgatgattttcaggttaacgtcattgttcttggctgcaccgagctttcgtttgctcaggaaaaagccggtgatcatccatatcatgtgattgatgctcaaagtattatcgtggacaagaccattgcactcggtaaggcttttcggaaaagtgaggcagcgggtaaggcattgttgaatcaaatgatggtgcgttagtgtgccggaaaaaggcgtcggaagcagctggttcatatcagtaacttccggcgctttttatgactataggcatcgagcgggtcatgcaaaataatacttacttgtggtaagctttaattagtacccaataaaggagatggcatattttggcacatttaaccaaattaactgacacatataccttgagcaacggggtcaagattccaatcgttggttttggaacttggcagacaccggatggggaagttgccaagcatagtgtggaagctgcgttggctgccggttaccgtcacattgataccgcagctgcctatggtaacgaagaaagcgtgggtgccgggattaaggcgtcgggcgttgcacgtgatcaaattttcttgaccacgaagctttggaatgctgatcacggttatgacgcaactaaggcagcgattgaccgttcgcttcaaaaattaggcgtagattacgttgatttatatttgattcactggccaaatccagttaagttccgtgacaactgggaagaggccaatgccggctcttggaaagcgatggaagaagcttataaagacggcaagttgcgggcgattggggtttcaaacttccgcgccaagcatttggatgcattgctgaaaaccgctaatgtcaagccgatggtgaaccagatcttcttaaatcctagtgatttgcagccggaagtggttgcttataatgatgcccatgatattttgagtgaagcatacagtccactgggtacaggtaagattttccaagttgacgcacttaagaagattgctgcacggtataacaagagtgtggctcaagtcgttcttcgctggtcgctgcagcatggcttcctgccgctgccaaaatcggtacacgatgaccgcatcaaggaaaatacccaactctttgactttgagttgagtcatcatgatatgacgttaattgatgctttacatggtgaagctggtttagcgacagatccggataccacgaatttctagcgttaagtcgtcaaccatgatttttggcgattaagtaaacgatagctgtcaggtcgataacaattaaataatccagcacccaaaaattcccgcaaacgatcattgcgggaatttttttgtcaaataagtgcgtgcggctggcgatggcgaactgtattaaggtagggtcttagcgccggttttggcattgattaactggatgctgttttcggttaaaaattcgtggtatttagcggcgatatcgccataagtgacaatcgcatcgatatcttgcacagtgccgtacgtgagcagcgatacccggccgaatttcgattgatcaatcaacagaattttgcgatgcgccttcttgaaaatctcagacttaattaaatattcgttgtactccgagttggataatccgcgggtgagcgaaattccggttgctgccataaaggctttaccgatattgaaccggctgaaaatattcatgttatcaatgccggtaaacgattgggtacggcgatcaaagttcatgccgatgatgacaagcttaatattggcaagcggcgcggcttggttgatgatttgaagattgttggttaccaacgtaaaaggaaaatcggtcggcagaaattcgcccatctccgcagtcgtagtgccagagtcaataaaaattaaatcttcaggttcaatcaactgtgcagcagcccggccaatttgtcgtttttcgctaggtgcggctaattgacgctcgctgtaaacggtgagcggattgtcctttgtgctatcaggagtggttgtgaccccaccatagactttttttaccgtaccgtttgcaattaaggttgctaagtcacgccgcaaagtgcttggcgctatcgagaacttatcttcgagctctttcatagacgcggttttaacttcgctgatataagcctgcatcgcatcaattcgttcttttctaagcatgaatgtcaccttctttaagccgtcttcgctaatctgattatagcacgttatgaatatattttggacatattatgaccatgttttaagcccgatgccgaagcatatagcagtaacgctgatttccgtagactcgttgataagttggaacgtcatccaaagcgagtcatttggggagctcgtgaaaaaatagacatcgctcgttaggctaacaagtacctgactagttacttttatcatatcattttgctacatgccacttcatttattttgatgaagtcgctcacaagtgaacatctaatgattaaattatgaacactttttagttgactttgaccatatctgcttatatgatgacaatgtaatcgaaaagtaagcgcttaaccgatacgtggaaagactcttgaaagtttggaggttaatagcatgcgtaaagcaggggttgttactaacaaaggcgatgctgcactggctccccagccggatttgggggttaaatccgaaaaattgccaaaatcggctcgtcgtcgtttgcgggttatctcgattatcgcaacatttggcgggatgctttttggatatgacactggggttatcaacggcgcgttaccgtttatgaccagagcaggcgaactgaatatgtcgccttccatggagggcttagtggccagctcgttaacattgggggcggcctttggtgctgttttgaccgggcgcatttcggatcggcgtgggcggcacaaggtcattaccggacttgctatcttgttcgtcgtttcgaccatcgcctcagcattatcaccgaccgcaccaatcttggcgtccgttcgcttcgtcttgggcttagcggtgggcggtgcttcggttattgtgccaacatttctagctgaagtcgcaccgtcgaatcttcgcggacgaatcgtcacacaaaacgagttcatgattgtttctgggcagttgttggcgtttgtgtttaacgcgattttggggacaacgttaggtcacattcccggcatttggcggtggatgcttgttttggcaacggtgcccgcagttattttgtggattgggatgaattttgttccggaatcgccgcgctggttagccgctaatggcaaattggatcaggcgttaacggtgttgcggcaaattcggacagaagaccaagcgcaagacgaaatggaaaaaattcgaatttccttaaaatcggaacaagaagtgcaaagtgcctcgattaaggatttaaagattagatggattagacgacttgttttaatcggcattggcttggggattatgcagcagatcgtcggtatcaacgtcatgatgtattatggcaccacgatcctacagacaaccggatttggccaaaatgccgctttgattgccaatattttaaacggtgtaacttcagtggtcgcaacgattgtgacaatgcatctcatgggtaagtacaaacgtcggccaatgttgctgactgggattatggggaccttattctcgttgatcggcatcacgttgacgagtcattttctcgcgggcagtccaatgttaccgtacttcacgatattattgaccgtcatctatctggctttcttccaaggagcattgggtccgctcacctggttactgctgtccgaaatttatccagcacgtatccgcggcttaggtatgggttttgccaccttcttcttgtggatcggtaatttctttgtcggatatttcttcccagtcatgttggcaagtataggcatgtcgaacacgttccttgtatttgtcggagccaatattatttcactgatttttgcttggaagtttgcaccggaaacagcaggcagaacattggaagaaatcgaattggacaacaagtttgacgataagtttcctgaaaagagcaagattaataagaattaagtttcttaagtcaatttatttgaaaatgtaagcgcttcataccattcttgagttggacaggggcgtgtgtaaacgggtgatggagccagcgtgaggactctggggcgcatacactccggttcctaaccgcaccggctcgcgctcataacgcgttcgctgcgtgtaaggacctcagccgcaatggccaaagggcggccatcacgtctgaggccacttacactccgacttctaagcgcgctggctcacgctcataacgcgctccccggcgcagaagtctgcatgtaaggaccttaagcgcaatggccaaagcccggccatcacgcttaaggccacttacactccgacttctaaccgcgccggctcgcgctcactatacgaaaggggtttgttttcatgacaacgcaacaagcagttaagaccttgaagaattttattaatggtcaatgggttgatgctaagaccgatacttttgaagatgtttataatccggcgacgggagaggttttggcacgggtgccgcattcgactagcgaggatgtggcagatgcagttgcagcggccaaagcagcgtttgaaacgtggaaacgggtgtcgattcctaaacgtgccaagattcttttcaaatatcaacagctgctggtggagcatcaagaagagttgggacgtattgtcacgcaggaaaatggtaaaagtctcagtgaagcgattgccgaagttgggcgcgggattgaaaatgttgagttcgcggcaggcgtgccgactctgatgatgggggattcgctctcggcggttgcgactgatgttgaggccacgaattatcgttatccaatcggtgttgttggcgggattaccccgtttaattttccgatgatggttccgtgttggatgttcccgatggcggttgcaacaggtaatacgtttgtgttgaaaccgtcagaaaagacaccgcttaccagccagcgtctggttgagttattccaagaagctggtctgcccgatggtgttttgaacatcgtcaacggggcggttgatgtcgtcaacggtctgttggatcatcccgatgtcaaggcaattagtttcgtgggatccgaacgggttggcgaatatgtttataagcgcggcagtgaccatttgaagcgcgttcaggcattaactggcgctaagaatcacacgatcgttttagccgatgctgatctcgatgctgcagttaaaggcattatcagttcgtcatttggatccgccggcgaacgctgcatggcgacatcggttttggtactggaagaaagcatcgctgacaagtttatggcgaaatttacgcaggcagctaaagacatcaaaatcggtaatggtctggataaagatgttttccttggaccagtgattcgtcaggagaatcaggaacggacgttgaactatatcaagaccggggttaaggaaggcgccaagctggtcttagacgggtcagcagaagccgagaagcgtgatggttatttcgttgggccaactatttttgaagatgtcaaaaccgacatgaccatttggcacgatgagatgtttgccccggtactgtccgtgatgcgtgcaaaagatttaccggaagcggttgccattgccaatcagtccgagctagccaatggcgcttgcctgtttacggattcggccgcatctattcgctacttcagagaaaatattgatgcgggcatgctgggcattaacttgggcgttccggcaccgattgctgtcttcccattttctggctggaaacattcattctttggcaccttacacgctaacggcaaggatagtgtggacttctacacgcataagaaggttgtgacggcaagatatgaccagcatcgttttaattagaaattccagatgcttgacgaggaggcattaacgatgagcttgttgtatccaaagcaaaatcaggaaatacagccgggcgttcatttgattcaagacgtcaatgcaacgaattctcccatgaaatacaccgcagtgaaagtcttggagcttgatgcgcaacgttcatttgccgagactttaggtaacttcgaggccggtattgttattctggcgggtaaggtgaccgtcactgtcggtgatcagcgctttgaaggtatcggtcaacggcaatcagtctttgacaaaattccgacagacagtgtttatgttggaacggacttatcctttaagcttgccgcacaaactgccgcgaaggttctgattgcatattcgccgaccacgacttcatttccggttcggttgattaagggcgatattcatcaaatcgaacatcgcggcaggtatcagaataaacgtctggttcaaaacatcttgccggatgatctcccatttgcggataagttattgctggtcgaggtttacacggactccggaaattggtccagttacccgccacatcgacatgatcacgataatttaccgacagaatcgctgttggaagaaatctattatcacgaaatgcagccgaagcaaggatttgtttttcagcgcgtgtataccgatgatttatcgcttaacgagacgatgacagtgcaaaaccaagacgttgtgattgttcctaaaggctatcatcctgttggtgtaccggatgggtatgacagttattacctcaacattatggcgggaccgacacgagtttggcattttcacaatgcgccagaacatgcctggattattgatcgaaagtaatgaaaaaggatagctttgcagctaagttgacgagggggggacattttaaatgtcacaaaaattcgatttgattgctattggtcgagcagcagttgatttaaatgcggttgaatataatcgacctttagaagaaaccaagagctttgcaaaatttgttggcggatcgccggcaaatattgcaatcgggtcagccaaattaggccaaaaagtaggattcatcgggaaggtgtccgatgatcagctgggtcattatgtgacgcaatacatggcagacgtaggcattgacacaacgcaaatggtcaaggatgatgcgggccacaaaattggcttaacgtttactgaaatcattagtcctgaagaaagcgatattttgatgtatcgaaatgaagccgccgatttatatctgacaacggctgatgtttcagaagaatatttagcgcaagccaagatgttggtgatttccgggaccggattagcccaaagcccgtcgcgagaggcgattttaaaggcactcacagttgcaaaatcacttggagtggaagtggtgtttgaactggattatcgcccgtatacctggaaaaatgccgaagaaacgagtctttattatcaattagttgcccagcgtgcagatgtgattattggcacgcgtgacgaatttgatgttctggaaaatcatcacggcaacacggacgagcagacaattgcgacacttttccaatacgatcctaagctaatcgtgatcaaaagcggcgttcaggggtcaaatgcgtatacaaaagccggcgatcattatcactttggagttttcaagacgaaggttcttaagagtttcggcgctggcgattcatttgctgccgggttcctatatgcttacagccacgacttgggaatagaaactgccttgaagtatggcagtgctgcagcgtctattgtgattagtcagttaagttcttcagaagcgatgccggatttggcgaaactcacggcatttattcacgaagcagagaggcaggaggtgcattaggatgagcgcaatggagttgaaggcgcagggaggagaagcaaaaccggccgcggccgataccgttcgattgacaaccgcgcaggccctcgtgcgctttttaaaccaacaatatcttgatgttgatggtgaggtcaccccgtttgtcgaagggatctttgcaatttttggccatggcaatgtactgggtttgggggaagccttgcaggaagacccggggcacttaaaggtttatcaagggcataacgaacaaggaatggccagtactgcgattgcctatagccgtcagttgtatcgccataagatttttgcggtgactgcttcggcaggtccgggttcggctaactttgtcacggcggcgggaaatgcatacgtgaacaacattccgattctctttttgcccgcggatacatttgccacacgtcagccggatccggttttgcagcaaattgaagtggacagcagcgcaactactaccacgaacgatgcgttgaagccggtgtcgcggtactgggatcgcatcgaacggcccgagcagctgatgagcgcacttttaaaagcctttgaagtgctgacaaatcctgaaacagcaggcccggtcacgattgcgttgccacaagataccgagggtgaagcttatgattatccgcgtagtttcttcaataagcgcgtgcatgtgatcaagcggattcaaccgagtgcggcggaattaacggaagcggttcaacttgttaaggccagtcgctatcctgtcttaattgtgggtggtggcgccaagttcagtgaagccggttcggcgattgaagctttctcggataagctaaatattccgattgttgaaacaccaactggcaagtccactatttcggcaacgtttgccaataatatgggcggtaccgggattctaggaacaacagcggctaatgaagtggtcgcaaaagctgatctcattattggtgctggaactcgctacacagactttacaacagcttccaagacggctattcatccggagaaaacccgcgtgcttaacattaatttgaatcgcatgcagtcgtataagtttgacggctttccgattgtggcagatgtccgggatacactgagccaactgactagtgaattgtctggatatcaaagtgactttaccaacctcgcagacctcaaagctgcttggcaacaggaacggcagcgtttggcccatacaaactatgatgcgccagattatacgcctgaggttaagggtcaattcagtgcggcgacattagctgagtatgccgagaagttacaaacccatttcactcagacggaagcggttattgctgtgaatgacacgattgcgccggatagcattattgttgctgcagcgggatcgttaccaggggatgttcaacgaatctgggatccaattgtgcccaatacctatcacatggaatatgggtattccatgatgggttacgaggttccggcagcattggggattaagttggcacaaccggataaagaaagttatgccttggttggtgacggcagcttcatcatgttgcattcagaacttgtcaccgcgctgcaatatcataagaagatcaacattttagtctttgataattccggatttgcttccatcaataacttacaaatggctcaaggcagcaatagctatcgaaccgaatttagaactgccgaccatgatatcttaacaatcgattttgccaaaattgcggaaggatatggggctaaaacttatcacgtcaatgatcgtgacagtttagtcgctgccttggaggatgccaagaagcaaacagtttcgacattaattgatatcaaagtgctgcctaaaacgatgacacaaggatacggccaaagttggtggcgagtcggggtttccgaagtatccgacaatccaaacgtccaaaaagcgtatcaagacattcagacaggtattgatcaggcatttaaatactgaggaaaacaacaatacaaaggagcgattgacatggttgtcaaagttggggttatcggtacaggcgcaatgggacgcgcacacattgatcggctaaccaatgttttaaccggagctgaagtcattgccgtcacggatattgatcaagaagctgcccaagccgctgttcgggattttaagcttaacgcaaaggtttatccggatgacacgagtttgttaaaggatccggacattgatgccgtttttgttgttagttttggcggtgcacatgaggcgactattctcaaagccttagacaccgataaattcattttcaccgaaaaaccgttggcaacgacccttgagggagctaaacggatcgtggataaggaaataagcaaaccgcgaaaagtcattcaagtaggctttatgcgccggtatgatgagggcatccatgccttgaagactaagctggattcgggcatcatcggaacgccgttggttgtgcgcgccagtcatattaatcctaatgttgcggccaattattcaaatgaaatggccattacggatacattgattcatgaaatcgatgaaatgcattggttacttgatgatgattatgcatcgattcaaatcacctatccgcgccagtcaagtcaggtgaccaatgaagggttgcgggatccgcaattagccacattgaccaccaaaaaaggaacggtcattcaagtgttggttcatgtgacggcgcagtacggttatgaagtcaaactcgaagttgtcggcgaaaccggagaattaaagctaccggattacggattcgagccaatcgttcgcacccaagcaactcagcaaaccgctatggaaacaagttgggtaaaccgcttcttgcaagcatacaacaccgaagttcaggaatttatcgatcacgtggctaaggatcaatcaccggtcggcccgagtgcctgggatgggtatgttgcagcggtgacggccgaggccgcgattcgttcgcaaaaggatcaagaaccggttttgatcaatgttgccgagacgccaacattttatcaaacgaatcaaccggtaaaggcttagccatctagtcaagcaatgtaaaaaagagggggaaaacgcgatggttcaaagggaagttaaaattggcattgtggggttaggacgacttggtaaaatccatgcaaccaatctcgccacgaagattccacatgctaagttgcaagcggcaacgagtgtggtaccggaggagttagcctgggcacgtcaagaactcggagttgaagaaacctatgaagactttgatgacatggttcaacatgccgatattgacgccgtctttatcgtgtcaccgtctgggtttcatttgccgcaaatagaaagtgccatgcaagcaggcaagcatgttttcagtgaaaagccgattggattagatctggatgccattaaacacactcaggcagtgattgccgatcacccggagttaaaattccaacttggatttatgcggcgctttgatgattcatatgtttatgccaagcaattagttgatgcaggcaaaattggtgatatcacccttattcgcagttacagtattgaccctgcagccgggatggaaagttttgtcaagttcgcaacttcagccaatagcggtggcttgttcctggatatgtcgattcatgatattgacgttattcgctggttgaccggtaaggaaattgataaagtctgggctatcggcttaaatcgcgcctatccggttttggatcaggcaggcgagcttgagacaggtgctgcactgatgcaacttgaggataagacgatggcgatcttagtagccggacgcaacgctgctcatggctatcatgtcgaaacggagattatcggaaccaagggcatgctgcgggttgcgcaagtgcctgagaagaatctggtgacggtcatgaatgaagaaggcatcattcggccaacctcacaaaacttcccagagcgttttgcccaggcattcttaagtgaagaacaggcttttgtcgacagtattttaactggtgagacagtcggcattacggcggaagatggccttcaagggaccaaagccgcgctggcactgcaacgcgcgtacgaaaagaacgatattgtcaaggtgaccgatgttgataaaaaggtaggtgcttaaagtgacgattgcattaggaattgccccgattggctggacgaatgatgatatgcctgacttgggcaaagaagtgactttcgaacaggccattgatgagatggcgctggcagggtatcaaggaacggaagttgggaataaatatcctaaagatccagtggttttaaagcattacttggacctgcgacatctgaaaattgccagtgcctggtttagcgcctttttaacgaccaagccctatgaagaaaccgaagcagcgtttatcaagcatcgtgattttctacacgccatgggagccaaggtaatcgtggtagcagaacaaggccatagtgttcaaggcatgttggataagtcggtctttgatgataaaccgcattttaccgatgaagagtggcaacgcttggccactagtttggaacggttgggggatcgcgcccatgaagtcgggatgcagattgtttaccatcatcatatgggcaccggagttcaaacaacggcagaaattgataaattaatggccatgacggatccggataaagtgtctcttttgtttgataccggacatttggttctatctggtgaggacccattaacaatttttgatcgctaccatgatcggattaagcatattcacttcaaggatgttcgtcctgaacaagcccagcaagaacgtactgaccacttaagcttccttcaaggcgttaaaaatggcatgtttaccgtgcctggcgatggcatgattgacttcaagccgatttgggaagccattcaaaagcaacactatgacggctggattgtggttgaagctgaacaagatccagcaaaagcaaatccgtttgaatatgcgctaaaggctaagcattatctagatacgatcatgacgattccccaagcagtttaagggttctgttcgagaagggatatggttttatggcgttgataccggcaacaaaactgattcaagctgcactggcagatcacgcagcaatcggtcactttaatattaatggtgccgattggttggaaacgtatcttaaagttgcgcagaaaaccggaacgccgattattgttgctacctctgatcgaattattgattttcttggcggattcgatttcattgctagctatgtacgctttatggtgcaggcattgcatatcaccgtaccggtcgtattgcatctggaccacggcctgtcagttgagcatgtttatcaggctattgatgcgggatatacgtccgttatgtttgatggctctaagctgcccattgaagaaaacgtggctttaaccgacgaagtagttcgttatgcgcaccagcatcatgtttcggttgaagcagaagtcggcagtgtcggtggcaatgaaaatggcttaatcaatggtatccgttatgctagtgtcaccgatgccgttaaaatggccgcaaccgggatcgatgccctagctgcagcactgggatcggttcatggcgattatgtgggccgtccgaatctgaactttgaacggatggctgctattgccgccgctaccaagttaccactcgttttgcatggtgcatctggcattcctgatgatcagattcaacaggcgatccaaaccggaacggctaagatcaatatcaatacagaagtgaacacggtatggactgcagctatcacaaaagcggtgcaagtcaaacgttccggtcatgatccgcaaccgattcttttggcaggcaaaaaggcgattgcgcaattagttgaaagtaagatgaaggcatttcatattctgggaaagagtaaacgctcagtgacctttgaataattgtccggtcgcatggcgattgaactggctcatgtcggtcatagtctaataagaatactgattgtcagttaccgctgcgtatgaggaggggaaacgatgccattagttcgatttgacatgttaaaagggcggtcacccgagactattaaagctattttgcaaataacccatgaagtgatggttgcagcgtttgaggtacccgagcgtgatcgttatcaaattgtccaccaacatgagccatatgaaatggtggttgaggataccgggttgggcataccacgaacggatcaggtggttgtgatttcgttagtgagtcgcgttcgtacggttcaccaattagagcagttttatgaaagtttggcaaggcgcttatccgaagcaggattagtggataagaacgatctcatggtcaatgtttcgtttaatcatgatcaaggctggagttttggccaaggcaaagcccaatttttggatggcagtttataaagagaatatcaagtaaagcaggatgccttggccgcttctggaactttgccagaggaatcgaccaaggcatttttgtgaacgcgagtcggtgtggtcagaaacgggagcataggggcgtttggtcatggtgctcaaagttcgtatatgtgcaggttgctgcaccgaggcgtctgtatcggtggcgggcaactgctttagttgacgccacaattgcgttcacactaagtcgcagattgtttgggtaggcgaagagaagtgggggagtcgtgatggggatagaactgacacaaatggctttgaatcgaaaaattgctcagcagcggccactggcgaaattttttcaattagccgaagctgctggcattcatcaagtcgagttacgcaatgatatgaccacttctgatggctcagagactgtcattgatggcatgcaggttgcagaatttcagacgttaaagcaaaaatacgacatgcagattttaacgattaatgcgattcagcaattcaataatccagccaaattaagcaaaaatcgcgatcttttgaccaagctggcggaattgtcggcgcaaattggcaatcaggcgattatctttgtaccggaagttaacgcacgggacaagcgaaccgagcaacagcgacttgatgataccgttagcagtttacaggtgtttggggacattctggctgcttaccatttgacgggattcattgaaccgttgggctttagggccagcacaatgcggtatccgtggacagcgctggatgccattaatttatctggccggaccgagtttaagctgacgattgatacgtttcatttcttcttggcacatctaacagccgaacaattcaaagcaggtgttgatattaaccgcgtgggattaattcatctgtcgggaattgagccgatccacgcattgcgagaagttgtggatgaagatcggattctgattaccgaacgcgatatcatgcaaaatattgagcaggttcatttgtttgaggcaatgggttatcggggccattattcatttgagccattttcaagccggttggcagccgaaaccaaccagcaacttactcagcagatattagcaagtattgaacggttgaatcagccaactgcagtgtttagtacggaggtgacgcaaccatgaagttagcctatgatccttctatgttccgcgactcaatgaccttgaagcaaatgtttgatgaggttgcgcggttaggttatgagtatgttgaattgtcgccacgccgcgattttatttggttctatgagcacccagtagccgatcacacgctaattaagcaggtaaaaaagtacgctaaggatgccggcgtgaaaatttcgtcggtactgccggtacagcaatggtcttctcctgatgaacaggagcgcgagtttgcggttcgcaatttgaaacgtacgattgaaattaccgcagagcttgaggtgccggttttgaatactgaatttgctggcgataagtttcagccgcttgtttctcagggacagtggtataagtccatggcagaattagcgccggtgtttgaaaaaaataatattgagctggaaattcaaccgcatcccaatgacttcatcgaatctaatctcgctgccacacgcttgattcgttcattggatttggattgggtgcatcaggtttggtgtagcgcgcacgcattttatatggacgacgggcgtggagatattcgtcagcagtttgctgagtcgggggagcggattacccatgttttaatcgcggatacatttaaccataaaggtaatttcagcttgcggtatattatcaatccgcctggggctccggtaacgattcaccaacacttgaacccagggggaggagaagtcgattttacaacgctttatcaggtgttgaatgagcgccattttgacgggatcatcaccaacaatgtgtttgcgtggcctgatcgcgttgattggtcaaatgacgtcaccttacaatcaattcagtctggtttgcatttattgaaaacgtgacgagcctgtcgcggcaattgaatcaggtttagcttttttctgaaaaacggcacctcgaaaaagaaatccgagctgccgtttttgtatacttaaaatgatgtctttggttaatacgatgttgtccctattgttactgccgggttgcgtcaatggtggatctgacgcgacggaaaagcggtgcagtttgactgttggtttgaatcgcgctgatcatgaacaaagtgtccataagactgagctcggcgatcaaggcgtgaagggcttcggtgcgatagcgggattcttcagccacggcaacaaaggcggcatcggccattttggctaagtgtgagccgggagcgccggtgatgacgattaagggaacgttttgcttttttgctagttcggccaaagcgattgcatctttgtctttgccggagtgggaagtcaaaatcatcgcatcggcagcagtaagatgtgttgcagccatcagttgcatatggtaatccgccgcgtaaacgaccggaatagcggttcgtaaaaacttgtgataaccatccaaggccacgagattgctggcgcccaatccaaaaaggcctaactgatttgcatgggtgatccagtcgaccgctttggttaaagcagccgagtctaaatttgtcagcgtggtacgtaatgcatctatattggaggtgaagatcttatgagccagcgtttcgaccgaatcagcgggactaagctcagcaaacagcgtgtgatctggttcaggtgttgattggaccagtgccattttcaaggcttgaaaacttggataccctagggccttggcaaaacgcgaaattgtggccgtactgacaccggtgatggcgcttagttccgcaatattcgcgtggctcgcacgatcagggtgctgctgcaaataatcagccagttttttttcttggcgacttagattcggtttataaatctgcaattggaccagaaagtcgtgcatgttgccccctccatttcaagattattatagcatcattcgtttgaattgaaaattatttacgaacaaattgcttgatttttgtaattattttacatacaatggcaccgtaatcaagaaagatggcttccaggaagaatgattcgttgttgctatctaagatgaatcggcggtgtcttgaagatgcacagaagttaaataatggtagattcattggtacagagattgattgatgctcgcgtggtagccacgccggctcacgcgcacgcacaggaggttgcaaacatgcaagtaggtatggttggtttaggcaaaatgggaatgaatctggttgcaaatatgcgcgatcatgatattgaggttgtggcgtttgatttgaatgatcaggcgcgcacggaagttggtaagtatcaggttaaggcggttgcaagtctggatgccttggtaatgagcttggcctcaccgcggattatttggagtatggtaccagctggcaaaccaaccgcggcaacgattcagcagctggctaagctactgagtcccggcgatgtggtcattgatggcgggaattcttattatcaggattcaattgcgcatggtaagttgttagcggcggaaggcattcactttttcgatgtcggcacttcaggcggcatggctggagcccgcgcaaatggtaacttcatgatcggtggtgatgaagaacagtttgctcagatcgagccgctttttaaagccatcgcagctccaggcgggtatctctacaccggtccggttggctcaggtcattatttgaaaatggtgcataacgggattgaatatggaatgatgcaggcaatcggcgaaggctttgatgtcttagcccacagtccctatgcctatgacaatgcggcggttgccaaaatgtggaatcatggttccgtgattcgcagctggttgatggaactggccggtgacgcctttagtgaagatgctgacttggcgaaaattcaagggattatgcatagttccggtgaaggtgcctggacagttgaagaagcgttacgtttgcacgttgctacaccggttattgccagcgcgctcatgatgcgttatcgatcagaagaggccgatacaatgaccggtaaagtcgtagccgcattgcgtaatcagtttggtgggcatgcagttgatcccacaactcaacgtcactgagccgatctatgcgttatggtgctggatgagagcaacgttttggagaatggacggctacgatcattgccgctgaaacttcatatcgcaaaaacggatcaggtaaaagctgtttgaagtgtttcggcatgtgacgcgaaggtttgacgctggcggatacagattgaaaaaggagaagatgatgatgacggtcaaatacatgatcggggttgatttaggcaccaccagcactaaagttgttttatttgatctaaaaggcaacgccattgcgactgctaataacccatatccgttgtatcaggatacgccggacatggcggaggaagacccagaagaaatttttgccgcaacggttggtggtttaaccgaggtcatgcatcgtggcaatgttcaacctggcgaactaggtggtgtctcattttctgcggccatgcatagtttaatcttgatggatgaacatgataagccgatgacgcgggtcattacctgggcggataatcgggctgcggcgtatgcgaccaaactgaaacaaagtgatttagggatgacgttgtttaaggctaccggcgtaccgactcacccgatgtcgccgttggttaagttattgtggttgaatgatgcgcatccggagttaatggcgcgggcgacccattttattggcattaaagattatattttattccgtttctttggccgctatgttcaggattactcgcttgctaatgcgactgggctgtttaatattcatacgatggactgggacgatcaggcgttgagtgttgccaaagttcgccgcgatcagttgcctgagcttgtggataccagctatcaactaaccggtttgaatgccaattatgctgcggtgaccggtattgacgatcagacgccgtttattctcggcgcgagtgatggtaccttgagcaatctgggtgtaggggccattgatccaggtgtccttgcagtgacgattgggacctcaggcgcagtgcgggttgtgacggacaaacctgttgtcgatccacaagggcgtttgttcacgtattacctcgcgcctaatcagtgggtcgttgggggtcccgttaataatggcgggattgtatttcgatgggttcgcgatcaactttttgctccggaaaagttgaccgccgaacaattgaaggttgattcttatgagatcttgacggaaatcgcgagcaagattcctgccggggcagatggcttattattccacccgtaccttggcggcgaacgtgcaccgatttgggatgcaaacgcccgcgggagcttcttcggcttaacccgtcagcatacgcgcgcacacatggttcgggcagcactggagggcattgtttataacctgtatatggtcatgctcatgattgaaggtatcaccggaaaaccccgggcaattcaggcaactggcgggtttgcccgcagcgcgttgtggcgccaaatgcttgctgatgtctttgagcaggaagtcaatattccggaaagtttcgaaagctcagcgctaggggcggtcgtcatcgggatgaagtcgttgggtttgattgatgaccttagtgcagttaaggatatgatcggggtgacgaatacccatgaacctaacgaagcgaatttcgcggcgtatcgagcgttattgccaatttggattcgtttgacacgcaaattgggtagcgaatatcaagccattgcggattatcagcgggcgcatcctgatccggcggcacgcaatcaggcgcaggattaggctttaagtttaaagagtggacagtttgtgtttatgtcttgcaattattaggtgaccggttttaaaacactaaatgatgaacggttaggtcgacagacgcattttgagtttagacgcggctgccgttttttataagtggtattgtaagcggtttcggttgccgggatgcgagattttggttggctcgcgctcatattaacgcgctccctagcgcagggatctgcgtgtaagaaccttggtcgcaatggccaagcccaggccatcacgcccaaggccacttacactccgatccctaaccgcaccggctcgcgctcataacacgctccccggcgcaaaagtctgcgtgtaaggacctcaggcgcaatggccaaagcccggccatcacgcctgaggccacttacactccgacttctaaccgcgccggctcgcgctcataacgcgctccccggcgcagggatctgcgtgtaagaaccttggtcgcaatggccaagcccgggccatcacgcccaaggccacttacactccgatccctaaccgcgccggctcgcgctcactaaatcctgaggaggaaattaaatggacttgcttgtcttgatactaggtattttgttgttattggtactcatcatcaaatttaagtttaatacgtatgtttccctgattattactgcagttgttgtcgcacttggtttggggatggcgccggctaagattgctacgagtatacaaaccggcattgggtcacagcttggcgagttggcacttgtctttgggtttggggcaatgcttggccggttggtggctgatgccgggggtgcgtatcggattgcccataccctgattaacgcatttggtcgacgggggttacagctggctgttgttttggcgtcattcattatcgggatcgcgttattctttgaagtggggattgtcttgttagtgccgatcgtgtttgcgattgcggctgaagcaggagtcccgattctgacacttggcattccgatggcggcggcgttatcggtcacccacggattcttgccgccacatccggcgccaacagcaatttccacagcactaggagcgtctgccggtttggtgctggcatatggagttatcgtagcgattccgactgtttacattgctggtccattattttcaaaactcgcgcatcggtttgttcctgatgcgtttgaacggcgcggtaatttaaaagcattaggcccgcaaaagtcctttaaactggaagaaaccccgggctttgggatctcggttttgacctcgttgtttccagtcattttaatggcaattgcaacgatttatgaattagtgattcacggtggcaaaatgccaaagaccccgtcaggcatggataatgtgattgcctttattggttcgccaagcattgccatgttgatttcgcttctgtttgcgatgtgggcaatgggttatgcgcgtcagttaccggctaaagacatcatgaccacacttgaagaggcagtgaagtcgattgcgatgttgctactggtcattggtggtggcggtgccttcaaacaggttctaatagatggtggcgttggtgattccgtgaaaaatcttttcgtcgggtcatcaatttcaccattaatactcggatggctaattgcggttgtacttcggattgcccttggctcggcaaccgtagctgcaatgaccgcttccggactagtgctgccgctgatgcaaagcgcaggcattcaaccggcattaatggtgttggcaatcggtgccggttcgttagctgccagtcacgtgaatgatgccggattctggatgttccgtgaatattttgatctgactatcaagcaaacgttgttgacatggacattgctggaaacgattatctcagtagtcggtctcggcggggtgttgttgttaagcttgtttgtttaaataatagggagtagaaggtcggcatagagtcggcctttttgcgtgaatataatggtggtagtggtcgcgatgattcgttcaatatgataaacttacgccatctatagatacagaaacggagattataaaattatgtacgaaccaaccaaaaaacggcgcgttgccgaagatgttgccaagatttttcctgaagaagtgacaaatcagatttttgatgtcattgcggtgatgcgtaaggccaaacagattgtgacggcgccggttgcgattgctttttccgatgattataccgatgacgaaatgtatgcgatgattattcagggcaatttggcaccggcgcaggagtttccgctcacttacaaaggcgacaagccattcttaggtcatggctatatcttagtggtcaaggacaagcctaaaacgatccgaattgacttcagtgcggccaatccactcaaagctgcggaaaaggactgatctgcgggtggtcacagaggcgtgatttcacactcatggctgctcgtataccgatcatccacggataccggctttcgtgtgatctaaatagcactggtcttttcatgaaaacttcggtacaatagtaaatcgtaatcgttaccgtttgctattgggaggcagctatgagtgaaccaattttgaccgtggaccatcttcgtttcgggttccgggatcagcagctttatcaggatttgagttttcatttggatgttggctccatgacgagcttggtcgggccgaacggggtgggtaaaacgactttgattcgcctgttgatgggccagttgaagccgcaagccgggaccatccgttttcgtaagcaaccttcagttcgattgggatatgtgccgcagtttcgaaatgtggatgccgagtatccgctgtcgatccgtagttttattcagttgcgccagttggatcacctttttttctggcatactgccaaggaaaaggcggctttagctcgggtgattgaggcgacacatttaactcagatcgcgaatacacggctgggcatggcgagtggtggcgaaaagcaaaaggcgtacttagctcaggcgctgttagatgagcctaattttctgattcttgatgaatcgactgctagcttagatgttaatacgaagcacgagttaatggacttggtacaagagcttaaccaaacccaaaaattaacggtcctgtttgtcacccatgatctcagtttagccaagcaatataccaaccagtatttattgctgacgggggacagttacgaaatgaagccgactgcggaaatgaatttggcttcaatgccggaagagttacgcaacgatgccgagaatcgcggggtgatcgcatgaatctatttgcctatgcttttatgcaaaatgcttttatggccagcacctttattgcgattacaacggggattgtcggggtctttgtggtggcgcgtaacatgtcctttttggcgcacactttgtctgaggttggttttgccggggctgcgtttgcggtgtttgccggcattaggccattggacgggatgctgctctttaccgcgatcagcagtatcagcgttgggcgcatgtcggttcaagcctcgcgtcgggaagcatcgatcagtgcggtttctagcttgtttatcggtttaggtattctgttcttatcactttcgagtgcgaatgccagttatgccacaacgattttattcggcagtattattggtatttcccagggtgacgtgtggcagctggttgcattagccgcgggggtgttgttcaccttgtattttggttatcggcggttggcatttgattcgtttgattcggtcggttctgccgcacaggggttgaagagtaagtatatctcgatttatttcctacttattctggcagtttcggtatcaattggcgcccagattgtcggcagcttgcttgtgttcatccttttgaccttaccgccgaatgttgccaagtatctgggcaaaacgttgccgcagatgattgtcatctcggttgtgaccgcattgatcggtgtctggagcggcctttaccttggctttttgacaaactggccggttacgttcttcattgctgcgattgagtttggtttttactttttggcattgtggtatcaccaaaagacaaactaagagctgcttggttgtcttcaaataaaaatggccctagagcgacgagaatctcgttgctctagggccatttttatatctgaagctgtaaagaaccgttgttggcgccagtgggttatcgatgcggtttaagttgacgcaaaaaagtcgttacttctgcgcgataatcgtgtttttgctcgaattgtgccagataaggagcattgtgggtgctagtggctccggtatgccgcagcttcgtatatacctctaagtaaggcaaggcagcttgtttggcttgggctaattcggccgcagcgtcatatggaacctgacgtaaatccagatccgtcattgccccatgatgaaggctcagcaaagcatagtctgcataagtcgtggtttgtaaatgtggtcgcggtgaatatgcttgaccaattgagccaggattcagtatcacctgaccactgctggtgtagcgcagtaattgctgatgggtatgcccgtaaatggcaacgtcgattttggggtcaggcgcgatctggtcgaaattgctttgtggttgatccggatagagtcgatggccgtggttgctagtcggcaagttgtgggcgagactgatcgtcagaccgtcttgttcaaagacttcatgtaatggccagtggcgaatggcggtcagtatgtcagcatttagctgcggccataaataagcaacgagccgactaaagtagacatcggtgggctggtttaagtctaccgggccgtccaatacccagaataggtcatcatcccagttgcccttaaccagatgcgtcaacggcagtgcatgcagtcggtcccaaagcttggctgctcccggtcccggtaggaataagtcgccaaggaaccagtattcgtcagcgtgatgtgcctgtgcgtctttaagcactgctgaaaaggcggtcatattgccgtgaatatctgataaaatggcgatttttgtcatgcgttcctccagtgatcgttcattgtgactaagccttgcgttcccagatcgcctttaccggctgccaccatgttagcgtataactgttcggccagttgggttgccggtaactgcagatgcatttttttggcttcatctaaagcaattcggagatccttgagaaaatgttttgcgaaaaaaccgggggtataatcagcctgcaacatgcggggaccgtaattgcttaagctccagttggcaccggccccgctgccgaccaccgtgagcatttcatttaaatcaagcccggccgctttgccataaaccagcatttcagtgagtccggtcatcgtgccagcgatcataatctgattggccatcttggcatgttgaccagatccggccgggccgaaatagttaaccgatgtcgcgatcggtgcaaataaatctttcaatcgagacagcaggtttttttcaccgcctaccatgatcgtcaaagtgccgttcttagcgccaatgtcgcctcccgaaaccggcgcatcaatggcatgagctcctttgtctgcagctttggaagcaatacttttggctagtgttggcgtactcgtggtcatgtcaatgattaagtcaccagcgtgggtaccagcaagaaccccgtcacagccataataaacggtttcaacgtcctgaggaaaaccgaccatggacatgacaacatgacactgtgccgccaccgcatgcggagattccgcccaagtggccccggcatctagcactgtttgcgcgtgggcttttgtgcggttgtaaacgatgacctcgtgaccggcattaagaaagtttttaacgatcccggtgcccataacaccggtaccaataaatccgagtttcaaacgactcatcctttctgcaagattttttccaattccatcaagcgctgttcaaatactgaaaaggcggcttcaagataatcgggtttggtcatatcaacgccagctgttttcatggtgtcaatggcatacttagaactccctgacttcaaatagtctaagtaacgggcagccgcgtcaggttcgccgctactgatgcccgctgctaaggttgaggcagcagcaaagccggttgcatactggtaaacatagtaattgtaatagaagtgcggaatgcgggcccattcaaaggcaatttccggatcgcgtgcaacttccggtccataatatcgggcgttgagatcggcgtaatattgtgacatgctggtggccgttaacggttcgccttgctgatcctgttggtgaatccagtgctcgaactcggcaaattgtgtctgacggaaaacagttcccttaaaaccatcgagatagtaattcaaaatgtaggctcgtactttggaatcatccgaatgtgtcaggaaataatcagttaacagattttcgttggtcgttgaagcaatttcggcaacaaagatcggataatcaccatagacatacggctgattgtgacgcgtgtaccaactgtgaacgctgtggccggtttcgtgaaccaacgtatagagttcatcaacggcatcgtgccagttcaataagatgaacggattggtatcataagcaccaccggaataggcacctgaacgtttgcctttattttcgacaacatcaatatagcgattgtcaaaaatttcgcgaacatgctcaagataatcatcgcctagtggggctaaagcttttaaggcctctgctttggcttgttcaagcgtataagtcaacggcggctggccagtcagtggtgtgtaaatgtcatacatgtgtaactgatcgactgccaacacctttttgcgcaaggcgacataacgatgtaaaagcggcaggtgggtgttaacctggtcgataagcgtcgtgtacacactttccggaatgtgattacttgccatagcggcagcacgcgcatttttgtaatgatgcgccgtcgcgttgaaattatgggctttcacttgaccacttaacgtttgcgcaaacgtatttttcaaactttcgtaagcacgcagaagggcctcgaaagcctccttgcgtaatttacggttagtcgagcgaatcaattgaccgtacaaaccgttactaagctggacggtttcgccatcttcattttcaacaaacccgaattgcagatcagagttgtttaatacattgaaggtcgcgtgactggcatttaaggcatcacccgcacttgcaatcaaggcctcggcagcggttgtcaagacgtgttctcgatttaccgtgatggcatcgataaaatgtccgaatggcttcaagctttcagtgtcacgccaggccgttaatttgtcgcttgggatcgccagaatttccggatccaaaaacgctaactgactggctaattcagcacccaggctttcagctttggcattcatcgcctgataagtggcgttaccggtatcttgatcgctttttaaacttgaatagacgtaaaccttctcgaagcgtcgaaaaactgcaagtacggctttaatgccggtaacaagggcgtctgccgagttgcctaacgttcctttcaatgcgacggccgctttggcttgggcacggacagctttaaagtcggtttcccaagctgaatcatctggataaatcgttgtcaggtcccaggtcaattgcgttgggacatcctctcgtgctggtaaatgttgcatctaatcagctccaatttctaatatttctttaatgttaccatatcaagccgatttttgagctaattcccttttttcttcataattatctgatacactaccgtggaaactaaaactggagtgaagcacatatgtccaagcaacaaaaatctgatctacgaatcaaaaatcgcaaacccaaacggcgccatccaattttacgtgcggtggttctcattgtgctcgtggcgctttttctggcgggtggctatgcagccaggttctactcacaagcaaaaaaagcagttgcgaagacttatgacccggttagcacgaaaacagtcaattccgacctcaatggcaaaaagccaatcagtattcttttgatgggtaccgataccggtgcttttggccgcacggatacaggtcgttccgacacgttgatgcttgtgaccatcaaccctaaagaaaagaagacaacgatgctcagtattccccgcgatacgttagcagaaatggtggggacaggcgatcaatcacctacctatgaaaaaatcaatgcggcatactcgtatggcaagtcagacgcggcgatcaaaaccgttgaaaaattactaaatgttccgattaattattacgtgaccgtcaacatggaaggactacaaaagattgtcgatgctgtcggtggagtggacgttaatgtgccgtttacctggacggatgcgaatacaggcgggcaaacctttaaaaaaggtaaggcgcatcttaacggtgaactcgctcttgcctatgcccggatgcgtgatgaagatcctgaaggcgattatggccggcaaaaacgtcagcaggaagtcatcaatcagattgttaaacacctgatgtcagttaaatcactgacgaactatcagaaggttatggactcgctgtcatctagcatgcgaaccaatcttacttttgatgacatgatggcaatcgcccaaaattatcgcagttcggcttcaacgattgagcgcaaacagctgcaaggcattggtgtttatattgataacgcggcttatcaggttatgaagactgatacgcttcaaaaagcatctgatgaaatgcgtgctcagctaggcttgtcaaagaagacattgaataatttcaatacccaccaaaacgaaattaacaattcacttgggttcgattggactggcaataatccggtttatacggtttcacttgatggtgtgaccacaggaccttgaagcgtttgataaagttagtgtcaaaaagcatggccacttcggtatttgaaggcgaccatgcttttttgtgtcttatggaaatgatgatgaaggtggcatttaaaatggttactctggatcaggtaaatcgggtgccaattttgcgccgcttaatttagcagcagcaagaccacttaagaagccaatgataaggaacggtacaaagtccatgccaactgagaaccaaggaataaaggtggtagcaaagtgctgaatggctgcgaagaatggcagttgcgctaagctcgtcggcagggcatgaatcgcatcaagcaatgcgggaaccagcgtgaaaccgatcgtcgttttgtaaatccgggtattcttgccaatccaaggatgaagcaagcctaacataatcagcgcaatggctaatggataaagcagcatcaagatcggcgtggaataggcgataatttgatcgagcccaaaattggcaatcagaaaagcaccaatagttgtgatcggaagaaagaaatgatagcccagtttcggaaagcgatgtcccaaatcctgtgaaaaagaggtgaccagaccaatggcagtggttaagcaagccagcagcgtcatcgctccgagcaaggcagtacctataaggccggtgtaatgcgtcataatttgattaaacgcggtgccgccatttgcggtgatcttagaaaagccgaggctaatggcacctaacataatcagcaggatatagatgagtgcttcaagtcccattgccaatgagccaaccttggcaacggctttagcccgactggaagcatgatgtaatcccatcaatttcagcgcggtaatgatggtaacgccaaagcccaatccggcaagtgcgtccatcgtgttgtagccttgtaagaaaccattggtgagattgccggtgataagctttgcgttggcagtgaagctaatagctcgaatgtcgcctttaattaacaaggcccagaagaaaataatggccagtaaaagcaacaatagcggattcagcagcttaccgatgtaggtcgtgattttactttcattgcgggcaagcagaaatgttatcaaaaagaaaataaacgaaaaaatcaacaaaccgatttgctgttgccctttgtttagaaaaggtgcgataccaatagcgtaagtaacagtggcagttcttggcgaagcaattagcaagccgagactggcatgggtggcaagcaggaagaataaggcgaatccatggcctgctggacgagtgagatcatacatactactcgcacgggtgagactaatggccatgatggatagcagcggcagtaaaacggccgatagtaagaatccgatggcagccggtagccaagccgctccggctagctgccccatatgaatcgggaagattaaatttccggctccaaagaacatgccgaataacaaagaaccgagtgtgaggtattgacgtttggtgagcttagcttgcgttgacattgtagatccctccatgtttataaaatcactgcgacactgaatgctgactgtcgggtattttttccataagaaaagcccttaacagtcagaactgttaagggcgtggatcacgctgtaccaccttactttaccgccaacgtcaccgaaagcggtctcgccgcgtacggcctgattcggcgatacgcgattgctgtaatgggcgcaatcccagccattacttccgaagtcgcaatggcaactcgtagactactttccactagataatcagaggtctcttcccaccaaccgagactcgctgacactgacaatccaggtactcttctactcatcgtttttgaaaatctgttgaattgatctttattttacgaagaagtggggaaaagtcaaatacttttttaaaaatatgagttagtttgatgagaaatgtgagggctaatgaggaagcggtacccgttaaaatacccatataaaggcaatggcgctggtgaaatccaaacagttagctagtcatttttctcatatcaagcatgacatggcctgaagttcacgatagtcacgactggctgaaaaaatcccgcatttaaccaatgaacagaaaaaagccctctcgctcacacatagcgaaaggactttctgattttagctaataaattagccaacaacttcaactgtggctgtcatgacgccagctgaaggaatctgtgagttaggcatcgcgacatccagctgattaggattgccgttagcaaaactaccggtgtcattaacggttcgataccaaactgtgccatcggataatgtaatcttcaggcgagtcccctttggaaagacggagagattagctgcgacaccatcgtaacccatgtttgaacccaatacggccggatcatagaagcttaatttaaaggtccctttgttggtcgtggtttgggtcgtgctcgttgtggttgcactagccgcagctgcacttgcattagccgcctgctgggctgcttgtgcctgagcctgctcttgggcagcctgttgagcagctgcctgttctgctgcagctttttcggctgcggctttttcagctgcagcctgttcctcggcagccttagcagcggccgctttttgctcagcaatttgatgcgctgcttcggcgatatcgtttgtgccgactgtgatggtattttctttcttcgggttgatcagtgaataagtatccgcttggtcagcctttacgtcattctttgcctcgttgcttaccacaattgacttagctctaatttgactattgtcactatcattattggcgtggtcagcaatggcttctactttttgtgaatgattacttgtcattcctagtagaggcgccacactgagtaacgcgatgatggataatttgatttgcttagtaaagataaaaattcactcctatattttgaatagtcgtcattttgttcccccgagaacacaaacgaagtatatagggatggtgtgtcaataaaataccagcatcattacaaaaacatctaaattggtaatattgttacgtggatgtaacaaacggaatgttaaaaattttcgtaacaatcactgaactttttcggaaaaagtgggctcaacccttgaagtttctgtgatttgcggcacttttctaccacaatttgtgaattttcggaaaatttttgggtgcctaaactttcgtaagtgggaaaatgttatgctaactttacgtcttcaagtcagcatttgcggacatgaagaatgggtggtcaagaccaaagcttggtatttggtggcttgagatggatggattattattgatattttttattcattataatgtgttcccaggtgcagaggtcagcgtccgaggccgcttacactccggtttctaaccgcgccggctcgcgctcagctttagttaacgagtttttccataatcaggtataatgagacaagacagacgtgaccgatttacttgtaggaacttacaggattttaaatgggggaagcgtctatttaagggaggacttgaatcggtggcaatgtatcgggagaagcggtttgaagaaatcaagaagctgttggcagcgcgtaatgagctcagcatcgaagatattatgaaggctgttggcgtttctcgtgacactgctcggcgcgatatcgttgccttagatgctcaaggtgttgccagacgtacccgtggcggtttggtgtcgttgaattttggccacacgattcccagttattcgacccgcttgaagcgtttttctacccagaaaaccaaaatggcaaaagccgcgttatcgttgattaaggcgggcggcgtctactttattgatgactcaaccacgcttttgaaattgtcacaatcgattcatcatccggtcacggtatatacgcatagcttggacaacgccattgccctttcagtcgaagaacgggttaatttgcatttgtttggcggtaagctcgatcatcatgcacggtttttctttgaacccacgatgctggagactttgcggcgaattgcctttgatgctgcgtttattggcgccacagcgattgccgaagatggcgtgtatttttcttatatggaagatgctcaggtcaaacaagcggcggcgttatcggcacggcaggtggttgtagtttccgaaaccgaaaaattccagatacaggcaccgtatcgcgggttggaacttggacagattgatacactgattactgataagaaattagcgcaaacgcaaaagcagtggttcccgactaagacggacttcttaatcggtgattgataccaacttaagtaaaaaggattgatatgtattcaatttcagcaaataggctatcaacagcggacacgtcaggaggtgtcgccatggtaacgccacttgtgacgatcattgtgccggtttataaccttgaaagctatgtggcgcatggtttaaaaagccttttagcacaaacttactcccacttacagattattgtgatcgatgatgcgtcaagtgatcgctcgccgcagattgtgacccggtttgcgcaacgggatcggcgcattcaggccatcttaaagccggtgaaccaaggtgtttcggcggcacgtaatagcggactggaacaagctcggggtgagttggttgcgtttatggacggagatgactggtatgaaccggacttcattgcccatgccgttgatgtgatgactcagggatgggatctcattgccatgccgttttttcgtgacgatcccaatccacgtccggttcaagaacatctgcgtaaggcgaagcaattgacgagaaaagggctcatccggcagatgctgcaccccattggttatattcgcggctatttatggaacaaagtgtttcggcgggatgtgattgaacgcctgcaattacgctttgatgaacagatgtccattatggaagacgagctttttaccgccacatatgtgatggcaacgcggcattttttgtataccgggcatccggcttatcatcatgtcgtgcgacgggattcggccactcaatcgttaggtgttctgggggcaatcccgcagcagctctatgcgttgtggcgcattcatcaagtgttgcgccatgcccaccgctacgaaaagggtactaaaaaagaagcaattaaaattgaccattaaaacaaaggagtatggatgttgaccgagaatttaatgacttaccgagagctgaagcataaggccaaagaacaactaaagaccgggacgaatcgccgcgatttgatgctggcctatctactgccgagcttgttgcaggcggcagcctcgattgttgcttatttggcgatcttggcggtgattcagagcttcggggtagaaaaaacactgacagatccaaatggctttcaagcgtattatatgcaaaacggcaacaacaccgggacactcaataccattcaaagtctggtgaataccatgctggtgcaaggggttaactttgcagtactggatcttgtccggcatcagacgcgcgttcatccatttcgtgcggtattgggtctttttaacggcaagtggttctggggttcgatttcgttatggatctttacctatttcctgacacttatcggcttttccttcctcattattccaggtgttttgctgatactgggatggcggcaggctttttgggttttcaaagacggacatgaagcagatcaacgtttctcatcgatttcggcattgatcggctcatggcggctcatgcgcggctttaaagctaatttgctcgggttgtacgtctcgttaattggttggtacttgctggaaaatctgacgttccacctttttgactgggcgattaatccctatcttcaactcgtgcacgctaattactatgagaatcggcgtgcttataaaatggcggcgcaagcgtagtccttttggcgtgtctttttaaccgcaccggcgtatactggcggcgtctaagtttatgaaggaatcggacaagtgagaaggatgggtgcttttaccatggaaacagaagcatacatgaccttggctgaagtcaaaagccggcagttggcattaaaacggcaggtaccacttgatcaagcgattgcagagaatattcagaactgggcgcagtggttgttggacgaagggtttgaaggcagttattttactgccaagctagagggggcagctattttgattcgtgatcttaatggacagctagttgcaaccatgacgactgatgcgcctagttatgtggcagcgttcaagcaggctgatcggatgacgatgctcgccattcaaacgaagcttcggcgtttaattgatcggcacgggctaaccttgtcgtgattgagcacaggttggctgacgactaaggctgaaaaatttcatgacagaaaagcagcgatcaaaacaaaataccatccgccgttactaaggtgagtaacggcggatggtatttttcgtgtatcttataaattaaaaaatcttcaagcgatttagcggccaatagcgccatacgacgactgactgaattttggacttatcaacgaatccaaagtcacgactgtcatgcgaaaccaaccgattatctcccatgacgaaatacttgccagcaggtacttttgccgacttagttgaagatagggttttgatgttgaaatcgttggtgaatttaatcgtggaggaatccagcccttgttgactggcccattgattaatttccgttcgtgcaaatttgtgattcaagtaaggctcggcaatggcctttccgttgacgtaaagcttatcgtttttagcgctcaccgtgtcacctggcatgccaatcacacgtttaatatagagggattttggtcgatcaggtgcgtttatcacgacaatatcgttgcgtttgggctgcatgacgcgaacggaataaagccgttcgccgttttccaatgtcggttgcattgacgtgccttggacaacatctttgctgacgacatatttcatgagcagctgggtcgcaaaaaagatgacgatgaagagcacaagaaattcgagaatcgttcttaagacggaatgactgttatttttcacgatggcaccttccggtagagatttacttaagtctaccacaagccttggcgccacgactaaaaagttcgcttgtcaattaatcatatttcgggaaaaaaccgcttttttcagcttgccggcagagatcgacaatctgggcatattctgccagtgtcaaacaccaacgatgcggtaagcttgtgtacccataggctaacccagccaagccgccggttaatgccgcagcggtgtcggttgccccaccaagtgcaagtgcgtgtaagacggcatcgtgataatccggccaagtcgaaagcgcatgcaacacccgaacgagcagacttaaaggatcggttgccgtagcatcaagtgaggtgggtgccgcgagcagagattgaaatgagtcaaaaaccggttgttccgcctgcttattggcaaaatagtcgcccgccttggtgataccggtagcgatggcagttggcaggtccggggcatccgcgagtaattcgatggcgatttgggtgtaaatagccgttgctaccatattctccggatcggtgttggtgagggtgacaaagttttgaaagaggcgactaccctctgcttttttgaatagatctgtgtcaaacgtttgataagcaaaaaaagcaaatggtaaagcgcggatcaatgcccctggttcgttaggggccgccgtagcttttccagtggtcaaagcagttgccacactaggccaaatatcgggattgcgttttccataaggtgcgtgttttccatttttaaaccacgcttggtaagcagcgattagctttgcctgatcaaagccggattgtaaggcgtctaggccggcaagtgtgaggccggtttcatcggaatacgtgccggctggttggttgaaggtgccataacccttcatggtcgtgactggcgcagcagccagatcggcctgcgactgccccttaaccggtaatcccaaagcgtcaccgattgcaaacccaaccgttccgtgaatcaaacgagattccatgatccccatttttgccatctccttatcaaaatactggttcatgcatgtcgcatttcaagcagttgtcaccacaaaaaccgcgatgaggtagtaaataccaccgtctatttaatcggctgatgcagtcattatttctccggagaagcagaaaatgcaaaaaatttgcctcgttgtcaaacatcaagcgctgtgatagcctagctagcagtagctattttcagaaagctgccgtgttgagtgcgttgacggccggtttgaattcggcctgaaaagcatactggcagcgagataacgggcatcgtggggcatcataacagtgtgcggatggtttgaaaagccaataccgcggcgaatgagagtacaagctttttttaagataggcttcggtgatgcttgacgttttttatagaaggagaatgaaatgagtgttttaaccgtaaccgggttatcgcagcggtttttagacaaggtgttgtatcaagatgccagttttcaggtgaatattgaggatcatctcggtgtgattggccaaaatggcgtcgggaaaagtaccttaatcaagattttgactggggccttaacaccggatgcggggaagattatctggcaaaagcatcttcatgtcggctatttggaccagtatgccaatttggtgccgggacaaacagttattgagtttctgcggaccgctttcgatgagctttatcgtaaagaggccaagatgaaccaaatctatgccgattatgcggctcacccggatgatgagcttttagcgaaggctggtgaattacagcaagagcttgaagccggtgacttttatgagctcgaaaccacgatccagacagtggctgaaggcttgggcatcacggcgatggggatggatcatccggttgatgctttgtctggcggccaacgctcgaaactaatcctggcgaaactgttattggaaaagccggatatgttattactggatgaaccgacgaattatcttgatgtttcgcacatcgcctggttgactgattggctccagaactttgaaggagcctttattgtgatctcccatgattttgactttctcgaaaatgtgaccaatgcggtattggatattgagtttggccaaatcaccaaatatacagggactttaaaacaggctatgcgtcaaaaagaagctgaccacgagacgtatctgaaggcttttgctaaacagcaggagacgatcaagaaaaccgaggcctttatccgcaagttcaaagccggcacccgcgcgaccatggctaaaagtcgggaaaagcaattagcccgtatggataaattgacacccccgggtacgcgagccaaggcgcatttagcctttccgtatatgccggttaaccgccaaatgctagtggacgttaacgatctagtcgttggatatgataggcctttgttgcagccgattaatttttcggtggctaaggatcaggtgattgcatttgaaggctttaacggtgttggtaagtcaaccttattgaagacgattctcggtttgttgccagcactgggcggcagtgtcgagattgccgacaatgttacttttggctattacgaacaagaactgcactgggatcagcctaagcaaagtccggttcagtatttgcaacaacgctttccggccttgacccaaaagacggtacgccaagtgttgtcacgaaccgcgttgacaagtgaggaagccaataatccgctaacgatgctgtcaggtggcgagcaagctaaagttaaactggctgatcttatgttacagacaaccaatattctggtgatggatgaaccaacgaatcatctagatgacgacaccaaaaatgcgctgcgaaccggactgcaacagtatcccggcgccgttttactcgtatctcatgaagcaggcttctatgatcattcctgggtcgacacagttgtcaatgtcgaacaattgcaagtcaaagaatgatagcggacaaaggctagttacgatgattaatggcggtgcaacaagctaggacaccaaaatcagacgacacctgagcgaatgcgatggtgtctttttatatacgcgcaataaatgaactgatcggcgggggcacgcttaattcttgggatgccacatcaattgtgtatatgcataggtcaggtgatcggttaccggcatgtgcggattttcatgaccggtcaatgctttagccagacgttccgccgccttgacgcccacaggtaaaccaagttcgggcagcatatcactgacagtcgtttgctcctctaggtggtaagtcagcgtgtgcgtttcaaatggaatttgatgtaagcttaaccaattttgatagccggcaacgcgacttggatcggcttgataagcgactggcatatcgtggcctaaaagagttagagcgtggcgaaccaaagcatcatcttgctgtgtttgaaagttcaggatgactttttttcgcgccagagcgtttaaaagtgataactcttccggcaatagcgttggcagttgactgacaaagacaagatcggcacttgtcgatgaaacaagttgatgccaatcatcggtgagataagtcatgcttgtttttttgttggctttcaatcggatttttgcatatgtaagcatcgccgaagaccagtcaattaaggtgaggtgacggacatacggggccaatcggatagcaaaacggccggtaccggcagcaaggtctatcaatgagtcggctgggagcaacccattagcgatcatccaggtagtcacatcatgggcaagcggtagccgggaatcttgttcagcggcagcatagtctgcggcgaagtgattccaaaaatcacgatcttcctgcataagaaaagaggtctccttttttgaaaaactttttttaaaaaagttgttgacttgggatgggaaactgcgtaatatagtacgagttgtcagtcatcaaacattttaagccgctcagcgatttaaaaaaagatgttgacaaagagttgccaatttgatattctaattaagttgtcgcttggcaacaaagtagtcctttgaaaactgaacaaagtttcgtttaaatgtgcagggtccttgatacttcggtatcgaggcaaaaagtaacatttgcgaagtcaattcgctagaacaacaaatcgagctattcgaacagctcatatttatatgagagtttgatcctggctcaggatgaacgctggcggcgtgcctaatacatgcaagtcgaacgagttctgattattgaaaggtgcttgcatcttgatttaattttgaacgagtggcggacgggtgagtaacacgtgggtaacctgcccttaagtgggggataacatttggaaacagatgctaataccgcataaatccaagaaccgcatggttcttggctgaaagatggcgtaagctatcgcttttggatggacccgcggcgtattagctagttggtgaggtaacggctcaccaaggcaatgatacgtagccgaactgagaggttgatcggccacattgggactgagacacggcccaaactcctacgggaggcagcagtagggaatcttccacaatggacgcaagtctgatggagcaacgccgcgtgagtgaagaaggctttcgggtcgtaaaactctgttgttggagaagaatggtcggcagagtaactgttgtcggcgtgacggtatccaaccagaaagccacggctaactacgtgccagcagccgcggtaatacgtaggtggcaagcgttatccggatttattgggcgtaaagcgagcgcaggcggttttttaagtctgatgtgaaagccctcggcttaaccgaggaagtgcatcggaaactgggaaacttgagtgcagaagaggacagtggaactccatgtgtagcggtgaaatgcgtagatatatggaagaacaccagtggcgaaggcggctgtctggtctgtaactgacgctgaggctcgaaagcatgggtagcgaacaggattagataccctggtagtccatgccgtaaacgatgaatgctaggtgttggagggtttccgcccttcagtgccgcagctaacgcattaagcattccgcctggggagtacgaccgcaaggttgaaactcaaaggaattgacgggggcccgcacaagcggtggagcatgtggtttaattcgaagcaacgcgaagaaccttaccaggtcttgacatcttttgatcacctgagagatcaggtttccccttcgggggcaaaatgacaggtggtgcatggttgtcgtcagctcgtgtcgtgagatgttgggttaagtcccgcaacgagcgcaacccttatgactagttgccagcatttagttgggcactctagtaagactgccggtgacaaaccggaggaaggtggggatgacgtcaaatcatcatgccccttatgacctgggctacacacgtgctacaatggatggtacaacgagttgcgagaccgcgaggtcaagctaatctcttaaagccattctcagttcggactgtaggctgcaactcgcctacacgaagtcggaatcgctagtaatcgcggatcagcacgccgcggtgaatacgttcccgggccttgtacacaccgcccgtcacaccatgagagtttgtaacacccgaagccggtggcgtaacccttttagggagcgagccgtctaaggtgggacaaatgattagggtgaagtcgtaacaaggtagccgtaggagaacctgcggctggatcacctcctttctaaggaaacagactgaaagtctgacggaaacctgcacacacgaaactttgtttagttttgaggggattaccctcaagcaccctagcgggtgcgactttgttctttgaaaactggatatcattgttgtaaatgttttaaattgccgagaacacagcgtatttgtatgagtttctaataatagaaattcgcatcgcataaccgctgacgcaagtcagtacaggttaagttacaaagggcgcacggtggatgccttggcactaggagccgatgaaggacggaactaataccgatatgcttcggggagctataagtaagctttgatccggagatttccgaatgggggaacccagtacacatcagtgtattgcctgcaagtgaatacatagcttgttggcggcagacgcggggaactgaaacatctcagtacccgcaggaagagaaagaaaactcgattcccatagtagcggcgagcgaagtgggaagagcccaaaccgagaagcttgcttctcggggttgtaggactggacattggagttaccaaagttcgacgtagtcgaagtcagctggaaagctgcgccatagaaggtgaaagccctgtaaacgaaacggcggaccctccgtccaggatcctgagtacggcggaacacgtgaaattccgtcggaatccgggaggaccatctcccaaggctaaatactccctagtgaccgatagtgaaccagtaccgtgagggaaaggtgaaaagcaccccggaaggggagtgaaacagttcctgaaaccgtgtgcctacaattagtcaaagcccgttaacgggtaatggcgtgccttttgtagaatgaaccggcgagttacgtttgcctgcgaggttaagatgaaaagtcggagccggagcgaaagcgagtctgaacagggcgcttcagtaggtagatgtagacccgaaaccaagtgacctacccatgaccaggttgaaggtgtggtgaaacacactggaggaccgaacccatgtatgttgaaaaatgctgggatgagttgtgggtagcggtgaaattccaaacgaacttggagatagctggttctctccgaaatagctttagggttagcctcggaggatggatcatggaggtagagcactgtttgaactaggggcccgtcaagggttactgaattcagataaactccgaataccattgatcttactccgggagtcagacagtgagcgataaggtccattgtcgaaaggggaacagcccagatcaccagttaaggtccctaaatttatgctaagtggaaaaggatgtggcgttgcacagacaactaggatgttggctcagaagcagccaccatttaaagagtgcgtaatagctcactagtcgagtggcactgcgccgaaaatataccggggctaagcataataccgaaactgtgggtgcacccgtcagggtgcgcggtaggagagcgttctaagggcgttgaaggtcgatcgtgaggacggctggagcgcttagaagtgagaatgccggcatgagtagcgaaagatcagtgagaatctgatccaccgtatgactaaggtttcctggggaaggctcgtcctcccagggttagtcgggatctaaggcgaggccgcaaggcgtagtcgatgacaagcaggttgagattcctgcactagtttattttgtttaagcgatggagggacgcaggaggctaaggaaagcgcacggctggaaaagtgcgtccaagcagtaagtccggtagcgagtgaaatgcttgccgccttaaggacaagctgtgatggggagcgaaattaaagtagcgaagttcctgatgtcacactgccaagaaaagcttctagtgagaaataaactacccgtaccgcaaaccgacacaggtagtcgaggagagtatcctcaggtgagcgagcgaactctcgttaaggaactcggcaaaatgaccccgtaacttcggaagaaggggtgctgaccgcaaggtcagccgcagtgaataggcccaaacaactgtttatcaaaaacacaggtctctgctaaatcgtaagatgatgtataggggctgacgcctgcccggtgctggaaggttaagaggatgagttagcgcaagcgaagcccagaattgaagccccagtaaacggcggccgtaactataacggtcctaaggtagcgaaattccttgtcgggtaagttccgacccgcacgaaaggcgtaatgatttgggcactgtctcaacgagagactcggtgaaattatagtacccgtgaagatgcgggttacccgcgacaggacggaaagaccccatggagctttactgtagcttgatattgagtgttggtaccgcttgtacaggataggtaggagccgtagagatcggaacgctagtttcgatggaggcattggtgggatactaccctagctgtatgaacactctaacccgcgccactgatcgtggcgggagacagtgtcaggtaggcagtttgactggggcggtcgcctcctaaaatgtaacggaggcgcccaaaggttccctcagaatggttggaaatcattcgcagagtgtaaaggtagaagggagcttgactgcgagactgacaagtcgagcagggacgaaagtcgggcttagtgatccggtggttccgtatggaagggccatcgctcaacggataaaagctaccctggggataacaggcttatctcccccaagagtccacatcgacggggaggtttggcacctcgatgtcggctcatcgcatcctggggctgtagtcggtcccaagggttgggctgttcgcccattaaagcggtacgcgagctgggttcagaacgtcgtgagacagttcggtccctatccgtcgcgggcgcaggaaatttgagaggagctgtccttagtacgagaggaccgggatggacgttccgctggtgtaccagttgtgccgccaggcgcatcgctgggtagctatgaacggaagggataaacgctgaaagcatctaagtgtgaagcccccctcgagatgagatttcccattcctatatggaagtaagacccctgaaagatgatcaggtagataggctggaagtggaagtgcagcgatgcatggagcggaccagtactaatcggtcgaggacttaaccaagtaaagcgcaaactggtgctaagccagcgcgcgcgtttcgatgaaatgcgttaagttccggcaatgcaaaccaacaacaatgatagccagttttgagagcgcaaagttctcataagtgtggtggcgatagcaagaaggatacacctgttcccatgccgaacacagaagttaagcttcttcacgccgagagtagttggtgggaaactgcctgcgagggtaggaagctgccacgcaaagataagatccggtcattgaccggatcttttttcgtaactaataattcaatgcgacggatttgatgaaagcgttgaagaacgcttgaaaacactcattaatgagtgctaaattgcaagagcaggtatagaaacgaggtccggataatgccaacaaatgcgacaaagacaacactaaaatctttgacagccagaggcactgttgttgttgatttttgggcgccgtggtgtggcccatgtaaaatacttgagcccatattaacggcattggaggcggagttatcaggcctaaccattgtcagatacaatgttgaaaaagatccttccttaccgcagacgatgggtattatgtcggtgccaacgttggtggtttatcaagatggtcatgccaaggaaaaagtgaccggtgtctatgctaaggagaaactcaaacgttactttgaaaagaagctagaggccgggcgatgacaaacgtgatgaagcaaagtaaggtgaatgaccaaaatcaggttctagctacatgcttattagcaggccggattatgattgaaggcggttcggagatgtatcgtgtggaagatacgatgcggcgaattgccgttaatgcgggacagccggataccttggtttttaccacgcctaccggaatcttcgccagcattgaaaaccaaccctatattcaagagcgcccgattaacaagcgatcaattgatatggagaaggtcgcccgcgttaatcaattgtcgcgctcgtttgcggcaaaagaaattgatttgggtgatttgcatgcggctttgacgcagttggatcagaataccccgttttttccaatatcatggcagattctgagtgctgccgtggtgagtgtgacgctaatgattctgtttgcgcaaaaatatgattggtttgatatccccttagcagctgttgttggtgcgatcggcttttgggtcgatatcaaggttaatacgatcacgaatatccgttttatcagtgaacttttaggtgccttggctgtcggattaactgcatggattggcgtcaggctgggatggggacatagcctcgataacattatcattggtgccattatgccgttggtgcccggcgttgccattacgaattcgattcgtgatatgttggctggacacttgttatccggcatggtaagaggaatggaatcgattctcagtgcttgtgccattggggttggcattgcgattatttttcgattcttttagtaaaggaggcaggcggtttgtcatggatattcgcgttacttattcagctatcttttagttatttggcaacggtggcgtttgcgattatcattaatgtcccgcgaaaggcgcttaatctcgctggttggtcgggaatgatgggttggttggcatactggctgttgatggaagcaggaatcgggcggatgatggcgaatctgactggcgcatttgtcattgggttatgcggcattttttttgcccgctataaaaagatgcccgtgattatttttaatatcccgggatttgttccgcttgtgcctggcgcaattgcttatcaggcagtgcgtgcagtcgtgatggggcaattgaatgccgccttgcgttatgtgagccgcgtcatcatgattgcgggtgcgattgctgttggcttcatgttggcgcaactgctgtcggaattattatacagacgcgctgttttgaaacccaaaaagtgatacaatactcatatgcgatgagtcgagtaagcatgtatcaatgctgaaagaagcagctgacaggttaagagccacccgccggatttgtggggtcagcgatctcaaggttgtggagccagcgagatcctatccaagtttttggatactgcaagaggcagtcagataatttatctggctgctttttttaagtgctcaacaggacagcttgtttttaatttgttttttaaaaagttttcccacgagcaaatccgttatttattaataaaattatcagaaatagcgtgcaattttcccgggtgaaaatcggcgtgaatataaatagattttgcttcatgatacagacgtagacgcctcgacataaacgactatcaaaaagtttaaaatttaagttgactttttaagtgaaccagattaatattctaaccaatcattaatcttacttgaaagaaggcgggtctatgtcagtcatgtgtatgtcagcaggcacgatgtctgttggggttattaatcatttagccttgttgctgatgtcagggacccgaccgtttgatcaatagcgatcagcgtatcgagccccgtcttcgcattggcaatggggcgctgatacaggcacccattcgttggaatgggtgctttttttcttcgagattaatgacaattcgcggatagacgcaaagggggaaccaaaatggcgaaaaagtttctaaagacgattatcagcacagggatgattgcggcatcagtattggccttatcaggatgtgcgaccaaaagtgctgcgaataagggtaacacggcgggcagcaccattaagattggggtcaatatggaattatccggggctgtagctggctatggcgaacaggaaaagcaaggcgttgagttggcggtcaaacagattaatgcagcaggtggcattaaggttggcaacagcaagaagaagatcacggcgatttatcgtgataacaagtcctcaaccagcggagccgcatccgttgctgctcagttggctaatagtgataaggcggtcgcaatcgtagggccggcaaccactaacgacggcacggcatccatcccgaatgtaacaaaggctggggtgccaatggttggaccaagcgcgacggatccaaactttaccttgcaaaaaaatggcagcgttcaaaagtatgttttccgcgcttgcttcaccgatgccttccagggtgaaaaagcagcagtctttgctaacgataccttgaaagctaaaaacattgcaatcatcgctgataactcgactgattacggaaccggtttggcaaaagcattcaaaaagaagttcgccggcaaagtggtcgcgaccgagtattatcaatccggcgataaagactttaacgcgatgctgacgaatatcaaaaataaaaaaattgatgccatttacgcacctggctattattcagagcttggccttgtgatcaaacaagcgcggcaggcaggcattaaggtgccaattattggtgccgatgggatggctgatccaaaacttgccaagattgccggagccgaaaatgcaactgatatttattacaccacgccattttcaacgttgagtgcaaatcgcagcagcttggttaagaacttcctggctaactacaagaagcaatacaacgcaaatgccccgacgttctcggcactggcttatgattcggtttacatgatcaagcaagcgattgaagatcaaaagtctgctgattcggctagcatcgcaaagggcctagctaagatcaagaatatgcccggcgttactggtacgacgactattgacagcaagcataatccggaaaagccgatcgcggttgaagaattgacacaaggcaaaatcacaaaggcgtatacggttaaataatgcgcctgttggaattgcaaaagggggttacatcgcttgcagaccatgatgcaacaaattatcaatggactttcactcggcagtatttatgccttgcttgcactgggctacaccatggtctatgggatcatcaagttgatcaacttcgcacatggtgatatctacatgctcggtgctttctggggctattacgcgattaattatctccactttgggtttgtgacggcgctattgtcagccatgttgatggccagtctttcaggggtattaatcgaatatctggcttatcgcccgttacgtaactcgccgcgaattgccgcgttgattacggccattggggtttcctttttccttgaaaatgggatgtcgtttttgtttggcgcgaatgctcgtaactttccacaagtcatcgcgaccaaaacgtatcatctcggcggggtggatatttcaaacgtccagttgttgattttattcacttcgctggttttgatgatactgcttcaatttatcatcaaaaagacaacgatgggaaaggcgatgcgtgcggttgcggttgatccgcaggcggctcagttagtcggcattaatccggatcacgtcatttcctttactttcgcgttgggatcggcattggccggggcggctggtgtcatgatcgggctgtattacaactcaattgatcctttgatgggtatggtaccaggcatcaaggccttcgttgcggcggttgtcggcggtattggctcgattccgggagcggccatcggtggtttcttgattggtctgcttgaaaccggtgtccaggcaattggcttgtccgcttacaaggatgcggccgtttatctggttctgattttagtcctcgtcgtcttaccagccgggttgtttggcaaacgtcaacgagagaaggtgtgagctgatgcttaaaaacttacgcagcaaattaatctggttggcgatcatggtggctggctttgtcttgatcgatattggcgagtttaccggaatcgtcaacagtttcattgaaaatgcgctcgtcacgatcggtatcaacattattttggcagttggcttaaacctcattatcggcttttccggtcagttttcattgggtcacgccgggtttatggcaatcggagcgtatgcgactgctattgtcacgcaaaatatggcgaccccgcttggcttttaccttgccatgctactggggatggtgattgccgtgattgccgcgttaattgtcggcattccgaccctgcgcttgcgtggtgactatctggctattgcaacgatgggggcagctgagattattcgcgttattatcaataatctgaaaatcaccaatgggccagcaggcatgttcaatattccgccgcttgcgtcttggcccacagtatacgtgttgatgtgtgttaccaccgtggtcattgtcaactttgtgcatagtcgctcaggacgtgcgatcatggcgattcgcgatgatgatattgccgcagaatcgatcgggatcaacccgaccaaatggaagttggccgcgtttgtgttaggtgccgcaacagctgccattggcggatccttacatgctagttatttgcagaccattgcaccgggcgactttggcattatgaattctatttcactcttgattattgtcgtgctaggcggtgtcggtagtatgactgggacgtttgtggcggcaattgttctaggcgtgatcgacacggttttgcagaacttcgggacgttgcgcatggtcatctacgcgttggctttgattttgttgatggtctttaagccgtccggactactggggcattatgagctttcttttagccgcaaacggcgcgcgcgaaaggaggcggcgtcatgaccaagcaattggtagtcgagcatgttagcaaagtctttggtggacttaaagcagtagcagatgtcagtttaaccattgatcaaggttccttgattgcgttgattgggccaaacggtgccgggaaaaccacactgttcaacatgctgaccggcgaatccggaccgacaaccggtaaaatcacacttaacacagcaaccggtgccgtcgatattaccaaaaagaaggcttttcaggtggctaaactaggcgttgcccggacttttcagaatattcgactgtttggggcgatgtcggttaaggaaaacgtcttggtggctagaacccacctgtatcacgaaagttttctgggaacggttttgcgcttaccgcagttttatcaaaaagagcgggcagtcggaatggcggctgatgaattgctcacatttttcgaactcaatgatgtggctgatgaaccgactgccagcctgccatatgggacgcagcggcgggtggaaattgtgcgtgccgttgctactaagccgcaactactttttctagatgaaccggccgcggggatgaatcctgaagaaacggctgatctaagccgcctgattgcccgggtgcgggaacattttggcatcacggtggttttgattgaacacgatatgtcactggtcatgaatctggcagagtatatctatgttcttgatcatggagcgatgattgctgaaggtacgccgcaagcgattcagcgcgatccgcgggttatcagtgcgtatctgggaggtgaggtgcatgcttgatgtcaaagacctagtcgtcaattatggcggcattcaggcagttaaaggggtcagctttcgcgtgcaaaccggcgaaattgtggccttgattggggcgaacggggccgggaagagtacgattctaaaaacaatttccggattgttacggccgcgttccggcaccatcctctatgaagacaagaatatcgtggggatggcagcagccaaaatcgtgaaaatgggcatctcgcaagtaccagaaggacgccacatttttgccgggttgacggtgagtgagaacttgcagatgggggcattcggactaaaggacaaacaagtcgccagtgatcaactggcggtcgtctatgatcggttcccggttttaaaagaacgtcgcaatcaagacgcggcgaccctttccggtggggaacagcagatgttggcgatgggcagagcgttgatggcccggccaaaattactcttactcgatgaaccttcaatgggcttgtcaccgatctttattcaggaaatttttgatattattaccaagattaaaagccaggggacgaccattttgttaattgagcaaaatgctaaacaagcactggccgtggctgaccgcgggtatgttttagcaagcggcacggtgaagttaaccggcaccggggccgatttgctggcagatccggcagttcaggcgacctatctgggagcgcaaccggcgacctgaggcagataagatgttattttgcagacgagcagcgattggagctgctcgtcttttttataaaaaaattgtatcgattggtgtacgcgtgtagcatgatatcggcagagcaaagacatcaacaccatcgcatctgctttggtacccttgaaagggaggataaggacttgaacttaatcgcgcaccaacagtggctggtggacttttacgaaaagcgccactggtatcaatattcaccgttcattcggctcaactttctcacggaggaaaccggcgaattatcgcgggcgatacgagccattgaaattggccgtgatcatccgggcgagccggttcaaaacgaagcagacctcgaggctaacttgaaagaagaactagcagacgtgttggatcaggttttaatcttaagcgctaaatttaagatcgatcccaatgatttgttggcgcaaagtgaacataaattgaaggcgcgttttaagcaagatgtttgagccaatgtgattgcgtcaatgagcggtggtcacttggattgtctgaaaagtgtccatagaaaaacggttctggcaaactgatgccggaaccgtttttgctgggagcctgttaggggtgattattgattttgccccccatcgcccggtgctggaccaacaccgcggccgctaccgcctgttcccggacgaacgccttgttgatttggtgttgcaaccatgtattgactaatcagactaacaatctgtcggttttgcggcaaggcgctatggttggcatcgtcgcctgagacggtaatctgggtataatgggcaacctgattttggaaaatatacttaccggcttcgacactttcgatcggcaccgtgccatcgccatccaacgtttcggttccggcaatcgagtaaacggttagactgctcggaagtttgttgcgactggttataaagtcattgagcatctgtgtccggttatccggattactttcttcgaggttatacggagtgccaatggtcattagccgagtcatttgaacatctgaatcgttgtaatatttttctagaaaaagcgtgaaaatgagtccgccattactgtggccgataccgcggaaccgattgaaattgtatgtcttggccagctgcttaaacgcgatattgaaccattcggcctgcttcttaatattgttgtaaccatctttattattttcaaatgccacaacgatataaggttcggtatcacgggctgcgattttgccactataggtcatggtgccatttgtcttcaccgtgatctttaaaagactatgaccggttgtttgcgcattgagttgcgtgattaacgtgttaaaacggtcttcggtggccgaactccccggaattaagataattggctgcattcgggaattgtgaactacacgcgcagatttaacgttttgcgccatccactgagttgcgggaaacacgacagcacccattgcaagtacgctgagaacaagcaaaagccatttgcgccaatgtttaatcatgatgaccacccacttttgccgattcaagattgatggtttcggctaaccggacaaacgggacataaatgaagactgaaatgaccagacacaagactgcgactaataatgcgacaagattgccattggttcccagaaacgcgattaaaggtcccggggttgtcgccgggaccgtgtaaacagaaggcggcataagatgcagtctgatggcagtccaggcaatggccatgttgatcagcggggtgattaaaaacggaaccagcatgatcgggttaagcatcaccggccagccgatcagaaccggtgagctgacatttaccaaacccggaaacaacgataacccggcgatgcgacgtgatgcctttgaccggccgacccagagcgtggcgataatcaatgctaaggtcatgcccacaccgccaaagctggcaaacggacgataaatcgtgcccatcgtgatcggattgggaacgttaaataaatcggcatgttccaacgcataattcaaattggcggtcgccgtggtgctgcctgattgaaccatcaacggattaatcggaccttcaatcccggcccaccacatcaaagcattaatcgtcgtgacaagtgcaagtcgcagtgaaacgtgggttaagtgagcagccgggaattgaaagaccacgtaaaagaggcccacaaacccttctgttgaaacaaaaccgagtccgtaattaatgaccacgcagctaatgagtatcaggagcatcatccaggttccccgtaatccgcgactgacaagcccggcgatggtatagcgatgtgaaggttcttctaaatccgcccgcgtgaagcgaaaaagccagccaatcagtaacccgaagataatcgcaatgaacaagccgcgatagcccagattgttcatttgaaaaactgattgggcattccggcgcgtttcaagattgagaattaaaaaggctccgacgcttgtgatggcagctaaagaatcgtccttcttatacgatcgtgcaacatacttggcaacaaaaaaggcagtcataacggccattaagttaatggtgacattttcgatggcgatcaggagtgtgcgcatctgggtataaaaaggaatgaccttgttgagattataaatgacggcaaaaaaaccgttacgcgaaaaaacactcagctcaagcatttgtgcccatgcgccgatcacgacgaacggaaaaatgacagcaaaagtttgttgaagggcacgataagttcgagtttgccgcagccgaacactatttgctacgagcatcggaagcaatctttttgtgagattgctcatgactgccatctcccttgatttgttgaacacctattactgttattctaacaaatattattgtaatcgagtagttttatgacggacaggacggcgagtttggcaaacgagaagatgacacattgacgaacgtgactcgagcaatggcgatgtgggttcacttgttacttttgttgcagcgtatgcaagtgactcgttaccatggtatccttaaagctggaaagcaaaagacgttaattagaaagcgcgttcataaaggcagtatcgctattcttgcgccacgtgaatacgcgcgtctaaagcatgatggaggcataaaaatggataagccattggcaaagtatattgatcacacgttattaaagccagacgcaacgcaagcccagattgatgtgattttggatcaggcgaagcaatatgattttgcttcagtgtgcattaatccttattgggttgtgcgggcagcagccagtctacgcgacaccgatgttaatgtttgcacggttattggtttcccacttggcgctaacacgacacagaccaaagtatttgaagccggtcaagcagttgacgaaggtgctaaggaagtcgatatggttttaaatatcggtgaactgaaagctggtcatgatgatcatgttcgcgcggatattcaagcagttgccgacatcacgcatgcaaaaggcggcattcttaaggtcatcattgaagcagttctattaactgatgatgaaaaagtgacggcatgcaaactcgcagctgcagccggcgctgatttcgttaaaacgtcaaccgggtttgctgcagggggtgcgacggttcatgatgtcaaactcatgcggcagacagtcggtgatcaattaggtgtcaaagcggccggtggtatccacacctatgctgaagccaaagcgctcattgaagccggcgccgatcgtttgggtgccagtgccggcgtgcagattttaaaggaagcaggggaagcttaagatggcttttgatcgaatcattaccattgtcttagattcaattgggattggcgaagcaccggatgcggctaaatatcacgataccggtgccgatacgcttggtcacattggcgattattttgccgggaaattatcgttgcctaatttacaggcaatcggtctgggcaatattgaccgccctacgccaattgctggggttaagccattagggagtccgagtggctattttggcaaaatgtccgagatttcagcaggtaaagatagtatggacggtcattgggagatgatgggtctgccggtgacggaaccgcttggctattttcctaatggattcccggaagacttgattaaacaaattgaagaattttccggccggcatgtcatcttaaataagccttattccggcaccgaggcgattaaagactatggtgaagagcagctgaaaaccggtgatctgattgtttatacgtctggcgattcggtcttgcagattgcggctcagactgatgttatccccttagaggaactgtatcggatttgccgttatgtccgcagcatcacgattgacgccccatatcgcatcggccgggtgattgcgcgaccgtacgtgggaaccgatccgacaacctttacgcgtaccagtgatcggcatgattatacattgaaaccggataagcccactgacttggatcgcttgcagggagccggtgtgccgacatatggcattggcaagatcaatgatattttctccggacaaggattggatgatggggtgcacacggttagcaacgtggatgggatgaatcaaacgattgccgccgtaaaatccgatcgcaaaggctttattttcaccaatctcgtggattttgatgccatgtatggtcatcggcgtaatgctcaaggcgatggtgacgcattaatgacgtttgaccaccagttaggcgatttgttgacggtgttgcggcgtgaggatttgcttatgattacggccgatcatggtaacgacccgacatttcgcgggacagatcatacgcgcgagttcgtcccgttactagcatatagcaaggcattagccggcaacggggatctgggtatccgttcgcctttttccgatttaggggccaccattctcgacaatttcgaggtcaccgggaatcaggtagggcaatcgtttttgagtctgcttcgctaatgaggctaggatccggtagttgtagttgcaatcaatccggatgatgacgggtagctatctgacggttgtcacttgcttgtcgttcatttgtcgacccgaatccaactaagggggaattttcatcatgagtacacatattgacgctccaaaaggcgctattgcagatgttgttttgttaccgggcgatccattacgtgcacaatatattgccgaacattttttggaaaaggctgtccgctacaatacagtgcgtaatgcctttggttatacgggcacctttgaagggcgacggatctcagttcaagcgacggggatggggattccttcaatttcaatttatgttaatgaacttattcaggattatggcgttaaaacactgattcgagtggggactgctggtggtatgggtagcgatgttaaggtacgggatgtcattctggtacaaggatcatcgacagacagcagcatcgttttgaatacgtttggggcggggatgtattttgccccaatagccgactttcagcttttgcgtgaggcagcaaatttggcagacgctggggcattgcgctaccatgtgggtaatgtgctcggagaagatcgcttctacaacgatgaaatggatcgtcaaaagctcatcgattatggcgtgttagccaccgaaatggagacccctgcactatatcttctggctgcgaagttccatgcacaggcgttatcaatcctcaccgtctcaaatcacctgatcacgggtgaagaaacaacggctcaagagcgtcagactagctttaatgacatgatcgggttggcactgggcgtcgctaaaaagattcctgtacgttaaataacgtataagttgaaggcatacccgtgtaaaatgacggtttaaaattttccggaaatagcaaattaatgtgcgaagaagtaggaaacgtgttattctgtatatggtttcttaagaaaaggtaaatgcaaattaaagtgtaaatttagattcgtgcaattattcagtttagaaatggaggagtacatacatggtagattctaagaaagtattgtcagtaacggcaggcttcgttggtgctgccggtctggcggctttagcaaccggagccaataccgtttctgcatcgacagggacggtcagttacaaatccggtgcgaccaccgtatggaatagtccatcatggcaccaagtcaaacgctacgtgacttttggcgacacggtgcagctattaggtaaaaccgttgaccaaaatggtgctacttggtataaagttggcgacaatcagtggattccggaattgtatttgaatgttgcgggtaaaacggccacggttgaaacaccgagttcggcagcaagtcaaactgctgtcagccaagcaccggctagtcaggcgcctacaagccaagcaccagcaacccaaacacctgcagcaccacaaaccgatacccaaacagctaatacacagctttatgtcaagaatatcggttcagcagttaccgtatggacaaccccggcgtatactcatgcgacaggtcaatatctagaaggcagccagacactgacggctgttgcccagcagcaagcaaatggtgaaacgtggtatcggcttgccaacggcggttatgttcctgcacggtttgttagcacaacgccagtggctgtaacaccacaacctgcagcgccacagtcaaatgaggccagtgttgcatcaacgaacaccaatgcagctaatgattctgccgctgcttctagtgcagccgcatcgcaagccgcagcttccagtgctgccgcttctacagcagcagctaatgcagcagtagcatctgcaaatgccattgcatcacaagcagcggcttctgaagctgctgcatctcaagcggctgcatcacaagccgcagcgtctcaggctgccgcatcacaagctgcagcgtctcaggcggctgcatcacaagccgccgcttcacaagctgcagcgtcccaggctgccgcatcacaagcagctgcaaatgctgcccagcaggcgccggctaaccaggcaaatgttacaacaacacaggttaatgccaatcaagctcaacagcaaaccgcgacggctacaccagcagttaacacgtctaatcagacggcggccgtaagtgcttcaagacaggccaagattcaagcagtgattgccattgccgaacaacaagttggtaagccatacgtttggggcggtaaggggcctaacagctttgattgctccggtttgatgtattacgctttcctgaatggcgctggcgtcaacattggtggctggacagttcctcaagaatcttcagggacacaagtttcactgagtgctttgcaacccggtgacttactcttctggggtagtcacggttcaacctatcacgttgccctgtacatcggtggcggcacgatgattcaggcgccacagccaggtgaaaatgttaaatataccgcgctggcatacttcatgcctgactttgcggttcgcccgtcactataagcttaatgatcgaatgaagaatgcaagaacatctctgagtcgttagaggtgttctttttatattaaaaaaccagacagttccgcggctcttagtggctgcatgaactgtctggttttatatacatgacaaaatattcgtaaagcgagttaggctaccggtgttgtcgttttctttttagccttggcaactgccgccatagctacggcgtttacccagttaatcggctgatcgaagttaggttggaagagcatgtcaaccatcgcaagtgtttcgatcgtcatgtgggtctggatcgctagcgaaatgacattagcgctttggctgatatcgtgcttggagaaaaaggcacctcctttaacttcgtgcgtcttgggatcccatgtcaggctgcagagcaccggcgttgtggttaacatgaaatcgggacgataatcctgttcgatcgtgacactatcaagctcaagtccacgtgcgtgagcgccttccaccgttaggccgcttgccgcaatggcgtgatcaaaaagttcaacagccgagctagattgtgttcccaggtatttttccgtgggggtcatgatatttttaccaacaagaatgccctgacggactgcgttggtcgcaagcgggatgtagtcatttttgccagtcggattatagtggacggtagcggtatcaccagcagcgaaaatgtcggggtcactggtctgcatatatgcatttgttatgacagcgccattaggcagggtgtccagatggtcctttagcagatccgtgttcggacggaagccggtacataaaattgcaatatccgcggtatagtcgcctttattggttgtaaccttgataccctgatcagcttgtgcgaactcggtaaccatctcattgagtgccaagtgaaccccgtgatcggtgtaaagcttttcaacgcgatccgtgatagtggcgtcaaagtttttcgccaaaacccgtggaagtccatcgattaacgtgacttctttgtcggttaacgcaaattgttcggctaattctgcaccgatgtagcctgcaccgatgacaatggcgcttttaatggacggggccagatcttttagcgtcttggcgtcggaccaatttttgcataagtagacgtttgaatcgtgaataccgggaatatttggaatgattggcgtcgatccggttgtgtagactaatttgtcataagtatcggtagtaacggttccggtttttagatccttgacttcaactgttttagttgctggatcaatattgagcacgtcatgttccatttgcatattagcaccgagtttagcgagtgcttcgggactggaatagaacattttatccgggtcactgacatgatcaccaacccacaaagcaatgccgcacgagaggaaggacaggttgttattgcgttcgtagacagtaacctctgcatctggatggtcggttagaatctgctgggttgcaaatgtaccggcatgggtagcaccaatgacaagaatcttcatatcgcaatcgctcctttaaactattgataaaaatttcacaagtgaattataacataattgattgtgtcatgctatattgcttgcgatttattttgtgaagaaaaagttaagaaacgctttcaaagcatcgagatcctgtcattcccaatggcacttactagttaagacgatgttcttgataagggtaaatttttatgagggatttacccagtactgtttatttttgtttatacaaacaggccttgaatcttggcttgaaggcgttcttgatttaaaagtgaaagaaattggaaaaaattgttcattaagcgtttacattgaagcggttacatggtatagtcattttgttgaataaacatgcacatgtggatcgttactattcaattaggcgtaaccacggtagtcgaagataggaaaatatcttcggctaaccgtggtttttctttgccctttttctacgcagccatatacgagcagcacgctttcatttatctggatcgcgaccggataaagtgacatcaaaaattatccaggaagaaggtttaactatgcaagtcattgttaaacgacttgagaaacatcaggcgttgtttgaaaaaatctcgcgtaatatttacctgatggccattaaagatggttttctggcagcaatgccgattattctgttctccagtattttcattctattatcaaatattccgccactgattgggattaaggttccagttgatctcaacgcatggttcaataagatttataactacacaatgggttttgttggtttttatgttgccgggacgacagccaaggccttaactggatcgatgaatcaacgaattaaaggtgggcgctttctcaacaatacgtcaacgatgatggcttcaatggtaggattcatgctgttggcgattggcaccaccagtaaaggcaacttcttaccaacattctttggcacacaagggattttgtctgcctttgttgcagcgtttgtgactgtttgggtctacaaattctgtgttgaacgtgatttgaccatcaagatgcctaaagaagtgcctggagccatttcccagaacttccgtgatattattccgttcggtgctgcaactttaattttttcactcattgatgttgcctcacgtgcggcgttgaaagtgccattcagtgctattattgcgactgtgcttgcgcctgtctttaaaggtgctgagacatatcctggcatgatgtttatttggttcttaatcccgatgttctggttcttgggcgtacacggaccatcagttgtcaagccagctcttgaatcagcattgtttgggaacaccaccgccaatttggacttgtttaaggccggaaactttccatatcatgcactgaccgaaaattttggtaactttgttggtgaacttggtggtaccggggcgacctttattgtcccgtttctattcatgtttttcatgaaatcaaaacaattaaaagcgattggtaaagcatcatttatccccgttatgttcgcggtcaatgaaccactgctgttcggtgcaccaatcatcttgaatccttacttcttaattccgtttgttttggccccagtcgttaatgttgtaattgggaaggcgtttattgatttccatatcatgagaggctttatgtacttcatgtcgtgggcattgcctgggccgattggtgcattcatcgataccaatttccagtggacttctttgctgcttatggcaattttgctaactgtggatgcgctgatctatatgccatttattaaagcgtacgatgctgaactgcttgaacaagaagctgctgtcgatgccggcactgcaaccgctgcagcaactgctggtgcaagtgaagttacagctgaagcagatgcagcaacggcacaagaattcccagaaccggaagaggtaaagcaggctgaaacagctaagcaagaggaagctaatcaaaatccagctgcaggaaagaaactcgatcatgagttgaaagtattagtgctatgtgctggtggtggtacaagcgaacaattagccaatgccttgactgaaggcgctaaagagtatcatgaaccaatcgttgccagtgcaggtgcatatggctcacatcatgatattttgccaaactatgatctggttgttctggcaccacaagttcgaacctactacagtgacttaaagcatgatacggatcgtttggggattaaacttgttgcaactaaaggtcaacaatatatagccttaacgcgtgatcctgaaaaggcattggattttattgttgaaaattataaggatgtcgaaaagaaaccacaagatagttcagattcaaagtaaatatgttgacttaatttaaaatcaagcgaaaagaaaggtaaggcggtgtatcgatgttgctaaaggtcaagcaagtctataacaataatgctgtacttgtagacgttggcaacggtaaagaggcgattcttcaggggaaaggaattggtttcagcaagcgtaaaggtgatgacgttgatccaaaagcgagttcggaaatactttatctaaatgatacgcaagtcaaaaatcactttacatctttactcaaagatgtaccgattgacattgttgttgctacatttggtgtgatcggaatggcaaaaaagaagtatcactatccggttttgaactatatttatgtcacacttacggaccacgtctttcagatgtataaacgattgactgccggcaaatatcaagctagtccagcgcctgacatccgtgatcgttacccgttgccttaccagatcgcagccgatgcgcgccgacagcttaaccatgatcttggcgttcagtttcctgaagccgaaattaagaatattgccttacattttattaatgcaaagggagtggatggcgaactggatccgaccgtgaccctgacggcgcgcgtcaatgcaatcgtgacacaagtatttgctaaatatgggttaaatcgcaattttgctaatcaaaattacttcgatcggctaatgattcatttgcaataccttgttgaacgtttaaataccaatgagcaagacgaggctgaccttggtccggaaattggtcaggacttcaggcgcctttatcccaaatcgtttacgatcgcaactgaaatttgtacggagctggaaaaagccttacaaattaagctcaacgaaaacgagcatgtgtactttattatccatattcaacggctcatccaagaaccgcaaacacttccgcctgaatatccatagccgtgggtgggagtttagaaagtaatcttggcttagagcgatttaggcttaagaaatcgctgctagcgtagaggattttcaaaccaagggaggaattttgatggcaaccaaagaagagatttcaatgaccggttttgcaattgttgcttatgccggtgatgcgaaaaccgatttaattgaagcattgaacgaggctcgtaaaggcaacttcgaacatgcccgctcacttgttaaagaagcgcgtcaaagtatcgatgacgcccataatgaacaaaccaaactgcttagtaaagaggcaggcggcgagaatatggatgttactttcatcatggttcatggccaagatacgctaatgaccacgatgatgctgctagatacgattagtttcacgattgatgagtatgaacgactggcggcaattgaaaaacaattaggcattgcattgccaacaaacgatatccattaaagtatcaaacgaaaggagtatcattgtgacaagtttattgaatcgcgttcaatcactgcctaaaggttttgtttggggtggagcgactgctgcttatcaggtagaaggcgccaccaaggtagacagtaaaggcaaaaccatgtgggatgactatctgaaagctcaaggcagattttcgcctgacccagccagtgatttttatcatctttatccagaagatattgaactcgccaagctctatgggttgaatgctattcgggtttcgattgcctggacacggatcttcccagatggttacggtgaacctaatcaagctggggtcgcatactatcatcgtttgtttaagtgctgccttgataacggcattaccccgtatgtttcgctgcatcacttcgattcacctaaaacgctgttcgatgatggggattggctgaaccgtaagaatatagactattttgtcgattatgtcgatttttgctttaaagaatttccggaagttaagaactggttcaccatcaatgagctcatctcgttagccttttcgcaatacattcaaggcaacttcccgccaaatcatcactttgatgttaccagtgctattcaagcgcagcacaacgaactgttagcccatgcgcgcgtggtcaacttgtttaaggaaaaaggctatcaaggacgaatcggattgattcatgtgctgcagccggtatatccgtacccggatacaccagctaatgagcatgctgcggcacttgaagatgccttcatgaatcggttcctgctggatggtacgtttaaaggcgaatatacgcccgaaacgatggcgttgatcaatgaattgctgaaggccaaccatgccaagcttgaaatcgaaccaggcgatatggatgtgttgaagcaagcgtccacgcaaaatgattactttggcatgaattactatcaaccttcttttgttgctgcctacgaaggtgaaagcacaaattcgtttaatggtaccggcgaaaaagggaccagttcctttaagttccaaggggttggccagcacgtcaaaaatccggatgtgccgacgactgattgggactggaatatttatccggctggcatgtacgacatgctcaaacgagtagctcgcgaatatccaaatagcaagacgatttacattactgaaaatggccttggttataaggataagtatgaaggcattggcaacctcattgaagatgacaaacgcatcgattttattgatcaacatgttgctgcgttactaaaagcccgcagtgaaggcgttgatgtccaaggttacttcgtttggtcgctgcaggatcaattttcatgggccaatgggtataacaaacgatatgggttattctatgtcaactttgaaacccaagcgcgcgaaattaagaagagcgcactgtggtttagagaattaggtaaaaccttaaaaaattaaagagacatgcaaaaacaggcattccaagttcatctggcgtgcctgtttttgtgttgcttcaagtggtcgcggtgctggccagccacctgccaatcatttccaaatgatgcatcaattggaacttacgtacaactcccaaccccgggaaatgatgctgcgcggccgctgccatcaaagctttcgttccgagcgtctgtgcgtcgggatggtgtggtaaccacgcagccagctgcaccagaatttcaaaaaatttggcttgcgggttagtgaagtcgtcattgttgactgaaacaaaatggtgcaggcgcagggaaccatcagctgccgggtaaacaaggtggatggctaaggcgcgctgcggatagccatgctcgaaataatcagcagtggccagcgggtaatccgcaaagccgatgcctggcaacatcaacggcgggtattggtaaaactcatcttgcagcagcccataatcagatgtgtgtggataaacggtgaagtgatcatttaaataaaccgcgtgtggcaaagctaactggcgcacccgagcttcatcaggcaccaaggccagctgacggcgcggcaataatttggcttgggcggctgtggtcgcaataatcaaaggcgctggttgggcatcaaaaatccgcgcctgctgaacggtcccactgatgttcggtaaatgacgcggggttgccaataagcgatacgtcccgacttgcgggttttgaatcacataagcggcatgctgggctcggctaaaggcacgggtagctttggagacgccggggatgtctttaaccggctcaagaattggcgtgacggtggcgggcaattgctggtgggtggccaattccgagacggccgctaagtcgaattgtttgccgcggataattggaaaatagttcatgataaccgagccatttttaaagttgcgagttcagccgtcaatgcatcgatttcttcttggagcgccgtgatcgtggtattgttgagttcatcgacaaactggtcataaagatttttgtcaggatgataaatgtcataatctgccgttcgtttacgcagttccgtgaacaagtccgcggtcgaaaattgcccgagtcccttgacaacctgcttggctttgacgacttcacggttgagactggcaatgaagcggtcggtgagctgattttctggtacttgcaaagtctggcggcgcgcaggtttggcaatcgtcaacgttcccggcgtcaccaccggcacggcacttgctttaatagcggcttttgaaaatggctggtagaccaacacgccaatcccagccggaatttcggcagatactgctttgtaaagccgttggggcaaaacaaaatagttataatggccgacaaaactcagttgggcatgactatgaaaatctgctttagtgacttttaattcaaaacaccgccaaatcgtttcggactgctgtttttgccgcacgagggtatcgacaataccgaagtcgtccggcatcgtgacttcttcgaccgcagtagcgccttgtgcttgccaataagcgtaaagtgtcctttctaagtcacgcgtgagttgggttttcatgatgggcctcccaaaagtgtgtcagtaattgcgctaattgcgtgggattgtagctaatctgggcgtgggtccagtgatcaggaaacagacgggcataacgcggggtgataaagcgttcatcaatcagcaggatcacgccgacatccttggctccgcgaatcacccggccacctgcctgcaagacattgttaaagcctggcagctgataggcataggcaaagccctgaccagcattgtgatcaaaataagcccgcaactgatcggtttccggattgatccccggtaagcccactgacacaatcgccaccccaatcaattgcgtccctttgaggtcaatcccttcagcaaaaatgccgccaagcacagcaaaaccaatcaccggctcactaccagccttaaagtgatcaagaaatgcttgccgctcactttcattcatggcattttcctgaacacaggttttaagatcgggatttgctgcagtaaacgcctcgtatgccattttcagataggcataggatggaaaaaagaaaagataatgcccggcttcagccctgaccagcgtggtgagacttgcgatcagcggcggtaaatcctgcgcgcggcggcggtacgtggtgtggacactcgcatcgacaatgacggcctgattgtccggcgtaaacggtgatggcaaggtgtaagcaaggctatgttcagcgcctcccagtaacttttggaaatacggcatcggggacaaggttgctgaaaataaaaccgtgcctcggccttttttcaaggcatcatcgacaaaatgggacgggtccagacagagcattttaatcataatcgtgtcatgttccttggcaatctcggttttgaaggtatcgtcataaaaatcaccaatgcgtaaatactgattagcgagaaaaaacactggtaaaacaagttcgacagcaggctgcaacgcgggggtgggcggttctgccagccagtcgtgaaccgtttcggtaaaccgcgttagcacctgcgtcaagtcatcgagcggtgctgcttgaaagatcagtgactgcccgttgagtagctgatcagccaaggtattcatcgtggtgacaattcgcgtcatcgtccggcgtactttggttaatgcggctcctttgaacggggtgagggcttgtttgaggtcgataaagtcctgattggtcagacttgcggtatacatatcgcgcgcccggctgacaaggttgtgcgcttcatcaaccaagaaaaactgactgtcatctgcttcactgaagaatcgctgcaaaaaaaccaagggattgaataaataattatagtcgcaaatcaccacatcacaaaacaaactggcatctagcgaaaattcaaatggatccagtgtgtgtttgcgagcataggcttcaatcacagatcgggtgagtcgatcttcatgttccaaaagatcatgcagtgcgggtttcaggcgatcataatagccaagcatatagggattttgactagggtcatcgggctcatcggcgaaggtaatcgtgtctttagccgttaaggtgatgcttttggctctaagtccggcgtctgccatcagcgccattgcctgttccgccacccgacgtgtactttgcttggctgtcagataaaaagcgcgctgaatcaacccactacccatggctttaatggtcgggaaaagcgttgaaatggttttgccggtaccggtgggcgcctgcacaaacaaacgcgcgcggctgtatatggctttgtaaacagcggcagcgaactcgtgctggccagtgcggtactgcggaaacggaaacttgagcgtggcgatagaagcatttcgctgtttaataatatcgctgcgcagttttaaccaggcagtgaattcatcaagtaaatcggtgaaatcatcggctaactcggcggcactttttgtttcagtgaagcggctgactgtgtcggtactggtttgaacataaaccaaggtgataacggcatggtcttgatgccgctgttggcaaagcaggtgaccataaatccgtgcctgcgcccagtagcgatccttcgtgttttgcgaacattcttcccatgaacgggcactagttttaatttcttcaacggttagcgtcttgttttcggtccaaaccccatcggcacggccttctagttgataatcctcgtcattgacggtaacggtggtttttaaatagacttctttttcataatccgacttccgatgcgctgcttgaagtttgcggtgaatctggctgccgatcatggcggtgttatttgagttactggtaaccggatttagatcaccggtacgaacggttaactcgacaaattcgcgaatcccgatacggttatgagccatcagcgcacctcctcgttgtgtgagtatgattagcttttagtatagaacatacattctgtttggggaaattgtgggtgggattccggttgtttctttgcttttaatagaattagaggcataatagggggtgtcaagacatatgacaaatacggcggcttgcaaacactgtcgatcggtaagccgcgacatcaaatgagggacatatgatgaaaaagacaagtttctggcgattgttagggtttatgggcgcgattttattgttattgaccgcctgtggtaagcaaggttctgcggcaaagtcgtcgtccagtgcgccggttaaaattacatactggcatcggatgaccgggacttatgacaagtcgctgaataagttgattaccaaattcaacaatagccaaaagaagtacaaggtggttgcgacctctcagggttcatacaacgccttgcaacaaaagatcatggcggcaggaaaatccaagacgctgccaaccatggcccagtcaccgtatacaaatatcggtgactatgtgaagaatcagttgttgttgccgtttgattcggaaatgttaaatggttcgaataaattaagcaatcgtcaattgaaagatatttacccaagctttttagcggcgggcaaatacgacggtaagtactatggcttgccattttcagtttccacttcggtactcttttataacaagaagttgatgtcacagtataacatcagtatgccaaagacctgggctgattttgcggcggatcaggataagctaaaggggaccgatattaacgccatcgagctggatcagagttatgatgtggccttggaagggatggcttatggtgctggcagtcagctgatcacgccgaagttgaaggctaacttgaatgcaccgaagacattagccgcggtgaatcagatccttgatttgcgcaagagtggtgcgttaaagaccgccggcgaagatcagtacttcagtgtgccgtttgcaaatggcaaggccgtctttgggattggttcctctgctacggttccggtgttgcttcaacaggcactcaagagtcttgattggggtaccgcggtcattccggaatacgaaggcaagcgcagcaacccgctcaacgggaattacaatgtgctcttcaaaggcgcctctaaagcgcaacaagccggtgcctgggccttccagaagttcttgctgaagtcggaaaatgccgcacagtgggccaaagcttccggttacgtgccagtgactaagagtgcgtctaacagtgccaccttcaaagcctatctggaaaagaacacgcaatacaaagcagcagtttcagcagtctcacaaagctttgcctctactgtttttgccggttacaccgactaccgcaacgatttgatgagtaccgttgacagtaccttgaccaagaatatcagtggcgaaaccgcctttgataatctacaaaagcagaccgacaaaattttagaagaaaataaatagttttttaatcagccagtaataccgcgatgtgttactggctttttgctgccatgtcggtaaacaaccgtctgtcgctgccgatgtcatgatgcggacatggcggaaaacagtttacatcattgaggtcggatttgcgccgtattaccttagtgggctatgatggtcaaagcattgttatgcattaaaggagaccgatatggaaatcaatgtacacaaatttcaggaagctattttggccggcactttcgaacacacagcagttcacgtcactgctgcggcattcaagaaagacggcatcgctgacgcactgacgaaggtctttgcagatgtccgcgcggcgattgagaaggatcaattgattcaggcggatttggtggttgatttccctgaaccgacaaccattaccgttgagaccgggatcatcaacctgccatttgcgaatgttaataaaatccctaattttctggaaccggatgaaattgttccggtacgggtttatttaattgtggcatcaccttttgtcaacgtatcaggtttgcgcattgatgaagccgcgactgccgctgattatttgcaggattttgacacgatcaatgcccaaatgacggcctcagttcaggaaaagcttgaacacattcaaaccgaaatggccaagccaaaagaaaccgttaaagaagtgcccgccaataagcaaaagaccacggctaaaaaaaccacgcggcgagcgacgaccaagaagaaaacgaccacgcggaaaacaaccaagaagtcgactagtgcaagtaaggcggcgcccaaacgtacgacgactaaaaaaacaacgacacgtaaaactactaaaaaatagccttttagcgaatagtgatcctgagcttgatgactagtttttcgttattgctgtcagaattaagttactgaaaaaaggtaggcccgttgcacttcaaaaggtgtgacgggtttttcgcgtgccaaaaacgcatgcagtgaatgaaacactataagcaagcaagacaggcaaaaactatcaaggacatataaattaaacaatggcgcaaaagttgcgcttttataaatgcaaaaggaaacgtttgcagaagctgaatagtggtctagactcgtataagtggagagggggaacggcaatttgaaagataaaaagctgcttattttagaattcctgttacagcatggcaccgttcattacgatcaaattgccgctgcaaccggactttccgagcggacaattggcaattacctgaatcggttagacggggaattacgaccgtataatgtcaaactggtgcgcaagcgtaatgtcggcatacgtttagacggaccggccgatcaaaaagcccacttattgcggagcgttcacgggcaggagggctttgcctctcaaagtgcaagagtgcattatctgatgattaaattattgctgacgacgcgaccatgtacacttagcaaattagcggatgatttatttgtaagccgccggacgattgataacgattttaaggtggtgaaacaaatatttgcgcagaatcaggtgacggttcacacaagtcgtcgcggcattcaggtgacggcgtctgaagccaaccggcggcatatgttagctaaattgttacggcaatattggggtgaaagtctttatatcgcgaaacaaaaagacggagaagtcgttcagcaaattcagttgccgcattatctgaatcatttagtgaacccggcaacgaccaaagcggttatgcaaagccttactgagtttttaaagcaatcaagccttatcttttccgattatgcgctgcagtccttagccattcatctcattatcgcctgtgaacggcctaaaaaggaacagccgaccgcgattcatttaacgccgatgcttccggaaacgaagcaattgctggccttagtcagtaagtacgttcaccagacgctagacgcagccaatgcccaacagatcaatgcccatatcgcggcgcttgtggatcgacaagtgagcggggcacctgctgccagcattgaagatcagacaacgccggaacttagaagacaaatcgcaagctggctcacccaaatatcaccggataaacgcttgctggaagacttaagcgtccatcttagcggggcactggtgcgagtcgcccatggtatgtccattcccaatccctatacggaagaaataaagcggaacttcccgatggcatttgatgccgctgctcaattaagcatgacggtcgctaaacattatcatgtccagctcaatgacgatgaatcaggctttttggcgttacattttgagtccttttttgaacggcaacaagtcgctgatcgcatttcgacggtcgttgtctgctctagcggtgtcggaaccagtcgtttattagcgcaacggcttgaagaacgatttcgcgagaagttagtgattacccgcaccatcggcttggctgaactgatgcgtcatgcgatccctgaatcactcattattagcacggtgccaattcagggaatgcggcagccggtcgtcacggttaacccattgctgttgcagcacgatgttgaaaaagtctcccaacaagctgatcgctttcgtttcggaacagaaggtgatgcctttctcggtttgcttgagccggctttgattgtccccaacttaccgagtacggatcgggaaacggctctaagtacactgatccagcggttaacccaagccggtgtctttgaggacgcatccttaccgcttaaacttgccgaagatcgtgaaaagttggcgacgaccgccatgggcctagttgcgatgccgcatatctcccccgaaatggtcaggcgccctgccatcgcccttggcttagctccggatggtttggattgggcaggccaaaaggttaaagtgattttctttttggcagtgaccgcaacagttccaggtgatcaaagagggatttatcaggtgattaatcgcttaatagatgatcaacgtttttgtgaagtgttagcacaaagtcaatcaacgaccgaagcggtaaaggctttggctgaatatatccataaggagttaattgaagatgaatgaagttaatgtaccaacggatgttcacacggatgtggcagtgccatccgataaacatgctgccttgggtacgattgcaacgattctaagcgcacaacatcctatttctgctgatgaactgcggacgaatcttattgcacgtgaggatgaaagcacgaccggatttggtaatggcgttgcgattccgcatgccaaggtcaatggattaaccgatccttttgttggtgtcgtgacatttaaacagcccgtcgattggggttcactggatggccagccagtttccattgccattgttcttgtgatgccaaatcaaaatggggcagataaagtccacttaaaaatgctttctaaattggcgcgcaaactgatggacgatgattttataaaagcgctaaaagcagcacaacacgataaggaccaaatgaccaaagtgttgaatgaggttctttaaacagaaaggggaattttaaatgccaagttttgttggtgttacaaaatgtccagtcggtattgcccatacttatatggcagccgaaaaattacaaaagactgggcaaagcgatgggtacaaagtcaaggttgagacgcagggagcatctggcacggaagacactttaactgctgatgatattaaaacggctgattttgtggttttggctattgatgttgccattgacggcatggaacgttttgtcggcaaacgcgtggtcttttctacgacggcagaggcaattaaagacccgcaaaagttgattgacgcagggaaacatgctgaagtttataccggtgaaaagcagcatggtgacgagcaagaaacaagtgacgttgatgattcaggacatgaacaaagtccggttatcaaacagttgttgaatggtgtttcacatatgattccgtttgttgtcatcggcggtctgtttattgctttgtcaattgccttaggcggccacgctactgctaaagggatggtggttgcgcccaacacgatctggtcaacgatgaaccaaatcgggacgattggttttagcttgatgatcccgattctggcagggtttattgcgtatgcgattgccggacgtgcagctttagcaccggcgatggttggtgcaatggttgccaacacgcctgctattttaggtaccaaagccggaaccggttttcttggtgcgatcctagttggttatgcagcaggttatttaactaaatggatgaattcatggccgattcctaagagtttgcgcgcggttatgccgatttttgttatcccgctattagggactgcggttatctgtgcagcctttgtttatctgcttggcagtccgatttcctggttaatgacggccttgcagaacctgttgacattcttatctaagagcccgtcgacgagtattgttttgggccttgtcttaggtgccatggtctcagttgatatgggtggtccggtcaataaggtagcgtttcttttcggtgtggcttccattacagctggtacgcctgaaattatgggagcagttgcctgtgcgattgctgtaccgccattgtcagctggcattgcgaccttattcaagtcagaattaacgactaacgaagaaaaaacagccggtgtttcagctattttgatggggctgatcgggattaccgaaggcgcgattccacttgctacggcacatcctaagcaggtcttccctgggattattatcgggtctggcgttgcaagtgccgttgggatgatcttccatattaccgatgcggtgccacatggcggtccgattgtcggtgtcttaggtgccaccaataacctcggtttattcttcctggcaattttaattggtgttttggtttcaactgcgatcatcgttttgctcaaacagcatgcggttgcgcaccaaaagaagttggcagctgctaaataataaaaaacagcccgctgcgcatcttttgcgtaacgggctgtcgattttcccaacgccttcgttcattatggcgttgaatcgcaacagcgcgcgatctcagtggacatcttttactatttttaactgttgttacatttagttaagagaacgaatgattggcctagggtgatcgtgtataatgaaaggcgaaaccggaaaaagtgcttacagatagtcatgatgactggaaaacgcgattgaagaggagtggagcttttgacagaaccattgtttttgaagccatattttaatcccaagatctggggtggccgtaaacttaagactgaatacgggtttgatattccggacggcaaaatcggtgaagcgtggattatttccggacatccgcatggaccggcaaccatcgaaaatggcccactcaaaggcaaaaccttgcgtcaagcctggcatgaagatccggcttactttggcccgcaacatagccaggaatttccgctactggtgaaaatcctcgatgctgaagccagtttgagtgttcaggtacacccagacgatgcatatgcagccgcgcacgaagccaagggcgaacttggtaaaactgaatgctggtatattttgaaagcggatccgggcgcctacttaatttatggccaccacgccaaaacacatgaacagctcaaggaaatgatcgaagctggcgattgggagcatctgttacgcaaatatccggtcaaaaccggcgactttgtttatgtgccaagcgggacgattcacgcacttaacaagggcattgtcgcattggaaacgcagcagagttctgacacgacttatcggttgtacgactatgatcgaacggatgatcaaggacacaagcgtgagttgcatattaaacaaagtcttgatgtgaccaccgtgccattccatgatcctaagttgcacattaccaaagaaaatgtcacaggtggccaaatcactacatttgtgaaaccaccattatcaccgcattttgccgtctatcggctcgatgttgacggcactatgtcatttacccagcaggcaccttataccaacgtgacggtacttgacggcaccggtacctttacggcagatggcaaagattatccaattaaaaccggcgatagtttcttgattcccaatcaaattaaaacctggcagtttaccggtaaacttgccatcgtcacctcaacgccaggtgccgatgcgtaacagttgagtttctggtttcagacaggttaaccattcaaacagccttggagacgaaaaatctctgaggctgtttttgactgttcagacattgcattttcactgaaaagtaatttttagatcatacagacagtctttaggaagacggtaaaaaaattaataaatcatgagagcgctttcttattgattattttatattaaaacgttggtctaaggtggtttagcaaggctacttgactcatatgcggcggattgaaaagcatctagcgtgactggtatggactagggcaaaaccgcagtgcgaagccgccaaattagaattaagtcgtttccgttgacaagcataactgcaaacgcatacactacatgtggttggtaccacttggaggtgaggagatggaaaaggttccgttgaccaaacaactggtagatcagttggaggcctttatcaaagaaaaacttcagcctaatgacaagttgccgtccgagcgggatctgagtgaactgtatcatgtcagccgcaatacggttcggtccgcgttgaatgaattatttctgcgcgggttcatttatcgcagtaccggcaaaggcacgtttgtcgctgaacggtttgacgaacgaacggatgtaagcggatcgtacagttttaccaaacaaatgctagccatgaatcgtcagccagtaacgaagattcaacgactggaaaaaatcgcggtaccgcctgacattgccaaacggatgcgggttgatccagagacaccggtttatgttcttgaccggctgcgaattgcggatcagttgccgatgatgattgagcgtagttacttaccggcgttgacggtgccggatctgcaagcatctgatttagccaaaaatccactatacgattggctggaacaacattatggcattcacattgcgtcagttgatgaagcatttttcgccgggctggtctcgccggaagatgccaaacagctgcgagttgcgccggcatcggcatgcttaaacattcggcgaacgacttttgccgatactggggaaatcgttgaatatacgttgagtgtggcgcgcgcggatcaatttgtttatcacgttcatcatgtgaatcactagggaggatattattttgttcgaaaaaacgacagaagaattaacgaaaatgggtgctcagattaccacggctgagatcaagcagcagccggaactgtggcaagaagcgtttgctaattatacgcgtgacaaggaaaagattacggctttcttgaagcaggtaaccgctgctgcaaatggtcagaccgtccgggttattttcaccggtgccggcagttctcaatatgtgggtgataccgttacaccgtacttacgggcgcatggtgatcgcagcaagtttgaatttgaatccattgcttccaccgatatcgtttctgcaccttatgactttttggaagccgataccccgacgattctggtttcgtttgctcggagcgggaactccccggaaagcctgaagaccgttgagctcgcggaacaagttgtgcataatctccatcagatcagcattacctgtgctcctgaaggccaattggcaaagaagtccgctactgaagataagaccttgttgctgttgcagccagcaggttctaacgataaaggctttgccatgaccggcagtttctcatgcatgacgttgagtgctttgcttgtttttgacactgccagtgatgatgacaagcgtcaatgggttcaggcgatcgccgcgatggggaaagaagtcgtagcgcgtgaagctgaaattcaagcggtattggatcaagactttgaacggatcgtctatctgggttccggcagtctcggcgggttgacgcgtgaaactcggttgaaggtacttgaactcaccgcgggccaatacgcaacgatgtttgacacctccatgggcttccgtcacggaccaaagagcttcgttaacgacaagacactgttgttcgacttggttagcaacaatgcttatacccgccaatatgacatcgacgtgcttgaagaagtcaaagacgacaagattgccccttctgtcatggcagtcggaaccaagcaggatcaaaacttctcaggtgacggtttctactttgaaaatggcctcaaggatcttccggaaggctaccaagcattgcctgatgttatgtttgcgcagactgtggcacttttggcttccatcaaggtcggcaacttacctgataccccatcaccgaccggcaccgttaatcgcgtggtaaaaggggttatcctacacgactattcaggtcaggaataaggttgcaactgtcatggcgccatttagtcgagtaagtcggttagatggcgttgctaaaactgggaggcaagtgttcatgagttattacattcacgccgcaaaattctttctcaaacatgtgactgaaattggcgggtatctagaagtgaccgatgatggccagtttggtcaatatttacctgaaagtgccaaaccagaaggcgagattgtggaacagccaggcaagctaattgcgcccgggttggttgacacccacattcatggccttttgggacacgatgtcatggataacgattgggacggcatcaataccatgagccagaatctgctcaaggcaggcgttacaagctggctacccaccacgttgaccgggtccttcgatcagctaaacgatgtctgcaaaaccatcgcggctcatgcaggcgaagaatccggcgctaagattcaaggcatttattttgaaggcccatacttcacaaccaaacacaaaggcgcacaaaacccgaagtatttcaaaaatccgagtgaaaaggaatacgatgcgtggcaaacttcggccaatggcttattgaaaaaaatcgccattgcgccagaacgtgacggtgcagttgcgtttacgcggtatgcgaccggagatggaaccgttgtggcgctgggtcatagtgatgctacctttgaacaggcaaaagcttgtgttgaagcgggtgccactgtcttcacgcatacctttaacgggatgagcccactgagtcatcgggcacccgggatggtaggcgctgcaatgtacctacaaggcgttgatgacgagctgatttgtgacggtcatcatgtgcggcccgaagttgccaccacgttaattcggctgaaaggcgcagagcacattgctttgatcaccgattgcatgcgcgccggaatgatgcctgatggtgattatgtactgggcgaattcccggtttacgtcaaagacggcatggcgcggttaaaagatggcgacagtttggccggttcggtgttggaactgaaagatgccttgacgaatctcttagcttggaacgcagccacgccggaagccattatccgcatggcaacccaaactccggctgcttcctgcaagattgacgatcaatgtgggagcattttaccgggtcgagctgctgactatctggttttggatgctgacttgaagctgcaggcaacctatctcgatggaaaacttgcgtatcaagcagaagcatgacagctttcctgacacaaaaccttgtgaaaaatggcgttaatgtgtgacactggattatggcagcggaacgggtgttataaatcgttgtggattgccataaacgcgccggttcacgctcattctgaaaaggaggcggaagttcgtgacgaccttttcgatcgatcatgaatttatgttggatgggaagccgttcaagatcctatctggtgccattcattattttcgggtgcatccgagtgactggtatcacagcctgtataaccttaaagctttagggtttaacacggtggaaacctatgtgccgtggaacttgcatgagtatcgtgaaggcgagtttgattttagcggcatcctcgatattgaacgttttctcaaaactgccgaagatctcggcttgtatgcgattgtgcggccgtctccttatatctgtgcagagtgggagtttggcggatttccggcatggctgttgacgaagaagatgcgtctgcgtaccgatgatccagcttatttggcggcaattgaccgttactataccgcattgatgccgcatttagttgatcatcaagttacccacggcggcaatgtgatcatgatgcaggtggaaaacgagtacggttcttatggtgaggatcaggattacttggcggcggttgcgaaactgatgcagcaacacggagttgatgtgccactgttcacttcagatgggccgtggccagccaccttaaacgccgggagtatgattgatgccggcattctggcaacgggcaacttcggctcggctgccgataagaatttcgatcggttagccgcttttcatcaggaacacggtcgcgactggccattgatgtgcatggaattctgggatggctggtttaaccgctggggtgagccgattatccgccgcgatcctgatgaaaccgcggaagatctgcgcgccgtcattaagcgcggcagtgtgaatctctacatgtttcatggtgggacaaactttggcttcatgaacgggacgtctgcgcgtaaagaccatgacctgcctcaggtaacgtcttacgattacgatgccccgctaaatgaacaaggcaatccaacgccaaagtactttgccattcaaaaaatgatccatgaagagcttccagaagttcagcaagccaagccgctggtcaaacccacgatggcgccagcttcacacccgttaacggctaaagtttccttgttcgcagtcttggatcagttagccaaaccgatcgccgcttcttatccgcagacgcaagaatttctgggccaatataccggctataccttgtatcgtacgcagccgctcattagtggcactgacaaaggaacaccggccaagttgcgggtgatcgatgcccgtgatcgggtgcaagcttatttggatcaaaaatggctagcaacccaataccaagaagcaattggtgatgatatcttgttgcctgaagttgagggacatcatcaacttgatttactggtagaaaacatgagtcgggtgaattacggatccaagattgaggcgatcacgcagttcaaagggattcgaaccggtgtcatggttgatctgcacttcatcaagggctatcagcaatacccgctggacttgaatcgcgcttctcggcttacctttacggaaggctggcagcccgcgaccccagcgttttacaagtacacgtttgatttgaccgccccgcaagatacctatcttgattgtcatggattcggtaaaggagtgatgctggttaatggtgtaaatgtcggcaggttttgggagaaaggccccacgttgtcactttatgtaccggcaggactcctgcacgccgggaaaaatgacgtcattgtgtttgaaaccgaaggccgctacgccgaaagcttgaagatggctgaccacccgatatttaaggaaccatgatggataacttccggtgcaagcttcaaaccgcaccggctcacgctcactataacgcgttcgccggtgcagaaacctgcgtgtaaggacctcggtcgtaatggccaaaagcgggccatcacgcccaaggccgcttacactccggtctcaaaccgcaccggctcacgctcacagacacagaaggaggagtagaacatggctattattgctgcacggattgatggtcgcttggttcatggtcaggttgccaatctttggaccaccaaactgggtgcgacccgaattatggttgttgatgaggcagcatccaagagcgacattgataaaagcgggttgcggatggcgactccggaaacggtacgcttatcggttctggatgtcgcaactgccgcaaaccatattttgaaccacaagtatgattcccaaaaggtgttcattgtcgcaaaacgtccggaaacattccttgctttagtcgaggcaggtgtaccgattaaggaattgaatgttggcaacatgtcccagacagataaaacccgctccattacaaaatcgatcaatgtggtcgatgaagatattgaaacgttcaagaaactggacgctcacggtgttcacttgattgcacaaatggttccgggtgatgctgcagctgactttatgtcattgctcaaaaaaggatagggggagtcaacaatgattgcatggtggcaaatagtgattataacattatacgcaggttatcaaattcttgatgaactgcaaatttattcagccatgagttcaccagttttcgccggcttggttgctggtcttgttatgggtgacatgaaggccggcttgctaatcggtgcatccacccagttgatggttctaggggttggtactttcgggggtgcttctaaaatcgatgcaaactccggtaccttgttagcaactgctttctctgttagttccggtatgaagccggaagctgctgttgctgcgattgcggtaccagttgctagtatcatgattcaaactgatattcttgctcgttttgcgaatactttctttgcacatcggattgataaaatggttgacgagtataattacaaaggcatcgaacgttacttccttgccggagcacttccttgggctttgtcacggatgattccagttgggttggcgttggcctttggtggcggttttgttaccaatattgcccacgcattgaacaccgattggaaatggttaggcgatggcttggcaacagccggtgcggttctgccagctgtcgggttcgcaatcctgctccactacctgcctgttaagaagcattttgcttatctgatcttaggctttatcttcaccatgttgttcaccaccttgtttggcaatattcagacattgggaacggcagtcgctggtgtggctaagaactttacagcgacattcaacggcttgtccatgctcgcaattgcattgattggatttgcgtttgcagcgatcagctaccagcagtcaacacaactgcatgacagtgtcggtggcggttcagaagccaatggtggtgctaaagcagcaaagaagactaatgatgagggggaaatcaccgatgatgaactctaataaacccgcttacaaattaactgacaaagattttcggcagattaaccgtcgtagcttgttcggcttccagttgggttggaactacgaacggatgcaggcttcaggttatctgtacacgatcctgccgcagttgcgtaagatttatggtgacgggacgccggaactcaagaaaatgatgaagactcatacgcagttcttcaacacctctaacttcttcaacaccattatcaccgggattgacttggcggttgaagaaaaagaaggcattgccggtgaagaaaccgttgttggtatgaaaaccggtctgatgggctcctttgcttccattggtgattcaatctttgctgctttgattccggctattttcggggcaattgctgcgaacatggcggaaaaagggaacccagtcggcatcttcatttggattgcggcccaagttgccgttatggtcttccggtggaaacaattacggattgcctataacgaaggggtttcgttggtcacaaccatgtcgcatcggttggcagctttgaccaatgccgcaacgatcatgggggtcttcatggttggcgcgttggttgcaaccatgattaatgtgaagtttgcgtttgcaccaaagatcggcagtgtgccactgaacttccaaaacagtgctgacatgatcattcctaagttacttccggctttgatcgtgggtgccgtttattggttgcttggccgtaagcatatgacgtcaacccgggccatcttcattgtgttgattgtgtccgtcgccttgtccgcacttggcgttattgcaaaaggctaataaataacctgccgaaatgtttagcacgaagcatgagccaatccagccatgttcggcgtgtgagcatcaaatggttacgcggtttcatcacaatgaattgcaaagcgttggatcagcgcatgttaaaggagttttggaaatatgagtaagttagttttgattagtcacggtcaattatgcgaggaactcaagaagagtgccgaaatgatcatgggtccacaagatgacattgccacggtggctttgttaccgaatgaaggcccggaagattttcaagccaagttcaaagcggcaatcgaaggtgaagatgatgtcaccgtcttagccgatttgaaaggcggcacacctaataatgtggcagcgcgggtgttggcagaaggcggcaactttgatctctatgcaggcatgaacctgccaatggtgatcagtttcctcaacgcccagatgctggacatgaagccggatcttttgggagacggcaaggccggtgtggtttatattaatgatattgtgaagcattaatttggttcacaagttggaaagtctgtgtccgttgggatgcaggcttttttgcgtggtagggaagattatgtgaattgaaaaggcaagtagaatatggctacaggtgacaagacttggcaaaaatataatcactgtatcatcgctgctttgtaggataacgaaaaggaaccaatggcttgattgatagactaatgttaacgttgaggtgttaacttttttaactaaaaatagtctctgctaactgacagatgagaatggaggttcctcattgaattattttgtgaatgaaaacatattttcaatgaactcaggtacggaattttccgcggcacaacgggtaatgctgttcaaaaagaataaagtgccggcgcagatagtcacgcgtaattacaatccgttgatgattgatgatgttcaccgaattgggttagagcaaaaagatgttgtcaatatgtatgactattttcaggagatacttgatgtcgcgcctaaagatgttaatgttcgttatactgaagctattgataagtatcaataccacattgatggcgtggatccaaatgaatctaaaattgtttatcatggtaaaacgatcggtaaagtcaacattgcgccaggtacagtcgggcttgtgggatcgattgaatactacaatgatatgaatacggttgtcgctaaagacatttgggatcgccgcgggtttaaatcgtcaacccagtattttcatcctgatggtgcgtttggtccacaggttttttacgatcgtgctggtaagcccaagattgaaattacgcggatgaatgtgaatggcgaattgcgcaacaccatgtacaagctgcttgactatcaaggccgggcatggcgctttgataccgaaaatgaaatgtttgttttcttcatgaatgaactcatgcttaaacatcctggcgtcttaattaacgatcggccttcattaattagtgaagttgccgcagttgttggcgcacgtggtaagtggcagtttcttcacagtgcccatacttacaagccagaacaagcaggtggattgcgtaactatgtcgactatctccaaccgctatttgccacgcacatgaatgactttgatggcgtcatggtcccaactgtggagcaaaagcaagaaatcgataagttcttccactttaagcatgtcgtggtggtgccggattcatatgctgaaccgcataaactggtccctgctgaaaaacgtgatcgcaataagattgtttatttgggtcgagtttcaccggaaaaagaaccacaagaagccgttaagatttttgcaaaagcgaagaaagacttaccagacttacatcttgagttttacggttactcatctgatcagtcgcttgataattcactaaaagaactgattaaaaaactggaaattgaagacgccgttcactttaatggctaccaaaacaatgaccagttggcaaaaaagcttggagacgccgcggcagtattaagcacctcttcttcagaagcattcggcatgaatgtgttgcaggcgatgagttttggcgtaccggtgatcggctatcaggttaaatatggcatgaagttggtggttaaagaaggcatcagcggatacttagtgccaaatggtgaaagccaacaaggtgccaaggcgttggttaagttgttgaccgacaaagataagtgggtcgatatgcttgaatcaacctatgaatcatcgcagaagtttaacgctgcggcagcttggcaacagtggcaggctcaacaagcagctgttcctaacgtattcttaaagtagggggagagcttagcatatgatattctttattaattcaaattttaataaaaataattccgggattgaacacgctcaattgaagcgggcaggactctttcgtgatcatcatgtgcctttcaagatgatttttcgcgaatggaatccccgcttacatgaatacttaaatcataacggagtcagtgatgacgagactttgaacatgtttgactactatcagaatgccgaacaggttccagctaaaattcttcacgctgacgacattgattttggattcgacaagctcagttacgccaaagagccagataaccaccgctatttggtgacccgaggcaaactttttgtcggtcggatcaattactttgagaatgacccgactgaacgcgtcagctcagtcgaacaattcgatggttttggtaatctgtatcgggttgacttctatgactttcgcggctttttgtcgctgtcgcagtggtatacaccggacaataaagttggcactgaagtttggtataaagttgatggccggccggttgttgagacttttaataaatacgacgccaatcatgcgtttattaagaccggatggcggttaattgaagacaacggtgcggtttatatgttttcgaatatagatgatttgatgcagcatttttacaataatgtgaatgagcaatactggaatgacaaagaagccaatgtctttattcttgatcggtcacatttgggcgattggcaactcattcacttacagcggcctgcttatattgtcatgcatttacacaactcacatgcaggcgatgcccaagatccgatgcactcggtcatgaataatttttatgagtacagcttgattcatgctaatgattacgatgcgattgtttcagctaccaataagcaaactcatgatgtgcgcgagcgattccacccaacgtgcaagttgtttaccattccagttggcgttttgccagatgaacagttggctcgaccgcatgttgccatgaccgatcgccagccggcaaaagttctggttacggcgcgggttgcccctgaaaaacaaattgatcacattgttgcagcgattgggattgctaagaaagatgtccttaacatttctttggacgtctatggttatgtcgaccaccgggatgataaccgggcgatgaagcggatcaacgcagcaattgaaaagtatcatttacaaggtgcgatcaagttgcacgattacaccaatgatgtcggagccgttcaacggaatgctcaggtttatgcacttacatccgtgatggaaggctttaatctgtctttgatggaagcactcagcaacggcatggttggggtcacctatgatgtcaactatggcccgaatgaattagttgttgatggcaaaaacggttttgttgtgccatttggcgatattaaggcgatggccgctaagtttgttgaactattcacccatccggatgaattacagcaaatgtcagaccaagcctatgagttgtcggatcgctattcggaagcgaatgtttggaaggcatggcaagcgttattggatgatgccaagaagaaggatatccattacactaaagaaatatccgctggtattggcgatcaacggataaagaaagggtaagctccggttttagatttaaaggaactgctaaagtgatcgttattttagaacgaaacactttttaaatttttctcaaaacagtacaattagataaatcaactttaaatgaaggcgggcgcctgaatgaatgacaaattaaagattattgaattacttaagcaacaagtagcagcgaaaacagctgaactgacccctaagaatattcagaaaataacgcaagacattcaagatttactgaaaattttaaatgacgttgttgccattgattttatcgacactacttctgaaacgagtccgcaacaagagaatacagcagttgcaaaacctgaatctaacgcggcagttgcgccgatgattacccaaacagcgcctgaaactaaaagtgaaccaaagcagcagacgcaaccgcagcaaccccaacagccaaaaccgtcgcagccaaaatccaatcctgaaccggaaacaccattattatcagagcactggttaaataatcataagtcgtacattggtcgcttccatttagatttgaacggcggacatgtcggcaccattaaagtgtcggaaagtaagttacataaaatgaagaacccaccggaaaatggggactgggtgcgtgccgatgagtatcaggatagcgatagtgttaattacaagattacaacgttgaagcgcgatccgttgccaaccgaaattgtacggttgaagtttttgcctgctgtttttcgtgaagatgtgaagcggtggtatattgagtttcaatcaccggaacacgagacgcggcagcagttgcttttaggcgattatgatgtgatgttgtttaagttgaagccgggagattatattgactacgcttatcggcgcggtcaggaaatcaatggtaagatcatttggcgttacactgattccgcggcggttgcgacccgaatgaaacaacgctatgcaaagtcggcgaatacagacgctgataaaaacactgcaactagtaagcagaaagcaacacaaacagcgaacaagacggtcaagcctgcaaagaggcggcgagctgtccagcaagtctttgccgataaaaccttgctgctggtttgttttgaaaactccgccatgccgcgtaaagtcaagcgccatgttgaagaacgcggtggcaaactcgtgttatcatcacactcggattccggcgcgatgttgaagaaaaaagttcaaaaatctgatgtggtgattgtgacgaccgattttgttggccatagtcaaatgtttgcggctaaggatgaggcgaagcggatcgggaagccgatttggatggcgagaaataccaatgagcgtaatttgctgcagtggtacaaacgacattttcctaatgaaagtaagccatctgcggcgcgccaggaagtctaatgaatgagctagaatcaatcattgtgtcacttaatactaaaattttatattaaaaaaaccggtcctgagtgttttgcagtgtgtgctgactgctcagggccggttttttaaatgtgaacttctaaatacaacgggatattcaggcttcttgtccaattcgtggccaagttgcataagttgcgaccatgcgatccaaggcttctttgagtaacgggcgcggcatgccgatgttgagacgcacgaagccgccaccatcagccacaaaatagctgccgaccacacaggacaaatcagcagcagtaaagaaacgtttcatcgccgtttcatcagggaaaagccgctgggtatccagccaggctagaaaaccggaatcggaaggcatcacctgaatttccggtatgacctgcaaacggttgaccaagtaggcaaagttagcggcgacataagccaccatttcatccagccacgcatcacaatccgtataagcagcgatgagggctggcacggcaaagctattaggcgaggtaatcgaattggcgacgaattgagcgttgagtcgggcgcggatcgctgggtcagggatgacgacataggacgttttcagaccgcctaagttgaaagctttattgggtgataaacaaagaatactttgggattgaatagctgggcaggcttgccagatgctggtaaatgtaacgtcgggataaacaatgtcccggtgaatctcgtcactaatgagtaaaacctgatgctggcggcaaagttcacctacacgtgctagttcttcagctgtccacacgcggccggatggattttgcgggctacataaaatgaacaacttaacgtccgagcgttgcattttagcggccatgtctgcaaagtcgaattcgtagcgattgtccacaagcatgagcggactggtgacgagctgacggtggttattgcgcacggcttcagcaaacggatcataggctggcgtgttgattaacaccgcttcattttgttcggtgaatgcctgaaccaagtagtggagcgttggcactgtgccatagctgagcttgatccagtctttttccagttgcaacccgaagcggcgcgcgttccaggcgatgactgtctcataaaaggcttcggggatgtaagtgtaactgtagtcgggtacggccgcgcgtgtcatgatggcttggtgaatcggcggggcaaccgggaagtccaaatcggccaagtccatgggaatcgcgttggccgtgagcccgaatttctccgcgagcacttgatccgcccacttccgcgcattgccggctttgcgatcaaaaaggcgatcaaactggctcatgttcaagcacctccagttgattcatctgccgagatgtttggtttaacacacgcgcgccggtttcggtgatgacgacatcatcttcaatgcggacgccgccaatgccgggaagataggcgcccggttcgattgttacaatcatacccggcgctaaaacggtttgactgcggggattgagaattggctgatcgccgcctagtcccaagccgtgccctaaaccatgcgtgaaacagtcaccatacccagcagcggtcaaaacgccacgggcaatggcatcgacttcacgaccttgcatgccgggtttcaaagcagcaattgcagtttgttgggcgtccagaaccgccgcatggaccgcggcaagttctgcgggcggcttgccgatgctgagtgtccgcgtcatatcggactgataatcagctaaaacaatcccaaaatcaatggtgatgagttcgttttcctgcagtattcgctcgctgggtcggccatgcggaaacgcaccccgcgggccactcgcaataatcggatcaaacgccatccccgtcgcccctgcttgcagcgtataaaaatgtaaccacgcattaagcgtttgttcgctgatgccggggcgaatatgcgggaggagttgggtaaaaattttgtcagtcatcgcacaggccgccgcaactgccgcaatttccgcttcgtccttgcgcatgcgttgttccatgatcaagtcatccgccaaactgagcgtccagttctgggcagctaaggtctgaaattctttaatcgaaaagccgctgctcaccaagccgatgcgccgactttgctgggaagttaagaagtcaatcaattgcggtaagtaagatccctgaggcacttcgatatttgtaaatccctaggtatctgcggcctctgcacgatagcggccatcgtggatttgcacggcctgcgttggggtcaccacgacatacacaccgctgccgggcaacgcgccgacatagcgtttactttggcgatcatgcagcagcaacgcgtccaaatgttgcgcgccgatcgctttttgtaagttggttaaatgattcatatgagcctccgttttaagtgcattgtttttcgaaaaagggatgcccacgcaaacggtgcggcatcccattgtgagcattttttcagtaaccacagcatgcggcctgattagaagtcgagatccaagccagccaaggtatcctcgtcttcttttgaaaagattgatttctgcgatgcttttttagcttcattcttcaactcggcgcgttccataaccttgaagaatggccagtacaaagcgattgctaagaccagctgcaaggcgttggctaggattgtccggtaatcgccattgattaagaaaccttccagaaagaccccaacgtacggcgggttgaaaataggtttagcgatccaaccccagtgcatgaagaacattggcagggtaccgataatggcgccaccaaagacgtgcgggatgaacataatcggattcagaataatcggtgccccgaacagaatcggctcattgatgccaaacaaggcggggaataaggaaattttaccgattttacgataccgcttgcttttagacagcatacaggcaaccacacagccgatggaaatgccgcaaccggtaaaaccgaagaaacttgaaacggcgccggctgtgtaaaaatgcggaattgcttcgccggcgttcatcgcagcaatattttcggcgatgaatgtcaccataatcggactggtgatcggcgagaaaaccgacgagtgaattccaaagaagaagacagtacaaatggcgaagttaagcgccaagacagcccacggattatccatactcccaaccaatggcgccaagaagcgagtcaagatgcttggcggcagctcaccagccagattcaggaagataaagaggccggcaataaacgcaccgccagtaatgagtgtgaccggaatcagctcgaatgaacgggaaacaaaatccggcaccccatccggcatcttgatcgtcaagtggtgagttttgcaccagtgatataactcaaccgtcagcaaggcaacaatcatgccggtaaataaaccgcgagcgccaaggttggcgacatcaagttggccggttttgttaaaagttgcgaccatcatcaaaaaggcaaaacccgacaaggtgacacatccgggaatataaagcttgtaatgattacctaagttgtaagcaatagataagcaggcatacaggccgatcatcccgatggacagcttaacaggcagatcgaataacgcggcgttgccagtaatgaactgcgaaacggcatttttaggaccgagcatgttcggcagagcggggatgatcgtgaaaatactgccgagaatggtgaacggcgtcatagccaccatcccggccttaatggcactcagatgacgctgattatccactttatgggcgatgggcatgaagaagcggttcatgaaagcttcgaacttgttaaacattgtggagcgctcctctcaaaatcttgatcagccactaaccggcgtgcttcttttgatatttcgcatgggtcaccagtgccagtttcatcaccgtggcgccatccatttgcccgtaaacatctttatcgatgacggcatacggaatgtggcgcggatcacagatttccccaatatagccagtcttatgcccaatctgaggaccgaccaaaacaatgtcatagttgtcgatttcttcttccagtccatcaaccggaatagcattaaaatgaaaatccgcttcgttcagtttgcgactgtctttaacaaccttcgccatattttgcatcaacatattggtggaaaagccacctgcacagcataatagaattcgcataatatagttctcctcatatatttattaatgtgagcgcgagccggcacggttagaagccagcttcattcacgctctagtttcaaatacctcaatcaacgtttcgatcaaatctcgtgccagttggctggtcatgtagtgatcttgcgcgtggaccatgagcagacttacgggttcgggcgtctggtctggtgcaaactcgcgcgcgatcatggccgtttgcgcgttatgggcagcgacatcaattgccttggactcggccagtaaactgcgggcccggtcaaagtcttgcgttttaacagcagccaaagcttcaaaggccttggttttgctttcgccggcgtttgcgatgagctgcataatttcgagttcttgagtagttgccatgggggtggactccttcttacaagcctgcagtgggtgggtgcaggtgttttttaatcgttgggcgggtggtagtggtgaaacttttaaaaggtatgcgccgcggccacgagttttgctgataattgacgacacatggcagcgtataaagcgaccatctgatcaacgtcgcgggtgtgggcaagcgattgagcgcaatggccgtaacggcaagggaggattgtgaccacggttggaatgcctgagccgaccttgtgtgcttcacctccatcggtaccgccgccattgaacatgtctaattgcaaagggatttctgctgcgactgcggttgctttaacaaactgttgcagatggcgatttggagctaaggtgcgatcaaaatgggtgagaatcggccctttacctacttggcgctggttaacctcgctacgttcccgtggattttgaaaagttgccacatcgacaataaaagcaagatccggtttgatcagctgggtggcagttttggccccacgaatgccgacttcttcactgctagttgcggcaaaatgcagggtgaacggcaatttttcatctgccagttctgcaagcagttgtgcgccgacgtagcagccgagccgatcatctaaagctttgccgccaaagacgccatctggggcatacccatgaaactcggtcgcaaacgtcaccatatcaccgattgcgatccccaaggctgcgacgtcatcagcactgtttgcgccgacatcgcataacacctgatcaaatgccggcaatgtgtcatcgcgaatgaccatgcccggaagcttgtgacccgcggcggttgtgatgcgtacgttctgccagtgactggcggcaggtttaacgccgccgacaaccatcagacgcagtaggccttcaggggtaatggtacgaaccatgtagcctacctcgtccatgtggccataaatcatgactgaaaattgcggatcagcggcttctttggtgaaaataaggctgcctagcccgtcagtttggctggtcaatccatatgaggcaaggtgatggcgcaaaaccgcgcgcacttcgtcttcgttggccgcaatggcatcagcgttacttaacgccgccattagttgtaaatccatgtcgtttcggctccttccagttcagtccgtaaagtttgttgaaatgcgctaaattcggtttgttgaactaattgattgatgagatcaggcttttgcattaacgcggccaattgggtggtcaaggttcggtgtaagggtaattgatcctgtttcaacgcaatcaaccacacaatgcgaaccgggcgcgcgctatttttgacgccagttggcaaaagcatcacggcgacagcatttttcctagcgctgaatgacaaggggtgcggaatggcgatcccgttgtcgtaaaccgtcgccagaaagtcttcgcgctgcagaaccgatgcggcgtaaccaacttgtccgcaatatgccgccattttggcagtgagggaggtgagtaacgtgcgatagtcggcaggcttttgatcggggaaaaatagcgtcggctgcaacaaatccgcaagggacgctgtggcatgatgttgcgatgccattgatagctcgtgtcgtaaactggcaaaatctaaatccgaagccacttcatcaatctgaatcacgggacagtcaaatgattcatttaaagccgtgacggtaaaaagcaagtccggtgaaagttggtggattgcttttaactcattgaggccaaaagtttgaatcacggcctcggggaaaatccgtcgcaggcgtaaactcagcagcgttgcaatgccgccgccagttccgcagatcacggcaatgcgataaccgtgacggctccatttttcgtgagcctgctcaagtgggaccagcagatgggtggtcagatagccgacctcggtttttggcacctcgatttggtattcgcggcttaaccattgagcaaattgaactgcccagttaaaggcgatcgggtaatcgcgcgccaaaggttctagactcagaccggccagactttggtgttcttttagtcggccaattaaggcgaggacgtggaagtacataagcgacaggaattccggatgcgtggcaaagttagtttcatggcgtgcatccagcgttgtgaaataagcgcggagttttacttttagccgcttgtggtccaggcgggtggtcagttgtttgcgtttggcagcaaaactgacggttaaaaaatgccacgcctccggacttaggcgaatagcggctaaaagcgctgcaaagtctgtatcagcaggtggggcgtgtaacgtttggcccgtgacgactagcgaccacccaatttcgctggcaaactgggccgtgacagccggatcgagtcctaaaggctgcagttgctgagtcaatgttgcatgattgggcggtaacccatattgttgcagcgcatggatgcgactttgccagttgccttgaattcgcacgccgtaatgggctttgcggattaacgacaggggcgttccaaccagcagtttgtccaactcgcgtaaatcacgctgtaactgcttggtactaataagctgggtggtggccagttgcgccacagtcaaatagtttgtggtcgataacagttgttgcagaagctcaggtaagcgtttggctggcatttttggctgagcctgacccgctaaagtcgctagataagcagctaaaagtttcgtatctgtaatctgtaattcataccctcgtccccgaataagtcggatttgaaaccctgacgcagcgtggtttagcaggcgcaaatcattttgcaacgtgcgccgtgataccccaaccgctttggccaaggccatcgcggacataaccccgttagcttgtagtgcttgaatgatgagatgttcacgcaattgccttcccccaatccgtaagcgctttcaactatattgtcagtatgccgcagatactttctgccaaaaagtcccacttttgcaagctgacatggcaaaaatggcatgattgccaatgcgactgccactggtcgtgaatgacgaatgatatagtgaccgtgctcattccctgcagtgtaccaatgtttgaggcggataacgatttgagctggtcgagaaaatagtgagacgacttggttagataatgagaggcataacaaagagttggggcagtttacaataaagggggagtaaatgaaaaaattgcacgcaaaaagccccatgctgtttgcatgaggccgagtggatagagagctagcattaccggcatgcagcaggcgcacgccaccaaaatgaatccttaactacgcaatgccgccctctgcgtttaactgcgccatatgaatcaaggtctcggcaattttacccattgcttctgttgagacgacttcatacgggccgtggaagttaatgccaccgttaaataagttaggagtagggataccttgataagtaatctttgagccatcggtgccgccgcggaatgggacggttttaggcgtcagaccagctgctttgatgccagcttcagccaagcggagcgggtaaggatctttattaataatatcggccatattgtaatattggtcgtgcatttcgactttaagccgtgggtggtcaaattgggcgtttagttcatcaatcgtcttttggaagtaggctttgcgggcttcgaattgttgatgatcaaagtcgcgaataatgtagaccaactctgcatcactgatttcgccatggaatttcagaagtagaaagtagccttcatgtccggcgctgaattccggccgatcaaatgccggtaatgcggcatcgagctgacggcctaaggtgttggcattgaccatcaatcccttggcctcaccgggatgaaccgaagtcccttcaatggtgacggtggcttgagcagcgttaaaggtctcgtattcaatttgcccgggatcgccattatccaaggtatacgcaaagtcggttgcaaagcctttcgcatcaaacttatcggccccaaccccgatttcttcgtccggaccaaagccaaatttaatcaggccgtgtttgacttccgggtgcgctaacaaataacgagcggtcgcaactgccccggcaattccggccttatcatcaacgcccagtaaggtagtgccgtcgctggtgattaaggtctgaccaaaatattgcttcaacgcggggaactgttcaactgtgagactcaagccatttgcaaagttgatcggtttgccatcgtaatgcggatggacttgtggctgcacattctcggcgttgtaatcagccgtatccaaatgcgcgatgatgccgaagcttttgaccggtttatcagtgttggccggcaaggtggcggtgacaaagccattttcctggtttaagccaacgtcttggagtccgagttcttgcagctgggtcactaataacttggccagttcggtttggccaggcgttgatggggtggtgtcgcgtcccggataagaccgggtgttgattttggcatagcgaatgaaatctgtttggatttggttcaaatcaagttcaattgtcaatgagaatccctgcctttttgatgagaaaaatattaatattccattgcaattagtgtgagactggcttagtattttgtcaatagcacactaaggaaattattggaggggcgcatatgaaaatatccaaaaaatggacgctggtgttgccggttgctgctgtactgcttctggccgccggatgttcgtcaagtagcagcagtggcaagtcgagcaccaaccaaacgcttaattggtcggaaacctcgtcaatcgtcactaacgatccatcgcaatcaactgacacggtatcgtttcagacgatgaccaacacgcaggaaggtatttatcggttaacggataaaggccaaaagccacagttggccttggcgaagaaagtgacgaccagtcaagatggtatgacttatcacgtcacgttgcgtaatgctaagtggagcaatggcgatccgattacggcgcaggattttgtctatagttggcagcgcacggttgatcctaagaccaaagccactgatgccttttattttgctccggttaaaaatgccaatgcgatcattaaaggtacgaaaccggccagtgatctgggcatcaaagccacagacaaacatcacctgaccatcacgttggaaaatccaactgcttacttcaagaagttgctagccttcccgctgtattatccgcaaaatcaaaaagtggttgaaaaatatggcaagaaatttggtacctcggcaaccacccaggtttatagtgggccgttcaagctgaccaaatggaacgggacgggtgatagctggacgttggttaagaacccacagtattgggacaaaaaacatgtgaagcttgctaagattaatgaaaccgtcattaaagatgttcaaaccggcatgaatctgtatcagacgaagaaactggattcgatcgtgctgaccggtgaacaggcggccgcgcatctgaatgataaagacgcggttaatcgcatttcctccaatatgacccgcgtggacttgaatcaaaaacaagtaccagccttcaaaaatgtcaaagtgcgccaagccttttcaatgatgattaatcgtgcggcgctgacaaagaaggttctgaaagatggctccaagccggccctgggttttgttccaattggattgcatacgaaccagaaaaccggtgccgactttgccaaaaccacgcaggtgaaaagtgcggttgcttacgacaaggcaaaagccaagaaactgtttgaagcagggatgaaagaagccggtcaaagccagctcaacttgaccctgttagcagatgatgcagatgtttccaagcaggtagccgaatacttgcaaggcgcgtttgaagatttgccaaatgtcaaagtgacaattaagagcatccccaaggcccagcgcctgcaagcgatgatgtcaggcaactacgatatggtcgtcaccggctggcaatccatctttgcggacgcgtacaacttcttggatgtgtggatcagcaattccagctacaacacatccggttacaaagatgccaaactggatcagctgctgagtgaaacggaaaccaagtacggcaatgaaccccagaaacgctggaccatgttgcaggatgccgaaaagatcttgatgaaagaccaaggtacgctgccgctatatcaagccaacaatttggagctattgcgctcaagtgtcaaaggtgtatcgtttaatcctaacgggacaccatatgactttaaaactgcatacattcaataatattgggataacaaaaaaagcccgccatgctagtgacacggaatttaaccgtgaagcatgacgggctttttgcattcattgacaaaattatttcaagatggagtgactcaaaatataaaaagcttcctgactagcttgatgatgcttggccttttccgggaacccctcatcgaatttgcgtgcgtccgcggggtcataagtcatggcggggctttcatgatagaaccacttctgcccggctagcgtttgcggctgcaactctttgactaacatcgcggttggctgggtattgtctgccgcccaaacgttgaatttttgacagctttgaaagccacgagcgacataattatcaggatcgccaaaaatgacaatcgcgccatagccaaggtcggctgcttgctgcatggatgcgtcgattagttgctttccgaacccgcgtcgctgataagctggcgtgatactgaccggaccaaatgtcacaataggcttctccaaaaccgttgcggtcaccaatttactcttggtgtacatgatgttgccaataatctgtccgtccagcgttatgacaagatccagttcaggaatgaagtcagcgtgatcgcgtaaaatatgggcgatataatgttcatcggccccaggcacataaagattccagaaagcattgcgatgaatggtttcaactgtccgataatcggatggctgttcagtacgaatggtgatgtttgtggtcaagattaattctcctaagaaaggttgcaattcgggactacttttatttcgaataaaattttttataggaaaatttattcagaaaaaagtaattataaaagtatgggaaaagctcggaaataaggcacttacataaagtgcgaaataaaaaccgaaactgccgttatcttacgcatccccggcaagataacggctaatctgataagctgatgccagcagataaggataatgagcggtggtacctgagtcagaaagtaggtggtgtgtatgggcaaattgtcgataacccacacattgatgagaaaggtgcacctgtttgtcagtgatcgatgttgtaacagcgatcacggcctgcgtttgttcgttagtagtcttggtcattggggtaacccagttgatcaaggcgacgaccaagctgcttcatgcagtaaacgaactcatgcaggcgctcgaattatttcgagaaaaataggcaaactaaaagccgcaattccttcgctgggatgccgcggcttttagttgcctaatcctagttaccatcgttcattagatgggtctgcaagggcaaatgcccggccgtcgtgcttgaacgcggcggctttttgcttgctttaagtatagcatggcgtctcaggatatttctagtcagacgactaaaaaatatgttgggtgattggttgaggcaatacgcgaactcatgcaggcactcgaactatttcgagaaaaataggcaaactaaaagccgcaattccttccacgggatacggcggcttttagttgtctaatcccaagtgccatcgttcattagatgggtctgcaagggcgaatgcccggccgtcgtgctccaacgcgacggctttttgcttgccgtaagtatagcatggcagctcagaatatttctagtcagacagttgtaaaatttcaaaagatgatttctaagtgaacgtccgatacatttgatagatgaaagataactcatgtttcattcaaatccgtttcctgacatggcaattattcagtttcagactgcgaaagccctttaacgtagccttctgcctgcattcggtacatttcggcataggctgcattcgtttgcatcagcacttgatggggcgcaaagccaacaaccttgccggccttaaggaataatactttgtctgccatcgtgacggaagaaagccgatgggtgacaaaaagaacggttttattttgacttagctcggcaaaatgttgataaatttcaaactcactgcgcggatcaattgcagcggttggttcatccaggatcgcaggtgggcatggtcgtcatttaagaaagcccgggcaatggcaatcttttgccactggccaccagagatttcaatgccatcttcatattgcttgccaaagtgcgtttgtaagttaatctgctggtttgaaaagttatcccatgcactggcttttttcagtgccaattcaacattctgcgcgttaaagtttggcagatcggcaatacccacgctttccagcagtgacaagttgaacttggaataatcttgaaagacaacgcgaatttggtggcgataagcatcaacgtttaattgctctatcggcgtaccgtcaattaaaatctgacccgaagaaacatcgtataggcgtaataagagcttaaccagcgtggacttaccagagccgttttcgcccacaaccgccacagttgtaccgggatcaagcttaaaattgacgtgttgtaaaacggttttgtgattcgtttcagggtaagcaaaagaaacatcgcgaaattcaattgcaaatggtttgtctggcaaagctgcggcattttggggtgtggttaaggcgtctttcttgttcaaaaattgataatacttctgcataaataacaacgtatcatacaacaggcttgagctttcgactaaacttcccagactttgggacaacgaaacgacggtcactgcaaatgtgagtaaggaagccacaggatagttgccattttgaatgccaacgatgactaaatacagtgaagcaaccagcgccactccgttgatgaaggcatagacacctgaaatacgcatttgcttcagacggacttgactgaggcgacggtgaatttgctggaatgtatgctgatacttcttgataaaaaaatcaaaggcattaaaaatccgaacttccttggcatccgtattcgccagtaacgttttggcgtagtattgcattttacgggattgcgggcttctgtccaccatcgtttcaaaggcgtcttgttggatcttataggtgaaaattgcttgcggaataatcggtaataaaaccaacaagatcacaacaaaattaaactgtgacaataggacgatgtatgacacgattgataaggttccccgcagaaggtctaggccgaaaacgatcaagttgaccggccgccagctggcttgggaccgaataaactccagctcgtcataataggtcgctgtttcaaatgttgcgatgcctttgagctttttggcgtgcgccatcaaggcaagattgatatgtgcgacaagttggtctgtcagtaagccttgcgttaacgtgacaaccggcccggcaatacccaaggcgatcaccgagacactccaaacgacagctggtgcgagcggtgaatcgtggtgacttaatgcagtcaaaagcgcctgagaaccggcaatcgttgctgcaggtagaacggactgaattggcaccagaatgaaaagaatggttgcgtacaagggtgacgctttaaagaactcacgcaaactcttccagtataaatttagaaaattgactaaggttttaaccatgtttgcatcttcttatcgttttctaatatttaggatgattatagcatgtgctggcatgcggaatacagttaagttgatcgtgttcgttgctaaagcagtgtcagcaaagtcttaatttagcggaagtgatccttcaacagggatggccgctattaccgctacaattcagctgaatcgatcttgaatgacagacgatgatgacgataattgatgttttaaatattaatatcggaattcatttttaaacaagctaatactaattgatgtccatcactttataaattttattctattatataaatgtttttggatattattagtgatacaaaacgtcaataatatttctttttaaggataaaatacttgacgtcattaaattttagtgtactattcattataaaattgcaaattgtttatctaacagccgctagatgtatagggatcgagtatgcaccgtgagtttgaatgatgactttctttacaatgagcgtcaatactcacaagctgattcataaagccgggctgactcgttagatattacagcttcggcgtggagaaaatggggatgtttgcatgctagcaaaattaagaacgttaaatcttttatcagtatttttggcagcaaaggggacgctgctgatttgctgcgccttgtacttttgttttttactattttcaactttgacaagtacgtttctaattcccgctaacgatcttttgggggatatttcgtcaatttctaagggcgagttgtggcggattgtgacaagttcggtttacttttcggattgggagccactcataaagacggtgcttgcaattctgatgattggtccgtttattgaatggaagattggcagccgtgcgtttgtgatcagtttctttgcggccagttggatcggagccgggcttatttgctttggctttaatggcattattcagtcaactgttggcctgaatacatatattgacgcattttatggcgcaaccttggcagtctatgccctgtttccgttagccggattggtatttgccattaaaagcccgccgttttctctgctgacaaagctcgttacgaccggagcatttctaggtgacttgattctggtgttttgggctaatgcgaataggtcagatcctgcaatcgttgttcgaattggccagttgtgcggtgtactgggcggaattgtttgcgcgctcggcatttttactttgaaaaatttgaagcaacgtcacttctttttggcaaagtcgaataactgagcttctcacggacggattgacacaaacaattttgaaaaatggggtgggcttatgctggcgaagttgcgaagagtgaatctgctatcggtgtttctagcagctaagggaacatgcttcatctgtggtattttggtattatgttatttgctcttttatgtattgcttaacgtttatctaattccctcgggtgactttttgggcaatattcccgcagttttaagaggagaattatggcgggtggtgacgagcagcgtttttcattatgattgggaaaatcacctattgcccaatatgttcgccattataattttaggaccgtttattgaatggaaacttggtaaggctgcgttcgtcattagcttctttatctgcagttgggcaggggagttgctgttttgctttggatttggaggatttattcaatcacacctaggaattggcagctatgttgagcggtttaatggtgtttcgatgtcggtatacggattatttccattagcagttttggcacttgtaactagtaaacctgccttttcaccgttgacaaaagttgttgcatttggcgtaattctttacgttttcacaaccggatactggccttatcaagaactatcagacacgagaatctatgagcagattgggcattcgtgcggttttcttgttggcattggatgtgtcttggtgattttgatacaaaggaatcggaagaaacgattgacgcatttgtgcgagccaattgaggcgctccgtggtgattaggcttagaaattgacagcgtctagtcacggttgatttccaagtgctagcggtttcaaataaaacatgctatactgcctttacaatcgaatagaaacatttggggtgctgaaaagctgagataatacccatggaacctgatgcagttagtactgccgcagggaaatgtcgctaagatcaatcgttttatgacgatgcttatttgtgatttcatggaccccgccagtgtttggtgtcgggtcctttttctttgagttgacctgttcgctaaccgattggcgggagaagttgatggagattcacacataaacatggttatgactgattgtgactgcttaggcccccgtctgtcttttgttcgaagaaagaggggcttttttgatggataaatggtctttgcgtgacgtggtcttgttggcgtttttagccttcttgtttggtggtgtcttcatgggtgccgatgcaatttatgccgtgttggcggcggctttgacaccactgggctatgcaccttttgctaacgagattctgtttggtatgtgggtgatggctgcaccgatgacgaccatgctgttgcggaagaaagggagttcaattcttggtgagtgtctggctgcgttggccgaaatgctttatggctcttattttggccctgccgttttgctatccggttttgttcagggactaggtagcgaggccggatttattgtgacgcgataccggcgctatgacacggtgagcttgcttttggcggcagtgggcaccaccttgtttagtttcacttatgaatacttcaagctgggttatggcgcgtacagcttcggcatgatcttaggcttggtcacggtacgtttattgtccgttattttctttggcgtcgttttggtgcagttggtcatgaagctttacgagcaagcagccggtgtcaagcgacttgctggcaggtaaaagccaatgggaattaggttgaaagatttgcagttccaccgggaaacgccgttgtttgatcacctgagttttgagtttgcgacaggtgcgttaacggtcctgacaggtgatagcggtagtggcaaatccacattgctcaatttaatcgccgggtttgcgccgatgacctattccggcacgattttgcttgataatcatgatctcagtggagccagtatgcaggtaaaagcgcagcaggtcgggatgttgttccaaaatcctgatcaacaatttaccatgcggacgttaagcggcgaacttgcctttgcgttggagaatctcggcttgtctgcaacagccatgatccaaagaagtaagcaggccgtggcgctgggcgatacgcaagcgttgttaaatcgtgacttgcagacactttccggtggtgaaaagcagcgggcagcattaaccgttttgctagcgatgaatccgcccattttattgctggatgaaccgtttgccagtattgatccggtcagtcgccagcagttgattaccaagttagggcgattgcgcgatgctggcaaaacgattgtgattgcggatcatgatttgcgtgattacgccggagtagccgatgcgctagttgctttgaaagacggccagctgaccaggctgccactcacaactttgaccacgattcccacccagtttgacttaactcaagccaatgcagccaccgtttcgttgctacgatttgaccaagttgtctgcgcccggaatcaccaaattttggtgcaggctccgacatggcagtttaataccggtatcacgactttgacaggcgctaatggtagcggcaagtcaaccttgctgcgggcaatggtgcagttgcatccgtatcgcggccggatgtttctcgacagccgccgattacgccgcactaaaaaactgtaccggacgatgacattggcggtacaggatgccggcaagcagtttgtcacattgactcccgccgatgaacttgcatttgggccagccttgacgccaaaagtacgcaaacgccaggcagctgcccttgcctatttgggattgacagaaaaacaaaccggcagcctgtatcacctgagcgaaggccagaaaaaaatggtgcagctgatcgcaatgttaagtctggagcgaacttttttgctgttggatgaaccgtttagcggattagatgaacgtgcctgtgctttttttgccgcgtggatcaaggaaaaagcagctaagcaggcgtttttgattgtgacgcaccgactggctccgctagctggcatcagtcaccagcatgtggcacttgccgatcaccggttacacattctacaggagtgacatgatgccagtaaaaaagaccaatgcagtaaatctgagtttatttattctgctgctgacacttgaaatatcttttagccatgcggtgagccttaatgtggcgttgatcggactggcaagcggttttttaatatggcggcgggcgtttaaaagtctcgtcgttttggccttgttaccgttgatcccggctgccagcacgtattgggcaattaccctgcatggtacggatacgacttacgctttgctgctgtgggttcgcacctatgctttcaccgcgttagggttggtgtttcttatcggggttgacttagagatcttgctgttatggctggagcagcataaattatcccctaattttgtttacggattactggttgtgattcacgccttgccgcagatcatgcatgaagtggctgctattcgtgaggcgagtctgttacgtggccaaaagttgcacgcgtggtcgccgatgatttatgtgaaggtgatttttgttgctatgtcgtggcaggaccagtacgtcaaagccatgtatgcccatggttataccgaaggagcaacgcgaacggttcaccaaaccatccgtagttcatggcgcggcttgatcgccatggtggggggctttgtccttttgaatctaattgcccgttagtttgaggatcaaaaagacgtggtcgtgcgatgtttaagcgattgtgcagcggccgacaccgcccgcgacagactaacgcgagctataacaaaatcattaatgaaggagtgcttatgaaattttccaaaattgcccggcaacaagttgtgccgtactgggaaggcagtttttcccatccgtttttgactgaattgcaagccgggacgcttgatccggccattttccgctattatctcattcaagatgcgtattatttaaaacattttagccggttgtatgcgttaatcgcccagcaggctcaggaatcagacctgaaagcttatgcagcgcaatccgccgcgggactgacagaaggcgagttggcggtgcggcgggacttttttgacacgctgatgatcaccgatgcagaagtggcagcaactgccattgcgccgaccgcctaccattatgtatcgcatatgtatcgccaattagttgccggaacgccgcacgtggccatcgcggggatgttgccgtgtccgtggttatatcaagaagtcgggcaatatctagcccagcgccaatcaccggtgccaatttatcaacgctggattgaaacatacagcggagcggccaacgcggatgatcagcaggccgcggtggcattggtcaatcgattatacgatcacagcacatcggcagaacagcagcagatgctaaccgcttttcgaatcagtacccagatggaatacagcttttgggagatggcctatcacctggaaaagtggccggaagggagtcgcaacaatgacgcaaaatcgcgttaaacggctagcaatattggccatgatgatcgcactggacgtggtgctgtcacctttatttcgaattgaagggatggcgccgatgtcgagtgttgtcaatattgttgctgccgttgttatggggccgctttatgccacagttatggcctttgcctgtgcgctgctgcggatgacattattgggcatcccgccgcttgctttaaccggcgcggtgtttggcgcactgttggctggaatcggttatcgcattggcaggcggtcggtatgggcagcagctggtgaaatcctcggcaccggtttgattggctcgctgttgtcatacccggtgatggtttggttcaccggcagcagtcagtcgctatactggttcgtctacacaccgcgatttttcggcggcgcgatttccggctcgctgattgccttgtttgtgttatacgaacttgaccatagtggcttaacccgccggctgcaaaagatcttttaaccgctttacccgcacttcaaaaagaataatttataggaggcacataccccatgaatcaatccgtaaccacaagctttaaacaggcgtttgaatccgccttgccactgacttcatcgccgttagttcaatgcattaccaatgaaattacagtcgagtccatggccaatgcgcttttgtacattgatgccaagccggtaatggccgatgccgtgcaggagtttccggaattttttgcccaaaataatgccttactgcttaacttaggacatatctcgccagaacgtgaaaagagtctgctagcggcgggtagttttgctgctgaaacgcataccccggttgtggttgatctagtcggtgtttccgccacccaattgcgatatgaattagggcatcagttgttggcgaatcacccgaatgtggttaaaggcaatatttccgagatgcgccgctttagtggtctgaaaagtaccggtcgcggggtggatggcagccagctagatcaaggcctgctgcattttccgaacttgctgaagcgttgaagcggttgacccggcgttttcctgcgaccacttttttggcaaccgggcaaacagacttggtggtcagcgctcatggccagtggcgcctggaaaatggcgtcttgcaactggatcgcttcacgggaaccggtgatatcgttggtgccttgattgcagcgctgcttggggtagggctcacaaacgatgcagctgtggtcgttgccgttagctattttaattgttgcggtgaagtggctgcagccgaaaacaccggcggcctcgcgtcatttagagagaggacgctggatcaattatccttgttggcaacgcatcaagattggattcaaaaggtgaaaggacaggcactatgaatgcagaagctttacaactttatttagtcaccaaccggtacgccgattcgcctgaagtttttttagccaagattgccgcggcgtgtgaaaatggcgtcacaatggtgcaattacgggaaaaatccctgacaacccgtgattattacgcgctggcaaaacaggtcaaattgatcaccgaccgctatcggattccgttgatcattgatgaccgggtggatgtttgtttagcagtcgacgcagccggggtgcatattggcgatgatgaactaccggttgcggttacgcggcagttgcttggttccgacaaaatactgggcgtctcgaccaaaacagttgcgactgccaccgctgcggttgcggccggtgctgattatcttggggtgggcgctatttttccaacccaaaccaaggccgctgctccgttgacgtcactggcaacgctaaaagcaatcacagcggcagtctctgttccggtggtggcgattggtgggattaaggcggataatcttgacacctttaaggcaaccggaattgccggcgtggcgattgtcagcgagatcatgcaggctccggatacggcacagaaggtccagaccctcagcgctaaactgaaagaggtgttataaaatgacgattaacagcacgcctcaagtcgtcaccattgctggctcggattcaggcggtggtgccggtatgcaggcggatctcaaaacctttcaggcacgtcatgtgtttggcatgagtattgtggtggcactcacggcgcaaaacacatatggcgtccaggccagtttgccgattcctggcgatttcattgatgcacaatttcaatcattggcggcagactttgcgatcaaggcatgcaaaaccggtatgttagccgatagtgagcatgtgaacgccgttgtccgcaatcttaaacaggtcaatttcggtccgttgatcgtggaccccgttatggtcgcaaaaggtggggcaacgctgctggccccggaagccgttgcgacgattaagcaggaactattgccgctagccgatgtggtgaccccaaacttgccggaagcagaaatcattgtggggcatcccattaagcgtgaagccgatatgatagcggcagcgcaaacgattcaggaactcggcgtcaaaaatgtcatcatcaaaggcggccaccgtcaagacgctcaagcttcagacttcattttgttagcagacggcagcagtttttgggtacggtcgccgcgcatcgccactggcaatacgcacggtaccggcgacactttttccgcctgtattgcggccgaattggcaaagggcgagtcactgaagaaggcgattatcacagccaaagcatttcttgaaggcgccattagccaaggcatttttgtgggccatggacacgggccgaccaatcattgggcaacgttaagcgaagacgttcaggtgagcgcggtaaaatcatcggctggtttgcagggatagcaacctaaccagaaaaatcaaaagtaagtcactcatcatgatggggtgacttattttttagtaaaaatatttttatgaaacgctaccatttcccgtgtaacaacgatccgaaacgctggtatagactagcgcagcgctgtgaaacactattatttttatgaagcttcatttatacttacggcaaggagatgcgaggttctcgatcggtgttcaaaagcgtggctgactgtctgggttaccgtcattaaatcggtggatgaccggtgatcaaaatggcagtcggatacgtttaacctgacgatcagaacccacgcaagtcagcttggtgcccggtaacttggaagcttaagcgacccacactcctagtttgtatttggaggcattaaattgtgcaagaaaatgaactgacaccccagcgttatatgagctggccagttttaagtttgcttgtttttattacggttattggttttgaaaacatcttctacccgtttcaaaatcaaggcctgtctgttgtgatcaactgggtgattttattaatcgtctacatcgtcccgtatgcattgattgcggcacagctggggacgacttttacccgggctgatgaaggcggcgggttggcaacctggatgcggcggacgctgggggatacctggggttattggaccagctggatttattgggctcagacgctgccttatctggttgacgtgtcaaatgccgttattgtggcgctttcgtggatgattctcggcgacaatagcttgggtaagcggatgtcgaatctgacatttggcttgctaacttttgccattattcttttattcatcgtcttggagaatctgttctcgcggtcgcttgaagtgatgtcgctcatcggcggggcagccatgtttttgatggcggtgctatttgtggcgttgaccgcggcgggattggctaaggggatgccctcagccacgcactttagctgggacgcatttcgaccccacttttcactgcattattttgcgacaaccgggctgttgatttttgccacttccggtgcggagctgggggccacgtatatcgcgcagttgcggaacccgaagaagcaatttcctaaagcgatgtgggcactggcactgatgaccgggtttttggtgatcttcggttcgcttgcattaggcgtgtggttcaacgccaaccatctgccggatgacttgaaaatgaacggcgcctactacgctttttccatgctaggtaaggcgtggggttggggtaaaacgctgatgtatttgtttgcggtcacgcagctgttgttcatgttggcgcagttggcggtgttgattgatgcctctagccgtgtgttgtctgccgatacggcgatgcgctttatgccgaagtggttattgcagaagaataagcaagggcggccagtacatagctatattttcaccgcctcactttgcttgttcctgttgttgctgtcgggcacattgccgaacatcaatgcaattttcaactggctgctgaatttaaacggcattgtgtcaccgtataaaacggcgctcgtgttcgtggccttcctggcgttgcgcgctcaaaccgacaaattcacgtccggctacacctttatcaagagcaaaaccggtgcctatctagtcggcggctggtgcttcgtctttacctttatctgtgcaacactaggcttcttacctcaggaagttgtgtttggaaccaacggctggacccatcagctcatcatgaatatcatctccgtcatcgtcctcttcggctttggtttcatcatgccgctgttggcacgacgagatgtgatcaaggaaaaattgctgtaagcagcagatgaatcgttatcccgaaaagttttgggataacggtttatttttttgcatcgaagaaggtgttggcctcaatccgaccagcaaaaaagtttcacagccattgagcagaattcacaaactgattgatactgctgttatgcaacaggatcatgttttcagcaatacagatacgcacctcaagttaacaaaaagtctggttcacacaagatccgtgagatgacactttgcaagccggtgtatagcagttgattcacccaacaaatgagctgcatgttaatttaagctaaatttgtttcatgaaaaatgatttgatttagttgacagcgcttccatgtgcggggtaagcttggtttgcaagattaagtaaaacgttttacctaactcagcaaatagggtcgtggttggtgtgaagaagaaagtttcgattacggacgtggccaaggaaaccgggctttccgtcaccactgtttcgcaaattttaaatggcaaaggcgcgcggtttagcgaaaagtcacgcaaacgggtgctggccgctaaagaagcattgggctatgaaccggatctttttgcccggggactagtcggcaagcgcggcaactcaatcggggtcgtgattcccgatatgatgaaccccttcttcgccagctttgtcgttagcgtggaaaaagccgccattccgcgcgggctgtttccgcaaatcttttcgattaatgggttccatgaaaatgttgattattttattcgacagtttctgggcggtacccaacgcggactgattcttgcggcaccggaagcttcacaggagattgtccaaaaagtcgggaagcaattgaatctgcccatggtgtttacggatcaggcgaccacgctgatgaccggcgacagcattcggattgacgagcggcatgccgggtttctggtggccgatcacctgttgcagttgggtcatcgccgcatcgcattcgtattgccgcaacgattgaccgttaacttgaaggatcggatggcaggttatcagcaagcatttgcgcagtatggggtccagctagatccggggctgattttccccagcgcgtttaatccggaaggcggtcggcaagcggtggcacagatcgtcaagaccgatgccacggcgatcatcgcgatcaatgatgatgtcgccagtggagtctaccgcggcttgtatgagcaacacaagcggataccggctgactacgcggtggtcggattcgatgatgtcacacaagcacgctttatgacgccaggattaaccaccctcgcccagccaattgatcagttaggccaacaagctgttgaactcctggttgcgcagatgagtggcgagcataacacgcgtaacacaattgagctgcccgtgaaattggtgaaacgcggctcaacgaaaataacgaaccaccgcggctaatcgtcaaggcattttcacaaggaggaggacgcattgaaaaaagggactgtcatcaacacccaactgtcacaagtgattgccgatatggggcactttgacttgttggggataggcgatgccggcatgccggtaccagcagacacatggaagatcgatctcgccgttagcagaaatctgcctagcttcatggacgttttgaaaaatgtcttaactgaactacagattcaaaaagtctatctggccgaagaaatcaaaacgcaaaatcccaaacaattagaacaaattcagcaactcattgacgtgccaattgtctttatcccgcacgaccaaatgaaaaaagatctcagcaaaactaaggccttcatccgaactggtgagatgacgccttatgccaatatattgttggaaagtggcgttactttttaaaacagagcgtgaactggtgcggttagcgatcggaatgtaagcggcctcagccgtgatggcccggtcttggccattgcggcagaggtccttacatgcagatcgctgcaccagtgaacgcgtttcagaacaattcacaccacaatcagcacttgggggaaagcaaaatgaagatcgaaatgaaggagatcaccaagagctttggcgccaatcaggttttaaaaggggtgaattttaccattgattccggtgaggttcatgccttgatgggtgaaaacggggccggtaagtcaactttgatgaacattctcaccggcttatacccagccaacagcggcgaaattcttgtggatgggcagccaaccacttattccggaccgatggaggctgagcagcatggcatcagttttatccatcaggaaatgaataattttctggaaatgtccgttgttgacaacatgtttttaaacaaagagctgcgtaatcgttttgggttgatggacagcaaggcgatgcgcgatcaagccgatcattatctaagtttgctcggggcaaagcttgatgtggatcaaccgattggcagcttgagtgttggtcgccagcaaatggtggaaattgcgaagtctttgatgaccgatgctaagatcatcattatggacgagccgactgcagctttgactgagacggaaattagtcaacttttcacagtggtgcggcgattgaaggctaagggcgtgggatttatttatatttcccaccgcatggaagaaattttcgagattgcagacaaagtgaccgtgatgcgagatggacgctcaatcaccgaatacgccaccaaagatgtcacgatgaaacagttggtcaaggacatggtcgggcgggagatcgaagacttttatccggagcgcacgccgacttttggcccggttgcgatggaggttaagcacttaactgaaaaaggcgtctttcaagatgtcagtttcagcgtccgtcaaggtgaaattctcggtttttccgggctgatgggtgcggggcgaaccgagattatgcgggcaatttttggaatcgacaagtatcagtccggcgaaattctgctggacggacagccggtcaagattcgtgatccgcaagcggcaattcgtcacaatctcggtttcttgacggagaatcgtaaggacgagggattgattctggatgactcgcttcacgacaatatagttttgccttcgattgatgggtttgtgaaacatggtttggtggacgataaagccactgatgattttgttcgattattaatgaaaaggcttacagtcaaagcgatgggaccggacgtgactgctggcagcctcagtggcgggaatcagcagaaggtcgtgttggctaagtggatcggctcggggtcgaaagtcttgattctcgatgagccgacgcgtggtgtggatgtcggcgccaaacgggagatttatgatctgatgaacgagctaacggatcggcatgttgccattatcatgatttccagtgacttgccggaagtattaggaatgagtgatcggatcgccgtggtttatgaagggcgactgactggtattttggatgggcagaccgcaacgcaagagtcgattatgacgctggcaacagggggagtggaagaacatgcaggcgcaatctaagacaaaagcagctagcaaagtagacgtaaaaaagatttttagtcgattgggaccgctactggccttggttgtactgatcattttggtcacggtgatgagccccacctttgtgtcaccagccaacctattgaacttattgcggcaggtctcgattaatgcggtcattgcctttgggatgaccttcgtaattctcactggcggaattgatctgtcagtcggctccattctggcattgtcaggtgcggtcaccgcttcaatgttgacaagcggatttgccgctccactggcactcacggtcgggctgatcttaggcgctgtgtttggactattgaatggcgtcttaatcgcttatgggaaggcagctccgtttatcgcaactttggccacgatgacgattttccgcggcgccacctatgttttcacaaatgggaatcccattaccggcgcgaaaatgaacaacagcttcttgttccagttcatgggccgcggctatctgttcggcattccgtttccgattatcatcatgattgtagtttatggcgtgctgtttgtgctcttgcataaaaccgctttcggccggaaaacttatgccttgggtggcaatgaaactgccgctcggattgccggggtgcgcaccaaggttgtgacgatgctgatttacacgatttccggcttaatggcagcaatcgcagggatcattctcacatcgcggctgagttcagcgcaaccggacgccggtacttcttatgaaatggacgccattgctgcggtcgtgcttggcgggacatcgctggctggtgggaaaggtcgcatttttgggacgttaatcggtgcgttgattattggtactttgaacaacgggatgaacttgctggggatttccagtttctatcagcaaattgtcaaaggcatcgtcatcctgatcgccgtgctacttgatcggcggtccggtaataatgggtaattcatcgcaggcgggtgcttgcgagttaaaacactttaagttggttgctggaactgagtcgtgcagagtcacgctcacattaacgcttttacaataggaggagagtcttcatgaaacacacattcaagcgcttcttaatggttgcagttatcgctgcagctgcgatttttaccttaactgcttgtggaaacacggggttggggtcaaagtctgacggtgatgcgaaagttaccaagaaagcgcctaaggatctgaaagtcggtgtgtcgctgtccacattgtcgaatccattctttgtttccgtgcgtaacggcattcaggatttggcgaagaaaaataaaactaatgttcaggtttccgatgcccaaaatgacactgctaaacaaaacaacaatattgaagatatgatccagaaaaaagtcgacattttgattatcaacccagtcgattccagtgcgattacgccagccgttaaagatgccaatgatgccggaatcccggttatcaccgttgatcgttccagtgatggcggcaaagtgttgacgctggttgcctccaactcgaaaaaaggtggggaaatggccgcgaagtatatgattgaaaagctcggtaagaacgccaagattgccgaactgcaaggaatcccgggcgcttccgcaactcgcgaacgtggaaaaggatttgatggcgcggcaaagggtcagcttgacattgtatcaaagcagacagccggttttgatcgggccaagggtttgacggttaccgagaacattttgcaaggtaacggtgatattgtcggtatcttttcacaaaacgatgaaatggcactaggcgcggtgcaggcagttaaagccgcgggtaagaagattactattgttggttttgacggtgaagcagatgggattaaagccgtcaaagcaggcgacatggctgcaactgttgtgcaaaagccagaagagatgggacgcttagcactgcaagcagcctatgatcattttgacggcaagacgattaagaagaatattgaatcgccgttgtcattagtcaccaccgaggatgcgaacaagtaagcttcatgctatgctggtcaagcaatgtcgcgcggtaaggtaaacaaaaaaggggccggatgcggtcccttttaaatggaaaaatggaggggtctttatgcctaatcatgttgtcgttattggcagtatcaatgtggatgctatcttgcacattcaacgactgccacagccgggggaaacaattcaaatggatgctttttctaaagctgccggtggtaagggggccaatcaagcggttgcggcggcgcgatctggcgctaagaccagtttcatcgggcgcgtcgggaatgatgccaacgctgctttcatgcgcggcgaattggtgaaaaatcaaattgatacccaatatgttgcaaccaccgcagacacggaaaccggacaggcatatattctgctccaagcatcgggccaaaactcgatcatcattcaacatggcgccaactttgaactgacgccagcggatgtgcagcgggcgactggcttgattcaatcggctgactttgtggttgctgaactggaaacgccggtagccgccacagccgaagcattcaaaatcgccaaagctgcggataaagtaaccatcttaaaccccgcaccggcgcaaaaagatctgccagaagcgctgctgaaaaatgttgatctaatcgcacctaacgagactgaaagcgaattgatcaccggcattccggttaccgatgaagccagcatgcgccagtccgccgcgtattatcatcaactcggcatccgcggggtggtcatcaccctcggctcgaaaggttctttcatttcgctaaatggtcaggcaaccctcgtcccggccttcaaggtcaaagccgtagataccacggcagcaggggatacctttatcggtgctttagtcagcaaccttcagcccgatctcggcaatattgtcgatgccgcaacttacgccagcatggccagctcgtttactgtccagaagctcggcgcattcccgtcgattccgatgggggatgaggtgcgtgcggggttggcaaaggttaaaatgggtcctgcgtaaggttaatcgtgtccgaagaagatcagttagactaaaatcgcgtcaacttctcagaaaatgggaggtcgacgcgatttttaaggttggcattagcggcctatcaattaaactatcgagacccttacttgcttgcctaaagcatttgcgattttggttagcgtttcgatgcttgtattgcttcctcgttcgatacgcgcaatcgttgtcttaggaacgcctgatttgtttgcaagttcctgttggctcaatcccgcattttgccttgcctctagaacagcataggcgcttgccagcttggctttttcagattcggctagcttcctgtagctggagtcttgcatcatctcggcgaagaaggcatccatatccgttgacgttgtttcagtaaatttctttatgttcttcaagattttttctctccctaactcggcatccgcgggctggtcatcacgcttggttcgaagggttccttcatttcggtgggtatagtagtgtttgtaacggttactgaatcacgtttaaaggtaaacacaaaccttctcctaatttctattagaacattgcgttttagtcagtcaatctgtttaaaaaaactgcaaaagaccttcttccaatttcgtaatgcaaaaatcataattacacaaataattccagcaaggaagccggaaagatgtgcaatttgtacaaatttttgcgcgtctgtcgcattctgtttcggcaatattcctaatataagagtaaagaatgccaccgttaaaatagccttcgtaattaaagaaaaatcaggtttctttattaaaaaagcaaacacggacattgggaacaaagcataaactgatatagacgcaccatagaacagacaaatgtatatgcttattcctaaggctgactgaatatacccgccaaacccaaagcagaaaataagggctccaatccaaccagaagtaaagaatccaatcacaagcgcgacacttccaattttccattctatgaaggggcctagaacaaccgttgggagaagattccacattaaatgattccattcaaagtgatatagcggaccagttattatataggaaaattcacctcttaaaactgaaggtatatttcccacaaagttggatgcaggaaccataaacgtattggttaaaattgaaaacaaaaagtagcaagaaactaatatacaacagatgacggaggtgcccttagctgctaaacctattgataaaagattcgatcttttcaagttctgtatcatggatatctaacctctttctttcgagtcggattcatgtctacaaatataagtattcaaaaaggcggacttgatctgttccgccttctttgttacctataggcctagttttgtttgatcataactctccaatcaaaaactagtttcttgcccaatgccggccagcattacggtattgatttgaagatccgtaatatggcgaaccatttgggcccggaaggtctgcaggagtaaaaatgtttctaccaataggcaaagcaccaccaccaccactgttgggtatgtgatcgccaccaattgtggtctgaagagtctcatctgagatcgtagtgatgctttcgaacttaatcatattaacgttattcatgttattcctccatgcttgcgacaatagtgacattacgatgttaaactcatgagtgtagcgttaatatatcgcaacaaagtcaagtggtcaagaaaaaatcaattttctgtagtaaaacgcttagtaagtattaaaaacacaataaattaacattatatataattgttttaggccaaaaaagaaaatataaacttttgacgatgccatatggattgctaggaaagtaaagcgtggtcatagacacacaaaaacccttatgtggaaaatcgagccatattggcttttagataaattgactgaacgggcaattcccaccaagatgttcttgaatatttgaattgttgtccttcgcttatgttctatatcaattagaagttaaaaaattctgtttgattggatggacgattggtaatttgtatttatgagtcatcccatagattggcgtttgttcatataacgtttggtttaaatctccacgatacggaatgatatttccgctcctggctttggtgagagaatttgaatctaactgtaagacattgtttaccagtttttcgagcattgaatgtcttcctttccgaaggtgattgtttacgggactcactaaattagaatgcacaacagtaaatggcacaaatcaattttccacaacactttaaggaaaaaataatcaaatacattagtaatgattaaactcattaaaaaccgtatgtaagtactgtacgcagtgatcactttgggtgtaattaatttgaacgccttgtcgatagttgaatacccagacattaatctttaacagatcaggatctttaatggattgagcgactacatttgtcccgcgtggcaacagttcatttcccatatatacagcgattacttgacatgctaagcgtcattgaggtgtttgggtttagattttgtatcgaggtacaaatgaggtcattattatgtggatcactaagcaacaacgaaaagatgcaatcgacgggttaacattcctttatcgggtcgcaacgcgtgatccagtggatgcgcaacgaaggattgaaagaattattcttagaaatgcaatcaaaccaagtagagagaatttgacatttgactccttgggttgatacgcggtgtggaacccggattaccttgtgagaaattattatcaacttctgtttgaaatttggcattatgcagaaaaagtcaaaaaaggtgaaacagaatgatgtgccagctgtccctattcggtgaggtagctctattatcaagaaaatccgtgttcttatttatagatcgcgctagccgggagaaaaaaatagccgcttcccggacaggggaggcggctattgtgttgttatactgatttccttaacctaaacgaactatatcacatttgatcgttttagtcatctttaaatttaaatattagcgaatattagcgagccggatttaaaattattgttgaaactagagctcttgaaagaaccgttgatgatgaaatgtaattttgttgaaacaaaaaagagaaaatcatttgcgaggaatttatgttgttacagaggcagacatgaccaaacccaactgccggctgtaactatgttgagtataggatagcgagttactaaccttgcttcgagtaaagttgacaggaattgttactagttaaaaaggtatgtgctatgaaatggcttagacttataagcattaaaagagtattgatatttggtgttattgctgccattggttgcaaagtaacagagctagcaacccacatagacccaaatgttgccagctatatttgggtgctaggtctctttattacctataaggttgcagacgacatctcaattaaagttactgcaggtaaaaaaggggttaaattatagttgcttgacagtttccgatggatgtaatcggaatgattaatatattgccgctcgcgcttaatcaagtgctgcataatctttaacaagtggccattaattaaactgaccaagaattgtccaagactggcaaccagacattaaggtcacctatatgaagcaccaactatcattcagcatatcccatctttcgaaaatagctttcaatgcttggcaacacctctggccgaagtggtggggcaatgaagtatagagatgttaagatccttttccaagcggacagtcgataataggcgcttaagtttgatggattctgatcatagtctgcccagcgttgttgatcagtttctgcgagaacacttgatatttgctttaactgaacttgggaactgcggctggcagtttgaatgattgtagcaagacgttcttcttcatcatcgaggaagggcgttttttgccggcttaaaatgttgggaataatcgctaaggcctgtttgatttgggcgggggttacttttgggtgtgcgattgcagcacttactaagtcactaccatgtgcaacggcatgtgcccagcctttttcaggaataaagccacgccagtcctgttccaaacgaaggtagttgacggcccaatttaaccacgtattccgttgcctggtcgttaaaaaaggttcacgagcatctgcgtccagaaagagagcgcctaataaagccgtgaatgtgcgcgtaaagactttatcactctgcggattatcgatgccatcaaataattgcgctctttgagttgccacatcggctaatagcttcctttgatcttttctaaaacccggtgtttggaagccacgcgcgaacaaactataaacaagttgatcgcgaatcttacttttggggtcaccaacatggtctagtagccaaatacattggttatccgtgaagtgcaatggatcttttgctaggctcagggtgacaagttcttggtacatgaaggtcatctccttttcgagggtgggtctttctcaacacgaactttcttgtcatgcaaaaaatgattaagcagggtgatggttcaaaaaatacgtcaatttcaccggaatatgtgagattggcgtatcttcgaaagtgaccattaatttagtacaaactagccacaaaaggcttcattgccgtcacgacatccccgctgccggtgccttcgatgagggcgacggtgaggtaggtattcttgtcggcatccatggcgactaagaaaccattttccttgccgtctgtgtcctgtttctgcttgagttcggccgtaccggttttggcggcgatggtgtggccgtcgatggcgaggtcatgggcggtaccggcttgatcggagacaacgtgggtcaaggcggttttgaccgttttggcggcattgctttggagcacgctggtacgttttccttttgcagcttgaatcaaggttggctgttgcatggtgccgtcattggcgatggcactgtacatcgccgcctgttcaattggcgatagtagcagttgcccttgaccataagcggtgtcggccaaaagcgtttcggaggcgagcttgccattgttggagatttgggcttttttcatggttaaaggtaagttggcttgcgttttgaaaagtggctccagacctttgaggtaagcagaggcgcccattttcagtgctacttgagcaaaccagatgttgtcggagttaaccaaggcctgggtcatgttttccgggccggcgtcaacggtgcgggttactttgtagtcgccccacgaactatctttttgccatttgagaccggagatagatttggttgtgtcaggggtgatggttttgttttgcagggcaatcgcagccgttagcattttaaaagtggaacccggtgcgtaccgttgggtgaaccggctgaggaatggtagctcggtgttgttggcgtatttgtcatagttggtttgactgatgccgttcacgaaggcattgggatcgtagctgggggaactcgctaaggttaaaagttcgccgttggttggatccatggtgaccacactgccgcttttgcctgctagttgggtataggcggttttttgcttggtggcgtcaatcgtcagtttcaggttcttaccggcaactgccttggtgtctagcagggggtggctgttgctgccgttgcgaattgcgatcgtgccgccatccgtaccgcgcaagtaatggtcataaatttgttccaaaccggctttaccgattttgctgttggcggtcagtgacggatgctttttaaggtcatcggcggttgccgtcccaacgtatcccacgagttgagcagcggcctcgcctagcggataagtacgtgagccgattgtttggtaagctgccccggttaatgcaggggaatcggtgacgattttgaccggtacaaacgtatcatcagtgacccaggactgcttgaggagcgtttcaagacttgaggttttcacatcccaggcagtcgcaatttttgctagattagcggtccgttcatcgccggagcccagcttgccaggaaccaggccggcttgggtgacattgccgttggtggcgagtgcctggccattacgatcgagaattttcccgcgcgtggcagctgtcaaactaatctgaaccgtgtccttgccatccatttgtggaaacagcaggcttggcgtccagcgaatgcgccagttgtcgccgactttaacgatcggcgcggtgtaatgctgtgccgggagcttgccgattttggtgttcatgttggcggtaaaagtgagttgataggtaccgtctttagaattggttgttttcagatccgtgattttaatgttgctagcgccgatccggtcgaaaacggcctgattgcgctcagccagagttttggcggtatactgccagcccggacctttgaggtggctagtgtcgacttgtttaacggctttttcatattgacggttggcaaaagctttcgtgtaggcttgagccgtggccttaacctggtcgccttcagccttgccttggtaccagcgaaaggcaccgaagccacccacaatgacgacaattgctgcgaccacactaatcaagatggtgcgcgtcgatttcttcatgtctgttccccatttctagtttttacgcttctccatgtataacgccattctacgcttctgggggaagggaagaaaccgggggaattttgcaatgattacagcctttgtagaattgctttagacgtactcaacgctaatcaaccacatcattccagcaacaacgaatacttcacaagataattctcgacgggcacgaggaagctgaagcgcattttttggttgcgatgctcataacttgtccgagttgctgagaattgtagggttaatggttggcgcacggctgaaggatgcatcgctggtttaaccctgactttgttgttatcgaaaatggtatcggtttggctgctcatgctataaggaatgttcaaccacatgttttcgatgtaattagggttgtcctttttatgaccataatttgccggtcctgtttgtttaatcgcgagggtcacaggaacgataacctgatctttctttttcaaaacctgaaccttactgaccctaaagtcgacattttcagcatgaacaagttggcctcttttaatcagcacctctttgatgacgcctcgttgctgcgggttggcattgacctgttgatagcgcagaaagccaataataccgaggaaaacaaccagacatccgctaatcatccagaacttgggattaactttcatgctggatcgtcccttccttgacagataacttatgagtcgcaacctgttcgacaaattcgtgattgtgcgaggcgatgacaaaagttgacccgttggcgttgaagcgttgaatcaggtcaatcaatttgataatactgtcatgatccaaagcgttggtgggctcgtccaggacaattaatggatagccgcctaagaacgcttcggcaatccccagcttttgcttcatgcccaacgaaaatttgcggactttttgggttggaaaccttgtgagctcaaaataggtcagcaggtcatcgagttgttgcggttggatagtgggatctagtcgtgccaacagttctagatttttcattgcggtgaagtcatcaatcaggctgggattttcgatcaaaatgccagccttaatcggataggcttcttgagggctgaccgtctttccggcaaccacgacttgacctgttactgtgataagaccgagtaatgcttttaaaattaatgtttttccggagccattaatgccttcaagtgtcgtaatgctgccacgctcaatgcttgcttcaacgtgatgcaagagctggcggcgtttaatcgttttggccacttgatgtaattcaattaaacccataagtttctcctttaatttaaactggcgtgacgctcaacggctaagtaacccatcgttgctaaactgctgacgccaagcagaacaagaatggggtgccaagcgtttgttgcgttgatccgtgtgagcatgaggtaaccaagcggattcatgcgaatagccgtataagcattaacgatgagcagacaggcagggatgatgagcgccaatgacggactaaaatgattaccgatcgcttggagtaataatagtaagaagacgcctagccaagtggtgacaaaaagaccgccgactgctgccaatccctgccaattaccgaaatgaagattaaaagcggcggcgatggccatgataccgatagcgccgacttcataaatggtggtgatcaaggcaataagcatgagattcacttcagcaaatttccgcggcgggatttgaagtcctctaagatgaatcgtgcgggtgtgccaaagttgttggaggccgttgagcagtattaacaaaggcacgaaaaaataagcaaaccataatacaggtaacacgacccgatgcgtttcagcagctctaaaactcaccccatcaaaaaacagtgagaaaatggtcgcatgcggattcccggcagtttgcatgcttagaagaataaccacagcattcattaagatgaaccaaaaaagaaagcgcgtgcgaatgaggtaccagaagaagggtaattggttgcaaaataaacgccagatcataagtccctcctgttgacgatggcggtcaataaagcagtcatgaaacaaaccagtcctagcatgatgatgccttttgccagcagtaatgggtttgaatcgcgggcggaaaagtcgaaaagcagcgaaggcaagtgagagatcacgaggaaaaacgatagcccgcaaatgccaaagctaacgaaaaaggccatgagcttgcttttggttgctagcacaatcgttgcggcaatcaatccgagcagaaagcaggccagccaaagataaacggcgtgaatcagtaagtatagccagatggtttccagaagataagcagcgccattgacggtgatcacggttatgttggtcaggctccaaatgccggccatcagtaaggttgagatgctgacgcggtaaaggatttgcagcgtgattatttttcgcgattgatataacaaaacatcttgtacccggggttgaatgcaaggcagtagactgagcaaataggttggcatgaggccgctaaagatgaggtagcgggggaagatgaggaccatgatttgttccggggaggaggtgagttcaccgattaagttaatcccagttaaactgatgatggcggtaatgaggccacagacgagataaacttttaaaaacgctggtgtcagtaagttctgttgccgaatgacattatggtacaagccgcttcacccctattcgggcaaaaaccaggcaataagtgagcaacgtcaaggtggcgaggccggtgaccggtaaactgatattggtattcggggccatctcgtgcaggaaatcggctggcgagaagctaactaagtccggcagcatgagtaaactgttaagcatcaaaatcgcaatctgcacaatcaatcctgtgctcaacgccacgaaaacatgcttaatccacaatgacgtcaccatgacaaagacggcgaaaagcccaccccaaaagctcgcaaataaaattgaaatcagtgcgtgtaacaacggattggcgtaatacaggcttacaaacagcgtattttgattcgtcaaaaggatgttgctgttcagcagattatccggacgaatatttggcagcatcatgaagtaaaacaacaagttaagcgccaaaacaagtgccacaagtataaaaccggtcaaaaaggctaatccaacataggatcggataactttttgaacgggaaaacacaatttaacttttgccaacaaaccggagtcggcgtcttcttttagcaatgacgctgcagggatgctggcaatgagcggcaataaaatgaaaaagatgatcggcgaaaagttgaatgggtcaattgacagccagcgcgtgtacggcgagtccattggcggaatcgggcctaagacttggatcatttgtagagcgctaatggcaaaagcgactgacatggcaagtaacagtcgttttcttggtaagcgtagccatagaaatgacaatagggaaacacctcgctttaaatgaaatagcacctagcagaaggtggagtgggcttcggctgggtgcggtgaagaatttggcgtggttctggaaacatcgaaactaaagatgatcagggattagaaaaatttttgatgcaggctatgatttggagcatactattgcttaaagttgtggtcaattaaattttatggttaccattagctgcaaactgaaaacgtgggctgggagtgctaagatattaagaatgaaatagactggattttaatattgaaatatatttaattcattgataagggaagtagatacagtcgtgttgagagcttataatcccttggttgtcagtcgattttttgatgggatcacagatagtcgttagtcattatgcatgttcggatgcaaggttaacgtggcttcaaaacgcaatagcctttcacagttgaaagttttttagcagcgaaattatggcgaaacatttttttagttttagcaggtggtcggggtgagtgaaccgaggatgatgagaagtcggagtaagacgctaaaagaaatgagcgtaaggaaaatcttaaaataattgcttgcgcacgcaaataaatgcgactatactatcagctggaggtgagtatgtgttcaaacgctggctgatactcatgacgctcgggctgtttttctttatggtgatcattgatggcaccattgttgtcgtggcggttccgacgattgcgcaggcattggcggtgcagcctagtcgggtgaatcttctgttgacggtgtatttgaccacgatcagcgtgtgtctgttgttttttggacagttagccgatcaagttggccgaacgcggctttttattcacgggacgtattggtttttgcttggctcggcggtggccggattaggggtgaatctccagttggttttggcggcccgcatcgttcaggcggtgggtgcgagtatgaccatggcaacgagttatgcaattgtcgccgatgtctttccgccggcgttgctgggacgggcgctgggagtcgagtcgatttttatttcgttaggcgcgctggctggcccggggattggcggcttgattttaagccatcttccgtggggctttattttcttgggtcaatttaccgattggcttggtgtgtgtggtgattgaatggctggtatttccgcgcgcatcacggtcacaggcaaaagtacaactggatattcgcggattcctgatacttctactgctggggggattgttggtgatactgcagatcaatcgcgagccgcttgtggcaggcgttttgctggcgttgatggttgtcggcggcttgggattttggcaagttgagcgccatgcagcccacgcattattggatgtgcagctgtttcggcagtctagcttcagtcgtaatttaggggcgtcattgctgaattacgtcggggcgtattttttcacgttactggcgccgatttacttgcaagtgctgctcggcttgccggttgcgctggcggggatgctgttgatgttaccgccgctggtttcgctcgttgccaatccgctggcaggtattttaagcgatcgcgttgaccaagggcggtcaatgcgagtgggcctgggattgctggtgctcagtaatttgacgtttgccttggtacccagcggacaacggctgtggccatttgtactggtcgccatgaccttcgctgtcggaaccgcgttatttaccaatcccaacagcgtcatgctgattcaaagcgttgatgccaaaatgcgcgggcaggtgggtgcggcgacttcactggcacggcagttagggatgagcatcggcagcgccttttcgagcttggtgttttatcaagttttggcaatgatgacgcccgcccgtaaccttgccaaaaccgcaccagcagcgctattgaccgcacagcgagtgagtttccttgttgccgcaagcctctttttacttgccgcgatcatgttaagaaagaaggatggaaaatggactcagaaccagatgaactgatttcgcgggtgaacattctggcccgccagattcaacacgacttggatttgcggctggctccaaccggactcaatgccagcaactattactttattttgaagttaggcagcgttgaggacatgcggcaggatacccttttcaaaaagattcatcttaacgccagcaacgtgaccagacgcttggcacaactgatcgcgctaggtttggtcaccaaggaaaaggcgatggatgacaagcgtgcctgggtgatcagtttaacggcggaggggcgagcgttggttccgcgcgtcagccaaattgtcgccgagtatgaagcagaactaaccgcgaaactggcggctgcggacaaggttaagtttgaacaaatacttgatgtgctcaataaaacgaaagaggatgcgaatcgatgaaaaacgtgatggcgattttagggattccggcagattatcacgtggtccagacaacttcgcgaaccagaaacggtgaaccggtgacagtcgagcgcttgcagacctccgctgatatcacgccaaataacgcgcacataacgctggtccggaatgaagcgggaaccgtgatcagtttcaacgacagtacttttaaagctggcggaaaactgcctgctgctgaacgtgcgcgtcaccaagcaagccaactgttccagcagctggattcgacatacgccgccaacctgacctacatgcgcactgaacgccaagagcgccactacttcgatcatggcgaacgtatcagcacgccggtttactggatcaagtttgctcaccgcaacggttcgtacaactgggtgacgatcgggccggataatcgtgttattgaggtagagcgcgagtcgtactgggattacttcaggaaccgccgcgccacggagatgtggaattatgatgattgggtgctggcgtatgaaggtaaaggcccacagatggcagcgccgaatgcattggcgtgagtgttgtggaaaagggcagcctgctggtgagagagtgaaatacccttgatgaagtgagaaaagcagaaaagcagccttttggtgaaggaaaacacttttgaagtggtgaggaaaagcagaaaggcagccttttggtaagataacgtcttgatgcgaagtcagagacagaaagaggcgatccagtggcaaaaccggattttgaaactttagtcgcgcggcttggtgacttacgggaagcggcgcgccggttggcagacgaggattatatcagcgcgcggtataagggttatagttcagaagggctcacgctggaggaagtgctggcgaagttggagacaacggagcatgagattgctaagttagagcgggcgttggagcagttggcggatgaggagtgagcttgtgaagcgcaagcgaaaatgatgcctatgatagcaaaaattgagcagcttgattccgttccttctttcaataccttgaatcgttatgcagcagggctagggcttaagttgaagatttctataactgcttaaaaaatacaaacagcgatgcgattgacccgtgtggataaggagggtcaattgcatcgctgtttttatgatgtggcaggttattaatgaaatgtgtattggactgtcgggcaatgatgctaatctttgtctgaataaagatcctggcgaaaagacctgcagactttttaaatttgcgctgatattttccaaatcaaggagatatcagcgctttttactagcaactgaactgcttcggattataaaacggggaagaggggcaatgacccattcattgccgttatgagcgtttcatcatgcgcaatactgatcaaggtgcaattcgtttcccaagtgaaggaaaaaggttctacttttcggaatgtaagcgcttgcttagtatagaaaatgtaaggaggcaaagcaatgcgagaaagattgacgaatcttctacggacattgttggacagttcggaaatacctctgaatgagttggcagtacagtttgatgtcacgattaaaaccattcgtaatgagattcaggtgctaaatgatttacttgctgaaaaacagctgcccttattcacgatcaaaagaggtgtcgcctacaatcatatttcaaaagcccaacaccaatcgttagctgacctgcttgacttcaacagtgtcagtcaaggtgcattaacccctgaacaacgaaacgtctacttgttactcgatttactgcaagcgacgaaaccactgtatttggtggacgaacaagctgccatgcaggttagcaaaagtacgatggatgctgatttgcggcggttacgcgctgacttagctaagtacaatttggcgttaacaacacatcccaaattaggcgcacagcttgaaggtaacgagcgctccattcgcacgatgtttggagatgtcttaacccggcaacatgctttggccaccttggtttcgcaacaactgatcgcaagtggtatgtacatcaacaaaatgaaagaagtctttacggagaaggatgttgcctatatccacgctttattactgaaatgctttcctaatggcgctttggccgcaaacgatatgtacagccagcaagtaacagttttgctcatcatctggctgcatcgcgtttcaaatggccattacctcaaggacgatgagggtgaagttgatttaaataaagcaaccaccaaatttcttaacgctttaattcagcactatgatttgaagcttgatgttgcaagtgaatttgcctatgtcagcttcttgatcagcagttttaaccggcgtggtgccattgatcttgacgattgggtcaaagcccagattttcagcgtggcgttgattgatcatatggaaacagaaatcggttttccattttccaaaaatgaaaaactgttcgaagagctatataaccacatgaccgcgctgttcaagcgggtgtctaggcatgtgaaggctgtcaatccattgaaacgcaccattcaacaaggctatgcaccaatttatcacgcggttgatcgtttctttgaaaacacccgctaccacttgccgatgtctgatgatgaaaaggcatttctggccatgtacttttccgctactcaagctgaagagcggcaacgtcaagactacaagtatcaagccgccgttgtttgtaactttgggaccgccaccggcagagtacttgctgccaagttagaggagcgttttaacatcgatgttttggcggttctgagcacatcggaaatcagcgttttacgcaagctgcccgtgaccgttgtttttaaaaccgtggacatgccgattgaaaagattccgagccttaaagtgagcccgattccttcagaggctgacttaaagcacgttgcggattttcttaaccaacatgcaacattgaccaagtatgaaggccggacttttgatcccacacgattgttccagtccattctggatgtcttaaagcagcatcaagtcactgtcaataaaggactgcttgcggcattgcaagcagccttcagcgaaaaccatgtcgaaattaacgaaagggaggttcagccgatgttgaaagatttagtcaatgatcagcagattcagcttcaacagacagctgacgattgggaagatgccatccgtgtttctgccaaaccattgctggatgaaggcgatattaccgagcattacgttcaggcaatgatcgattcggttaaacagttcggtccgtacattgtcatcggaccatccattgcattagcacacgcacggcctgaagacggcaccaagaaactggcggtcaccattacaacgttagccacgccgatcaattttggtaatccggataatgaccctgtgaaaatcatcttctgccttgctgcgattgataattattcgcacctaaacgtgatgaaggccattgttcaactgattaatgatcagcaaaaagtggatcaactggctaagcaaactgatttgcagacttttaaacagattctattcaatgaaaagacctcaaaggagacgatttaagtgagtaagaagctcacgatttattttatctgtggcgctgggctgggttcatcgctggcttgccaaatgacggcggaggatgttttaaaccgcctgggattagaggagaaccttgaacacgaggcgatttcttccacaccgggtttgcgtgccgacatcattgtttccgctgaaaattttgccccacagtttaagcaatacgaccttgatccggccattaagtttgtattcttgcataacattgtcgatcccgctgaaattgaagccaaacttgtgcccgtcatcaaatcattgtcagaacagtcggtgtgagtcccaatccgcatatgaaggagggaaagaatcatggttgtggttaactttattatccaaaatatcctgacgcaggccgccatcaccattgcgctcattgcgatgttggggttgctgctacaacgtaaatcgtttggggcggtattaaccggaacatttaagacgctgttgggattccaggtgctatcagcaggatctgccattattgtcaccgcactcacgtattttggaaaaatttttcagcatggctttcatttaaaaggtgtcgttccaagcattgaggcaattaacggccaagcgatgaacacgctgggactgggaaatgaaattgcgctgacgtttttaggaatcttcatcgtcaacattatcattgcccgcgtgtcgccatggaagtacatcttcttaacgggtcaggcacttttatggatgtcgacaatgacagtagtcggtgggaagatggccggattgaatgccgtgatgaccattattgtcggcagtgttatcggcgggatctttgcagttgcgatgcccgcgatcgcccaaccgttcgttcgcaagattaccaaaggcgatgcgattgcgcttgggcacttctgtacggtcggttacatggtagaagccggagcagcatggcttttcggtgaacgcggcgaaaagaagcactcaattgaagacatcaaactaccgaagtacatggagttcttgcaagacacttatctctcggttgcggtggtaatggttccgctattcatgattacagcggcgtttgcaggacctaagtatgccggtaacggaacaagcctgaactatatcatgaatgcatttatgatgggtatccaatttgttgtcggagtttacgttttactagccggcgtgcggttgttattgggtgagattgtgccagccttccgcggaattgcgatgaagttggtgccaaatgccaagccagcgctggattgcccggtactattcccgttttcacctaatgctgtgattctaggcttcatcaccaccacaattggaacggttattgggatgttcctgatgccagtgtttggtctcgccgttatcttgccagggatgttaaccaatttctttgctggtggcacggccggaattttcggcaatgtggttggcggtcgtcgcggggctatcatcggcggcgtcattcatggacttttcatcaccttgctgccagccttgctagtcactgcactcaccgcattcggttttgtcaatgcgtcagcgactgactctgataccatcgttgcgatgttgatgtatgcatggattctaacgccaattctcaaggcagtctgaagaaaggagcagcgcgatgttcggtaatctttttaaaaagaaagaaccaaagcaggcgattagcgaggcgccaaaagaagcctcagcaaacgccagtgcaattgacgaagcaaacttgaaagaacaagcggcggcattaacccatcaaattgaacagacagctgaggacaaggaaaagcgccacttactgtataaccaattaggcgcagtcgaagcacagctaggtcatgatttagcggcaattgcagcatatgaagagagtctcaaagataaagaagaattcggcgatgcctataatgctttgttgaatttgtacgagactcagcgaaaagccgcggccaaagctaaaaatgatgacgatattcagaaatgggttaataaaaccgacgccttactcgatatgtcaaaacgcgtgatgcgatccggttttggttattaatttgctaggaggcaattaagtatgtataagaacttaaaacaattgatggatgaagcccaagcacttgattatacagtcggtgcctttaacgctcacaaccttgaaatggtcccgccaatgatcaccgcggctaaagatgccgggtcaccgattattattcaaaccagtgttgctacggcagaatatgtcgggatgaaaaacttcgtggccgtctgcaagtcgatggccgaggatctgttggttgatgtcgacttgcatcttgaccatgccaaatcatttgatgcgatcaaagaagcaatcgacgccggctattcgtcagtgatgtttgacggatcagcccttccatttaaagaaaacatggaacgggcgcgacgagttgccgattatgcccatgaacatggcgtctcactcgaatgcgaaatcgggacgatcggtggcaccgaagaaggcgtgacggttaaggaaggacgctacacagacccccaacaagcgcttgaattcttggaacatgttgatgttgaagcattggctgtcggcgtgggcacacaccacggccagttcaagtcaaagacgaaattgaattggccattaattgaagaactccatcaggtcatcagcaagcccatggtcattcatggtggcaccggcgttaatgaagacgactaccatcgtttgaccgaaaatggcttccgcaagttcaacgttggtacggaattactcgttggctggacgcggaaggccaaaaaaatgtttggccagacagaagtgaacacatcattacgtaacaacattgttccttgtaatgatgtcgtctacgatattgtcaaacacaagatcagcctattcttgaacaaagaagcagccgtaccggtcaaggcttaagctggagatgagggatggatgacaactgagcagcaacacgtattagtcctgctggctggtgcaccgggaacaggcaagacttacaccgccgccaaaatcatgcaggcaattcacggctttgtctctttaccactcgacttgtttaaggaacatctttatgatgagctgggtttcgataaccttcgcgaaaagcagatgcttgatgccgaagccagagcgcgttactatcgcggtattgatattttgatggcggaaggcaagatgattttgggggactatccgtttagtcgactacaaaaagaaaacatagaacaattggcgaccaagcatcactatcacgtcatcaccgtgcgcttggaagcagcgatcaacatcttgtacgagcgccaacgtcaccgcgacttaaccgatccgcgccatctcggtcacctaatgaaccattaccatcgcggagataccttggacaatatttcggaacaacccgacggcatgccatcgtttgagacgtttgctatgcgcgtaaaagacagaggttaccaggattttcaaattggccagttgattcgcgtagatgtcaatgattacacgaaaatcgattatcaaaagttgttggagaagcttaagcaagccttgaaagtggaagttgaaagttagaacttcgccgtgattttgaccgcgtggcgtagtaatggatgaccgttttaccaattagttttggtaaggggtcatctttttgttttatggatctggaacgcgaatggttaatcattcgttttgagctttgtggatcaacttattgcgacaagactgggtagaagcagtactggaagttgttgtgaccaagaaagttttgtgagtagtttctgaaggggatgaaggtacttcggttgcgttttgatagctgtgggtgcttggcttgcgacacgttagattgtaggtagatgggaaacgcttattcttgaatgctataagaatgggcgttttttcgatgcatacagttaaatgtgattattaatatcgtaataaggtcgaaaaattatccatacgttttaaaacaacgttgtatttaatgatacaacgttgtataatttaagcaacattgaaagcgcatacaaggagggctttaatctatgatcacttcagcacctgcaccaactattatcagcactgaccccggtattgacgacgcggttgccattgccattgcgctcggtagcccattgatggatgttcaactaatttgtccgattgccgggaatgtcagtgttgagaagacgacacttaatacccgtctgttgttgacttttcttaatcagtcacctcggattgttcaaggaagtcgcaagcctttattgagaccgctcaaagatgctagtggggttcatggtaaaaccggtatggatggatatccttttccagaacccaatgtgccggtggataccgtgacttctgctgccgttgcgatgcacgaaacggtgatggctaacagtcaaccagtgactttaatcgggattggaccgttaactgatattgcacttttcattcatcaatatccggatgatttgaagaaaatcaagcagctggtgttaatgggaggcgcgctaggaagaggcaattttggcgtgttatctgagtttaactttggcaccgatccggaggcagcaaaaatcgtcttcaatagcggcttgccgattcgggttgcaccgatggaagtagggagacaagcaaaaatcttgccggcaacctcggaaaagatcaagcatttgggaaaagttggtgatatgttctatgcacttttttcaaaatatcgtggtggaagtttcaagactggcctaaatatgtacgatgcacttgctatggcaatgattctagcaccaacgtgttttacagaagtgcaaacccatgttgcgattgaaacacgtggtgaattaacggccggtgcttcgctgattgatctgaaaggatatttgggtaaagaacccaatgccagtgtcgccgttgatgtagattcgaaacgttttgaaagttggtttgtcgaggctattggtaaaacggctaatttttaggaggagagacgatgaacgctattttgatctcagtggtaggcatcattgccgtagccatcttgatttatatgttgcttaagaaaaacgacattaaaatgacgctattgggtttaggcattgtcttaatgtatatcgccattctagttggcaacaagatcaaagtttctacgccaaccggtactgccttgcttgatccgtttcaagctgttgtcgatcaattctcgaatacacttgttggaccgggatttgtcatcttgattcttggcggatatagcgcctatatgagtcatatcggtgcaaatcaggttactgttcatgctttaactaaaccaattgccaagatacgctcggtttatattctgattccgatcgtctttctcattggtaatctactctctttggtcattcctagtgcctcgaatcttgctatcatcttgctggcaacgttatatccggtcttgcgcgctgctggaatgagtcgattatctgcagctgcagttatcggaacttcggcaacgattgttccgacaccattaggatcggataatgttgccatcgccgcacaactgcacatgaccgtgacggactatgtttttaagagccatgcgctagtctcgataccgactcttcttgccatcgccatcgttcattatttgtggcaaaaacacgaagataagcgccagccagaaacgctcacttatgctgatgaattgacgcaaaatagcgatggaaaagcaggcgaagcggtggaagacgttacgcatcatggctttatggcctttatttatggcttgttaccgctacttccaattgttttgctgttagtcattttctttctcaacctcgtcattggcaccaagttaaacatgagtgttcaaatggtaaccttgattagctttgttgttgcggtctttgtcgaactattggccaaaagaaaagcccaagccgtgttgaaagaaaccggtacgtttttcactggtatgggcgatgtgatgagcatcgtggcattgttggtcgcagcgcaaacatttgtacaagggctcacctcactgggcatcatcaacttaattcaaaacgccatgcaaaatatgagcggttccggaattatcctaccaattatcatggtacttttcacagccgttatcgttctgttgagcggcagcggaacggcattagtctttgcaatgattccgctcatcatcccactttcaaaagcagctggcattgatccggtagctttatccatacctatgcaactggcaggcaacctgttgcgcgctgtttctccggttgctgccgttgtcttgattgtagccggcaccacaaaactatcgccaattcagattgttaagcggacctctgtacccatgatttttggggttgtgatgatgttggttatgtcactgatactcttttaagcgagggcctgagcaatgatcgagacccgacgaatctccagaaaacttgctactgtcaaagatctaccacatcttgaaagaatgcttgatcatgccaaacaacagatgtgttcagaaggtatcactcagtggactgaaacgtatcctaatcacgaggacatctaccgggacattctgaaacgccagctttggttatttggtgatgacgtaaaagcaatggcggtgattgaagagaatttaaacttctggaatattaaacggctagtcgttgattcggcgttttccgggaaggggattgctagcttggtaatagatgaaattaaacaattgatggtcgttcatcatgtggctgaagcacgcctttgcacaaaccataccaatcaccgaatgattcggttagccaaccatcaagggttcctacttcatcattattatcatgcacaagatcgagaaaactttggagcctttatcgaatttaggtaccgcagattttccaatgcggattcatgttaaaatgaagcgctatataaattattgaaagatggagaatcggcatgcatcgttcaccaaaatacgttcaagtttataaccaaattctaaagatgattaaacaaggccaactcgcacccggcgcaaaactaccatctgaagaagtgctgacaacagaatttgaggtcagtcgagttaccttaagaaccgctttatcactccttaaagaagatggatttatccggagcattcatggccaaggacactttgtcgaggcgagtgaaagtcagaaaaaaagtggcattgaagctctaggtaacccaatgcttaaaagtctcgttctgcccatagaaagcagggaaacctactttcatgaaaaccaggccagtgaatttacggatcgactattcgatcgtcaaaacgccccatacgatacgttaaacatctggtatcaaaataaaggcgaaaatattggaaatacactcgccattgttttacccacaacaattcaaatgtttggcgtagacttgagtgacagcgcggctattatcaactttcttgaggaaaccatctaccaaaaagcctcgagttcaaacgtgctcattactctgtcagatcgccaacaaaagacatttcggcggacgtttggtgacacgagcccacttattttgatgacagaggatatttttggatttaacggtgaacggctcttacaaaacaagcattacattcctgcaaacctgtatcgggcaaatgtgatgcggtatcagaatgatttgcagaatcagattggggctgtggagtaagcgagatactgatactctaattaaaacggcttgtttaaatttatttttgaaagcgcttgactgactctaaatgacatgctactatacagtcgtaatctaaatatacggtaaatttgggcactagaagaaagacgtccgatcacacttggataataagtagtgattgggcgtctttttgtgttcttttttatcaaaaaggagagatttgttatgagtaaagcacgtcggttagcacaaatttggggttcagatgggaatgcgattattgcagccttagatggttttggattttcaatgaatacacagggtgtcgactatacaacagaacaccttgataaattaattgctaatggattggatgcggctttagtcacatacggacaggcaaagacgtatgaaaaggaactagcaaagatcaccacaattctgcgagtagatgcctctattaatgcttatgatagctctgttccagtgactgatcagttctttgatgttaaagatgcactaaaactcggagcacagggagttgtttgcatgacatttcctggcgcaggttcacgcgaacaattttctcaccagatgttagccaaactagctaagcagagcgaggattggggtgttccagtgatcgctgaaacgttgccgtttggctatcctgttacaactaaagagtcaaatgatccaaagtatattgcggctgcagcacgtttaggcgcggagttcggtgctgacatcattaaaactcgtctgagtggagaagatacagataaagaaatcattgaaaatgctagtcgccctgtcctagctcttggtgggcctaaaacagatacattaacttatttcaagtttgttaaacattgcatggagtcaggtgctcatggtgtggctgttggtcgtaatattacccaagataagaatccggctggtatggttgcaggcttaaacgtactggttcataagggtggaacacctgaagaagctttgagtgtatacaacgaaacaaaataagtagtgtagaaaaactgtctccaaaaattgaaaacaaaatacttgaaaggatgattcatatgcctaaatcgattgttattccatcctccctcaatggcaaataccttagagaagcttgcgaggccaaatcagaaatcgtcttattgtctggtgtgaatattggtaatctgggttcctttgttgagtatatccatgcacatcacaagaaagcttacattcacattgacatcacaggcggattcagaccagacgaggttggaattcagttgttaaagaatatgtttcatctagatggcgttatttcaactaatatgcacgcattaacacgtgcacgggcgattaaattagaaacaatataccggctgtttttgttcgattcaagatcgctggaacgggcagctggagcaatgagtgatgggcagttttctgcaatagagattttaccgagtggctatgctctgtcggaatacgacaagatcagaaaatatgcgggggatacgaaattaattgcaggagggtttatacggtcagaaaagaatatttccgacatttttgctgcaggattttggggcgttacgacaagcgatcgtcaactttggcagtatggggtgaatcgtagttaaatatctacccatacatgagggggatagacaagtatgtcaaaaaaatatttgatgggtatcgataatggtggaacgagtacaaaagctgccatttatgatatggatggtcatgagctagaaaagactactgttaatacaaaaatgttgactccgcatccgttctttacagagcgtgatatgaacgaactttggaaagctaatatctatgttataaaacaaacactcgaaaagtcgcacattgatcctagaaatatatcgggaatagcatgtactggacatggaaacggcctgtatctggttgatgataaaggaaatgctgttcgtaatggcattatttctaccgatgatcgggccgccgcttatgtgaaaaagtggctagcggatccttactatgaaaacgagattcgtcccaagacttatcaaacagtttggtcttcacagccagtcgcgcttttggcctggttgcaagataacgaacctgaagtatttgaacgaaccaaatacatcttcatgattccggacctcattcggttttggttaacgggcgatgcacattttgagattactaatgcatctggaacaagcatgttaaatatcaatacgaaaaagtttgatcaggatttgttcaagttctttgggattgaacgatggatggctaagctgccaccgctagcaaactctaccgatcattgcggtagtatatcaagaaaaatcgcaagtgaaacaggtcttgtcgagggaactccgtgttcgggtggggtattcgatattgcggcttccgcgttgtcaacaggattggtgcaccgtcacaaacttggaattgtaaccggaacttggtcaatcaacgagtacattacgaacaagcctaaagttgtcaaagacttatttatgacttcaatttatccgatagcagatcgttggttgattacggaagccagtcccacatcagctagtaacttagaatggttcatcaatactttcatgaataaggagaagagggctgcagaggatgcgggattttcaatatacgagtattgcaacaagcttgttgcaagcacaaaaccacaggatagtgatttactatttttcccctttatctttggtggtaatgcggtaccgaatgctagtgctggttttgtgggagctacaaaatatcacgatcttaaatattttgttcgtgcagtttatgagggcgttgtcttttcgcatatgtatcacattgaaaagttacgaagaattgatgggcatttagacggtgctgctcgtattgctggcgggatcaccaactctcaagtttggttgcagatttttgcaaatgtcttaaagcagcctttagaacttgttaacgtgaaagaaaatggaactcttgggactgctatgacagcgggggtcatgacaggagactttaagagcgttgaggatgcggcaaaccacatggtgcatattagccgaacaattcttcctcaacccgagtttgaagatgtttatcaaaagaaatatgaatgttataagaaagcattgacaaacatggaacctgtttggaatggactacagacggtttgaattatctcgtatgaagatatggaggttttaataatggatttaggtattaaagggaagaacgccattattacaggaggagcaactggactgggtcagcaatttgttctcggattagcaaaagaaggcgctaatgttgcttttacgtacatgagtgaaaaagagaagccagagcagacggttgaaaaggtgcatgcaattaatccaagtttgaaagcggtacctgttttaacaaatctggccgacgaaacacagattgttaatttcttcgatacagcacttcaaaggcttggcagcgttgatattgtcgtgaacaatgcgggtatttggctttcaggaaaagtggtggacattcctgctaaagattgggacttgacgatgaaagtcaaccttcgagctccgttcttactatgccagcaatttgttcgatatgctctgaagacgaagcggagaggtcatattgtcaatgtgacatcacaagcggcttattatggatcaacaactggacatgctcactatgcggcaagtaaagctggattaattgctttttcaatttcattagctcgtgaagtcgcaaaaaatggaattaatatcaataatatcgcagtcggagtgatgcatacgcgaatgattcaagccaatcttgataaagatcctaattactatgtaaaccgtattccaatgggacgtgtcgcggaaccatccgaaatcgcagagctaggaatctttcttgcatctgagccagccagttatatgactggggcaactgttgatgttaccggtggtatgttaatgcattaataaatggggagatagataaaatgaaggcaatcgcatttggtgataatttaattgatgtttccatgttaaaagttggtcttactactctggaaaatgcggggattgatgtgacaatccgagattggtctcacgaatccactgctgcacttcaagcagacaatctgaaggttgagcagcatggcccggaagcagtaaacgttgacgattcgcttttgaaagatattgatcagtttgatttgatcattacacaatttatgccaatcggtaaaaagattatcgatcgtgcaaaaaacctcaaatatatcggagttttacgtggtggtattgagaatgttgatgcggaatatgctaaatcgaaaggcattaaagttatgaacacggctggccgcaatgcacgtgctgtagccgaatttacggtaggcatgattcttgcggagacacgtaacattgcgcgaactcacgccgcaatggaaaaagatatttggttaaaagactttcctaataaagattacattcctgaattgggaggtaaaactatcggtattgctggttttgggcacattggccagttggttgggcagttcttgaaaggctttgacgcaaatgtcatcttttacgacaaatatgttgatgaacagaaaggatttacaaaaattgattctttagatgaattgattaagcggtcagatgtgttaacaattcacatgcgggttactcctgaaacagatcacattattaatgcaaagcgcatcgccgagttaaaacctaccgcttactttattaatacagcccgcgctgagttggtagatgaagatgccctgctgaccgctcttgagcagggaaagataagcggtgctgcagttgatacattcaacaacgagccattgcctccagacagccgctttttgaagctaaagaatattactttgacttcacatttagcaggaagtactgctgacgcttttcgtaatacgcctaaactctttgctgagagatttatggcgtcattgcaagagtagcttgtcactaaagaagggctgggtgaagcataatgcaaataattcaggcaatcgttaatttgggtgccgcagttatgatgccgattatcttcttcgttgttggggtagtgttcaggctctctataggaaagtcatttaaggccggcatgttggtcggtattggattcacaggagttagtatggtaattaatcttttactaaccaatcttggacctgcttcaaaagcaatggttgcgcggatgggattgcatcttaccgttgtcgatacaggttggccgactgcttcaactatcggatggggaacaccaattatgccgattatcgttattgggttcctggtaattaatgcggtaatgctagtattaaatctgaccaagacggttgatattgatatctttaactactggatctttcttctgcttgctgccgttgtatatgccgcttcgcatagcttttgggtcgcggcattgacaacatggattatctttgctctgacactgatagtcgcagatttgacagcaccgtggatagagcgacagtataagtcattaaatttaaaaggaatttcatttcctcacctaacatgccttgcttgggtaccatttggcatagcaaccaactgggtgattgaacgcatccccggtctcaagaagatagacatgcaacctgagaagatccagaagcgttttggggtctttggtgagccattaactttaggctttattcttgggatagcgatagcgctaatggcggggtatgatatctctaagaccctgactttggctattaatgttgcagccgctatggttctattaccaaagatgattgacatcttagttgagggtttgaccatggttcgtgatcatgttgaaaaacagctaaaaaagtggtttcccaaacggtccttctatattggaatggatactgcgttgcttatcggtgagccatctgtacttgcaacaggtttgattctcattccgatcgcaattatcttggcctttattttgccgggcaataaaatgttaccatttgtggatctagcatcgttaatgttcttgctggcactggtaaccccatttgttaaacggaacatgttccggatggtaatcgcggggacattaattttaatttgtatcctttacgttggaaccagcattgcacccgaatatactcaatctgcaatttcctcaaagattccgatgggtaagggaataaccagtatgtccaatattgttggatctgcaaccacctggatcggatgggtttgtgtcaaaataggatcgttgttttaaagtggaatagttgaatgcgttggtttatcagattaacgaagtgcttaaaaaggagccgaggggaatgccaccttgactcctttttcagtcctcagtgcttagttaagtagacatgcgtaggctgtattgtatgatactgaccttaaaaaactctacttccgggcccggaaaaatatatactaatgtaagcgctaactaacgtgtcatactggaattgtcaggagggcaattgggattgacctgtagaagaggaggcaattatgaacgagaagattaaacagttgcttgacatcttattacagcaaaaagattaccttactgccttgcaactatctgaaatgttgggggttacagagaggagtattcggaactatgtgagaactttaaacagtagtgagacacaagggcctctgattatttcctctaacaaggggtaccggatacaaagagacttgtataacgaaagtatagaaaatcggttattcgctgaggatgatgcagaattgctctttagaattgcttttattctagtgagccatgtttctttcattacgttcgatgaccttgcaatgcaattaaattattctgtcgaaagtattcgcagtaaggttcaggtgctgttctccaaaattcatgatatgaaccttaacgttgcgttggagtcgcgaatctttacaggtattcggattttaggggcagaaaatcaaaaacgattgcttttagaacaactaataccaattggaaaaattgttaagggagatttaaccgattctacttttaaattgttaaatggggtgtgtgataagcaaacgattgagaaagaaattgttagtatagacacggttttctctcagcaccatacaacaatggatttcattgtatacgcgaagattatctgtcacatggtcattgcgataagccgttacagagaaaatcatccgatcaatagttcagaagttaaagatagcaacaaggaccatcctgaatttcaattggcttcttctttattagcaagagccccaacagcaataagtaacaaagctgaaataatggcgcttaccaactatctgattgccatgccattaaataccccaggttcgttcgtgccaaatatgaatgtgctacagcgtggtcaattggaaagttcactgaaaagagcagaaagctattacggcattccgctatattctaatgaaagttatcggaaccaaatcataaatcatattatgagacttctagatccaatcgaagaaagtataccggtatttaatccatattctcaaaaaacaaagagagaatatctgtttgcctattcgattgcttgttttctttacgatgagctgcaaaacgattttgatatacaagcacctgaatcggagatagcctatctcgcaattcatattcaacttgtcttaactgaggagaccaagagcacaattcggacagaattagttttccaaggcaagaaggcagaaggagaattgtttcgatataagatccagacatattttccaaggatagatattggggtagtcacaacggcaatggatttagctgatatatcgaagtatcaattgatcataagatgtgggtttcaagagtcggatgaccaggtaaacgataagataatagaaattagcaaagcattgaacactaatgatatagccagaattcaaaattttattgagacagttggtacgatgtctctgattcagaagcttgactatcatcatatgaatgagtcttcgagtatggatgcgatagcatatttattgaaaaaatcagggtactttaaccttttcccgtattttaaaaagagggaatcaatgtcatctactgatattggacatcttgtagctatgcctcacccctttttaaagggttcggagacagctgccaaagtcatcgtaggaattaataagacagcaatttcttggggacgccaaaaggttagattggttgtgatatacattcccgcggctgatcttaaaacaaacaaaaacttttttaatgatgtttatgaacacaccaataacttggctgaagttcatgccttattagagactaagacaaagcgagagttcatcgaggtttggaatagaaaaggagattattcgaatgctttataacatggttgatttactaagtgttgcatataaaaataattttgctgttggatcttataatgtcgccaatagtgaattcgtagaagcgattattcacgcggcggaagctaaaaatgcgccagctattattcagattcaccccaacgaaatcaatttggtaggtgacaatttcactgcgtatgttagacaagcagttgatcgaactcgtgtaccaatggccattcatgtggaccatggtgcaacgttgggagattgcgtacgcggcattcataacgggtatacgtcagtcatgattgatgcatcggcaaagtcttgggatgacaatgtagcactcactaaacaagttgtagatgtggcccatagtgtaggtgtttctgtcgaagcggagctagggacaatcgggtctaacgaactttcgacagaagggaccggggtcaacaagattctctacaccgatccagaggatgcaaagaaatttgtgagtttgactggcgttgacacgcttgctgtagctattggtacgcggcacgggcattacagtcatgttgaaaaacctgaactgcgaattgatttgcttgagaagattcatgaggcagttgacattccattagtcttacacggaggctctgataataaagatgaggagattaagaagacgtatcttcatggtgtggctaagatcaacctgtcaacggacatgaaaactgcattcttttcgcaattacgcaagaatttggatgaaaatcctggtgcttatgaacccgatcagctgatgccatcagccagaaaggcggctcaagaggtagtcgaatacaaaatggatctctttaattctactggtaaagctgaattgtactagagataaccatcgagatttccaattgtggaggtgaacaagatgcgtattgatgaactaattgatatcaaaaatattgacactagcattgaaccgatgacaaaagatcaagtcattgaccggatgatcagtaaactaagccagaatggttatgtccaagatgcagacgtattcagaaaagctatttatcaacgtgaaaatgaaatttcaactgcagttggatatggcgttgcaattccccatgcccgaaccagagcagtcgaaagatcaacaattgctgtctttagagatcttgcaggtgttcaatggggccaggaaaaagttaatttagtgtttatgattgcagctgaggagagcgcttcggatgaacacttgaagatgttgtcaaagatttcaacttttttaatggatgaaagctttcgagctagattgataactgcagctgaccctaatgaaatataccagattcttgtccaagaggatgctaagaaagatactgaagccaacatttcaaatgcgcgagaatctgctgggaaatatcttattgggattagcgcctgcatgactggaatcgcacatacgtatatggcagccgaggcacttgctaatgaagccaaaaaaagggggatgcgcgccaagattcaaactaatggttcgactggtgttgagaatagactaacttcaaaggacattgaagaagccgatgcaattgttgtggctcatgacgtaaaagttgacaccacggtttttggtgggaagcctttcttagatgttcccgtaaaacgagctattgatcagcccggctcagtggttgatcaagctttagaaaaagatacgacaagttcaaaatctactccaacgcataagaaccttgaatccgccttagggaaagaaactaagtctgaagaagagttgactggtagcggtaaatttgctcgtgctttctacacgcacatcatgagtggtgtgtcgtatatgattccatttgttgtcgttggtggtatttttatcgcaatttccttcatgtttggtatctacgcatcagatcctaagagcgatcagtataatatctgggcagcatttttcaatgaaatcggtggtaatgcggcttttaaactttatgttccgattcttggcggcttcatctcatggagtattgcggataaagcaggtttagcgcctggtatgatcggcggcatgatggctgttaatggtggatcaggcttcttagggggcatggtcgctggtttcctggccggatatgttactcgattcattgtcaaaaagacacagaatgttcctcactcatataaagggattatggcagtattagttatcccgctcatagcaacctttattgtggggcttgttatgtttttccttctgaatacaccaatgtcgaatatgataaggttcctgacaaattggctaaaatccatgacgggcgtcaacgctttcttgatgggagcacttctagctggaatgatggcatctgatatgggtggtcctatcaataagaccgcttcagcttttggacttgctatgttcgcttcaaaaatctatgggccttcagcagccttgatggtcggtggcatggtgcctccgctcggaattgcactcgcaactgttttgtttaagcgaaagtttacaatccaagagcgcgaggcgggtaaagctaattgggtattaggggcaagcttcattacagaaggggcaatcccgtttgcagcagctgatccgctgagggtgattccggcaaatattattggtggtgcagttggtggcgcaatctgcatggcgtcaagcattacgttgcaagcaccccacggcggaatctttgttatcccaattgcctgcaataagccacttctttatattggctgcattctaatcggaacaattataacagcgcttatcttgggctttaccaaaaagaatttgagcgaacagcaaatgaagcaacagatggcagcaggtattatctgagaattatgcaaggtgcgaagctgaatatagagagaattatcgatatgataaaaggttcggtcatagtataaggactataccggacttttttatattgattcttgtgacagttgtgaatttcttataactataaatactgcacaatttaaatgaattaaaaaagtagcaaatacatttcttcgatgtatccgctactttgaatatttgatgctataagctagtccttaagcttaaagtatttaagaaatttttaacgctgaaaaatttagatagtgatggtgttttctacgcatcatagtcgggttcgtttgtcagaatccaatcctctgcttcttttgaccacaagccgtcatgcttggccagaatctttcctaggtcggtcgtggggtctactttggctaattctattcggtcaaattttttaccactgtacaccaactttttgccaccgccaatttcaggttgattcattgttgtctcagctgcatcgtttaagcccataacatgggtaataactttggaaacgtccagctttttctcggcaattagcttagctgcttctgcttcattgtctgcgtcaccacctgatgtgccaacaaaatgagtaaaattatagtggatgttgtagaaatttacagacgcagaaaagtcttttttcatcgggcctgcaaactgatttaagcacccatcaggattgagcagggagtctgctaaagttgctaacggtgcaacgctgatcatcaaaaaagcgtcatcgtacccattgccatcaactgcatctagaagaacttctttttgctcatcaagtgataagttgttgacgttgacaaacttgatatctacccagtcagatggataaagttttttagcacgatccagtttggcctgattgacatcggttacaacaagcgtcgacggcttttttggaccatgtagtgcgtagtcaatggcaagtagtcccattgggcctgtcccgcccatgattaacatgttgccaccttctttgatacctgttgttggttggtatgagtggaagttgacatggtattgtgctcgaaatgcggcaataacacaacttaccggttcacacaacgaaccttcataatatgcatcgccttcgaatggaattaagcaccccattgtcatcacttcatcaggaataataatctttgttgcatcaccgccgatatatggatatgaataacctggtacaaaaggcgtgttttgacgagccaaatttggctggattacgtaattttggccagcgtggaactttgactgccactttttgcccacttttaagatttttccagaaaactcgtggcctagaactgctggattatgcgctaaatcatcaggggtctttttgtgatcttcaccttccatcgcaagcttccatgatgacatacacattgtatcgctcacgacagtcgcgaggatctcatcgtccttcatttcgggaaggtcaaaagtgtcaattcggagatccttcttaccataaattcgtaatgctgtactttccatgttgatatcctccattcacaaatgtgagaattgattgggtacttattttttctagctacaaacagatgttaatccagcaatttcgtttgaacaagtaagcgctaccaaaaaatcacatatgtgaaactgttaggacaactctttgattgcctttgctgttgcttcggtagtaattaaagtgtttaagagaccacctcgaagagcggcaaggatagcatttaccttttcttccccaaaagcaattccaacggagtgtggtacttttcgcaatgccgaaaaaggaaaggcaacaagaatggagtcgatatcgcgagctaattttccatccttgtcgaaagggtgtgaaagaatatctccgaccatatcggcactgaaataagacttgaagtttgtgttctcatagaacgcttgccaatcaggagaatctgtaattagtgaacttccgatgccaaagatcgcgatattgacacgattccacaatcctaagatttcttgcgtgttggggttggcgagaagctctttacgaagcgcttttgatctgacaaaggcaggggaatccaagacaaacgctgttccgtttagccgattggcgagccggtgtgtcagatagctcacatgatagttcgaaggtattcttcccattgggccacccaccagcggaacaactttaatatcacgaaggcctttatctgttggaaattgactgataacacttgaaagcgttgaaccccaacttaacccaattacgtcaccacttttaatgattcttgataaaaacattgatgcgtaaacactcaaagcgtttaactcattgcctccattttcagaagccgggactataacggcctctcgcaaattgtatttttgtttaaaaaaatcaataagttggctgacggcggtggtttcgggattgattgcgatagataccacgccttcatccctagccgccttcagaattcgacttatttcggttctgtgaatatgggcaatgttagatatttcttgttgagttagaccgtgcatgtagtaaagatcggatatcttgactaaagttgcacgatcataccgtttaggcaaatttgacattgatgtcacctcgaaatcacaaatgtgaaattattcaacagtcacgttgtaaccgattacattccaattataatcaaaagtgaaattagtaacaacttaagtttaacatttgtgaatgatgaaaggagaaatatcatgtcagattggctcagtttgttagggaagacaattattgttacgggaggctcgtcaggaattggggaagcaatcgtcaaagagttactgcaaaatggagcaaatgttgttaatggtgatttaagagaaggatctatacaggagccacgcttaacatacgtaaagacagacgtgactaatcctgaggctgttgaaaatcttgctaaagtggcaacacagattaacggggagatttggggggttgtcaataacgcaggaattaacaaaccacgtgttttagttgatccgaaagatccgcatgggaagtatgaacttgatgttcacacatttgaccaaatattcaacgtcaatgtaaagagcgtctttttagtttctcaagctgcagtacggcgaatggtcaagcaacgtcacggagttatcgtgaatatgtcttctgaagcaggtctagaaggttctgttggccaaagcgtatattcagccagtaaaggtgctatcaacggttttacccgttcatgggcgaaagaattaggtaaattcaatattcgagttgttggcgtcgcgcctggcatcatggaagctacagggctaagaactcccgattatgaagaagcattggcttacacccgagggacaactgtagaagcaattcgagcaggctataagtccacatctacaacgccaatgggccgaagcggcaaactgagtgaggtggctgacttagttaactattttgtttccaatcgtgctagctacatcactggggttacaactaatgtcgcaggcggaaaatcacgcggttaaaacatgtttataagattggagatgtgcgatagaaatggaaataattttagttgggcatgcacatactgcaaaagcctttaaagaagcagtggagatgatttatggtgaggtgccaaatttccatccaatagactttacacctaaagagggtttgcaatcgttgacgaataaaattatttcagcgattgatcctaaaaaagcgtctagtactttaattattaccgatttattttcaggaacaccttacaatgcagcagcagaattagttttgaaaaagaaagcggccgatgttgtcgctggaatgtgcttgcccatgttattggaggttgcagttaacgcaaatagtatggatgttggtcaactagtatcacatttaatgaagagcaaagaagaattctcaacgagccttagcgaaaaattgacagcaaatgcaaaggaggatgatttctgatgattattacgcttgcaagagttgacgatcgcttaattcatggtcaggttacaacagtctggtctaaagaatcaaatgcggatcgtatcatcatcgtcagttcagaggtttataaggacgatattcgtaagaccttgttaaagcaggcagcacctccaggcatgaaagtcaatattgttgatgtaccaaaggcgattgctgtttataacaatcccaaatatagcaaagataaagtgttctatttgtttaccaatccaagtgaagtagttgatctggtaaaaggtggaattccattaaagaaattaaacattggtggaatgcaatttaagcaaggtaagacccagattagtaaggctgtttccttaaatgcagaagatgttgcagcatttcgagaattagatcgattaggagtcaagcttgatctccgtgtagttaaaacagatccatctacagatattttgactaagatagatgaaacgtttggaaaggattaggtggtgattataaatggcaatctctaccattcaaattattcttatattcatctggtcttcagtagtgggtatgggaagtgtattagatgaatttcagactcatcggcccttgatcgcgtgttcagttatgggtttgattttaggtgatccaaagacagggattattttaggtggaactttggagcttattgcccttggctggatgaatataggggctgcacaatctccagattcggctttggcaagtactatttcaacaattctagttattgttggcaatcaggatattcagaagggaattgcgattgctttaccggttgcagcggccgggcaagttcttacagtcttggcacgaactgttacagtggcatttcaacatgcggcggatcgtgaggcggaaaaggcaaactttactgccatcatatggttacacttcacggcattaattgttcaagcgctccgggtctcaattccgaccacgattgttgcagtattcgtgagtccagaagagattaagagcatgctagatgcattgccacaagtgattaccggaggccttacagtagcaggagggttcattgtggttgttgggtatgccatgattctaaatatgatgagtgttaagtatttgatgcctttcttctatctcggctttgtacttggcggatatttaaaattaagcttgttagcttggggcgctgttgggctgatctttgctatcatctatgttcaactaaatcctaagtttgcgcaaaaccacagcaatggatcgggcagttccggtggggcagttgcatcggccagtgatcatcctgctgagttaccagaagacgagttggacgactgaaaggaagtgtaatgaattatggctgatcaacctgtacaagtaaataaactgaaaactaagattacaaagggagatatgtttaagacttttgtattcgagaactttcaacaagcttcattcaactttgaacggattcatgcgctcgctttttgtgttgatatgattccgacaattaaacgtgtttattcaaagaaagaagatcaagtggcggccctaaaacgacaccttgtcttctttaacacaacgccggctatgtgtggaccaattgtcggtgtgacaatggcgttagaagaaggtcgagcggctggggaaccgattgatgatgggactattaatagctttaaagttggcttaatgggacccttggctggtgttggtgatccaatcatgtggggcacactgcgtcctattcttgcagctttaggtgcctcactggcacttcagggatcttggctggggcctattctgttcttcttcgcttttaatgcagttcgattggcatttaaatggtatggacttcaacttggattttcgagaggattagcgcttgttaaagacatgagcggtaatcttctacaaaagattaccgaaggcgcgacggtacttggcctctttatcatgggtgttttagtcacaaaatggacaaccattaatgtaccattagttgtttcgaagacgaccgtgagtggtaaaacgacagtaacgaccttgcaaaatatcctagatcagttttgtccaggactcttagcgttgggtctgacactgttgtgcatgtatttacttcggaagaaagttagcccaattcttttgatttttgttttatttggagttggcatcattggctattggctcggtattttgaagtaagggtgaagtaaaacgatcaatcaaaacacaataataattgcaatcggcctcatacttttgaccagtggttttctagtaaaaaacgaaaagcagggtaagaagcagagatgtaatttgctgtatatgattgcaggcattgtcatcgtattaattgggctgaaagtaatttagggaggggttgttcttttatgccacttgtatcaacgaaatatctagtgacgacagcttatcaaaataagtttgcagtcggtgcctttaacgttggaaatagcgaatttgttaaaaatatcattgccgttgcggaagaattagagtcgccggtcatccttgaaattcatcctcttgaatatgaactaatgggaagtgctatttttaaatatattcgagaagcagctctgaccgccactattccagttgctattcatctagaccatgggaggaatatggctgatgtattgcgagcaattcaagatcaagcgaattctgtcatgattgatagctcggggttttcgttcgaagagaacttgaggctaacaaaacaagtagttgaagtggcccacagggttggcgtctccgtagaagcggaactgggaagtattggaaatagaaagttcacagaagatcagaatatgggcagaatttatactgactctgaaagtgctaaacaatttgttgaagaaacgggcgttgatgatctagccgtggcgattggcactgtccacggcccgtatccaagcggggaaaatgatatacgaattgacatcttgaagaaacttaacgcaacattgaagatgcctttggtgctacatggcggatcagacaatcctgacagcaagattcgagaagctattcaaaatggcatatcaaaagttaatatttcgacagatattaaagtgccattttatcatgggattgctaaagctgtggctgagaatccgaatgagtatgagccgtggattatgacgcccggtgcggatgattcgcaaaaaaaggtgattgcggaaaagattcgtttatttggcagtgatcataaactaagcctttaccttgagtctccagaaaaattgacgccatatatcaactcataatgagagaccaacgcttcaagattcccactatatttactttatatgtacaaaagcggttctgatttctggcaagagatcagaaccgctttttagcttagatattttgaaattaaaatatctttgggcggcttattaattaaagatcagtgacgcaacaggataaccaacgaatgctaagataagtataccagcaacggctagcgccaatccatatcttaacatcaccttaagatctacccacccagaaccaccagcaagtgccatgggtatcgttgaaggtggtgttgaccatgcataagaggcaccagcggcaataagcgtcgtgagcgccgctacatttacatttccaagagctgtagctaatggaattagtaacgagtagaaaactgttgccataatcgtacttgaaataaattgctttaatagaaccagtaagaacatcgctactaatacgaataggaaactagaaaagtcaccgacaactggaccaacgatttttgcaaagtacttggtaattccgagtttatcttgtactagtgcagtggataaaactaagacagctgcattgaatattaatgtgttccacggcacgccctgagttgaagcaactttaaaatccattattggcttgccatcaatactgatcaagcaaagcaagataacgccgataaaagcaggaatggcatttcctaaagaagacatgtatgcgccaaatgcaggatagaagtttccaattgttccttgaataatccaaataccaatgacactgacgaacacgaatgcggtgatcttttcttgtttagacatagggggtaactctcggcgtaatttatttgaatcaaagttgcgcaaaggattaacatcaggacggtaaaaaaatttgtagattagtatgaacgcaatgaaaacgagcagtccagtgataatgccaacaatgctatatgatacaacgtcaatgtttatgttggtatcacgagccaggaatgttagtggaattagaacaatggcatgtccgataggtgtcattgaagatccaatgccgacgcacattgcaagacccagaataatcatctgcggtaagcgatcccccttttttaaacctagttctttgaataactcctcagctattgggatgaaaactaacaaagcggccgtttgagacataaaagccgagagaaagactgaggcgaagagaaagatcacaatgaaagtccatggaccgcgactagcaaatttgttagatactgaccaaattgcaattcgttttgacaaacccgtttctgccataacgtaactgatcatgaagaatgcataaagaaaagagttcacccaattgccaattccattggcaaaaatctcagtctgagtcatgatctggaagataacgatgactgtcatgcataataggctggtccacccaattcccgcaaaattccaaagtaacaatatgccgatgaagattcctatcatttgcatggagtcaactgatagtccatctggagcggggataaaacgaaagagaaatataaaggcaaacgaaatcacgttcataatctttttcgaattgattttgccaagaaattcagtaatactaaaagcttttgccgtagtttgcatatcagttcacctcactaaaatttgaaaccagatttgtttgatttaagacttgctgtaatttggaaggagagaaatcatagatattcttgtgagcgttaattgcataggcaaagatggcaccaactgattcgccaacattcataactattggcataactctcgtagctgcaaaagtttcatcatcggttgatattgctttgcctattacagcaagattgagatcttcctgtgggagacaagcactaaaaggaatttgatacatactgttaattttcataaaatgaactttttttgtaatcggatcatgaacatcgactggatagcagccaacagcaacacagtcttcaaattggcgtgcctgctgaatatcagataagctcaacgttgttcgtcctttgagtttaatgcttgccctaacgcctagaattggtgcgatatttgagatataagaattttcacaacctgggatattttctttaatgaatacaatgattgaacttatttgttttctgctttcttgcaatcctcttgaaagttgcaaggcatcacgatagtcgacgcttgttctggtaacattcacgcttacatcgttggttcccggtattggagcaaatgcaagtattctccctttaataatgtccttggcaaaggcatcattaattatttctgacagatgaccgctgtcaataaattcctggagagtagtaagatctacattagaaagtctgaacaattgtgtcgatacgggaattttatttgaagctaatggttgagtttgacaccctaaactaactgcaactgcagaattactggttccatcaatgatgtacttcgttgaaagctgaactgatttaccaaaactttcagcttctatttcaaatccatttgtcaatttctgtgcagacctgaaggaagtattgtagtatatgcgaacgttgttttcagtcaatagatcctccagtatcagtttcaaaacttcgggattataccggagtcgatctactcgtatacttttgtcggaagacattggtaattggtaataatatttacctgaattccattcaacgagacgatcaaatatctttttttcaaaacctttatagatcaatctttttttaaatgtgactgcgttgaattccgctaaccctgataaagttgcatttcccccacaggtggattgttgttcaataatggttacctttataccccttgaagcggctgctaatgcagccattacgcctgcggttccaccaccaacgactattaagtctgaattcatcaaaatgtcctccttgagcatatcctttttttctgttgtacaacaggctgttggtgttagaataaaatagcgctttcattcgtgcaatcgatttaattcactacttctttcggtaaaaccgatttatcagagcagagaggacagtcatgaatcttaatcaactgaattactttttggtgttggctagagttggttcatacagtgaagcggcatttcaattggatattgcccaatcaacattaagccagtcaatgctgaatcttgaacgagaatttggaacaccattgttttatgctgagaaacgagttacttatttgaccggggcaggggctgtttttcaagaagaggcaaagaaaatacttcaagatgttgctcaaagcaaggaaaaggtagctcaatatctaaatggaaatatcggaaatgtcacgattggagtttccggatcttttggagtgaatattgttcctaaggccattagacgttaccgacaatttcatccagaaaaccttgtaaattttagtatcattcaaggaaataccgaacagatattacaaggtatcagggatcacgatgttgactttggaatctgttcctactcaaggcataatgaggatatcgaattttcattaattgaacgggaaccctatgttgtcataaccagcagatggcatgaacttgctgaacgtgaacagattttaatctcagaaatccttaagtatccgcttattacttttagcactcagagcgctgtttactatgacattgcacgtatgctgaatgttgatatgacaaagttagacattgttatgcaggttgacgactcatccatgatggtgtcgcttgtagagtctggtattgggattgcagtcataccacgtatctatgtgttagataactttgatgtcaaagttttgaatttagaagatcaacgataccgggatatattttgtgcgtatctgaaatatcaaattctttctccggttgcgaaagaatttcggtcattaatacagctatcaagtatcagaaatagcaaaggatgaaccgaattaagcgtctccaaatttgacggtattgaatttcaatcaatcttaattttttccggcaagaaatttgaggtccttggtatgcggaaagatttataaactaagcagtttaagtttgaacacagcctttacacccgaacatttctcagctaaactctgattacattcagtttccacagaacccacaaacaagtaccaaaactgaacgaaacacagcagcatctgccaacgaacaattggtcataggatgctgctgagaatataggaggcgagtagatggcaaagttagtgttgcagacagatttcggattggtggatggtgccgttgcggcgatgtatggggtggcttatggtgttgatgataagctgtcgattcatgatttgacgcacgagattccaccgtatgacatttttgcggcgtcttatcggttgtatcagacgacgaagtattggccggcggggacggtttttgtttcggtggttgatccgggtgttggcagtgatcgacggagtattattgcggagacggcggaccatcattttgtgattacaccggataatgggacgttgacgcatttggcgaagtttgttggtttgaagcgggtgagtgtgattgatgaggcggcgcatgcgttgcctggtagtcaggagagtcacacgtttcatggccgggatatttatgcgtacaatggcgcaaagttggcgagtggccagattacgtttgaggatctagggacaccgcttgctgctgatcagattgtaatgttgccgttgggcgaagtgacgcagcaggaaggccaaattgccgggacaatcgatattttggatattcggtttggttcgttgtggacgaatattccgctggatgcgtttaagaagcttggcgtggcaccgggcgagttggtgcaggtgtcgatttattatcatgatcagatgcggtatcaaaaccagatgccgtttacgcggacgtttgcggcggtacgggttggcgagccgctggtgtatgtgaattcattgctgaaccttggcgtggcgattaatcaggattcattttcgaagttgtatcatattggtactggcgttgattggcatatcactgttaagcggctttaggtataatgaattcattatgaaaatgttgcgtcagctaatcattcgttgacgttgtggcacgaatgatacgaggaggatttttatgcgagatcacaaagttttgagtgtccgaacggttgttgcaatcgggattggtactgcaattttatttattttaaagcgctttgccgttattccaactgggattgctaacacgaatattgatatttcttatggtttcttgggctttattgcaacgctgtttggaccgatcgccggcttctttatcggttttctcggccatgcactgaatgactttactcaatacggtcagccttggtggacatgggttttcactaccggtttggttggctttgtgattgggctattttggcggcggtttaacgttgaagccggcaattttggtgcgaaaaaaattgtggcgtttaacgttttgcaggtgattacgaatgtggttagctggagtctgattgcaccgacgctggatattatcatctatagcgaaccggctaataaggtttatgttcaggggattgtttcggcaatttccaatagcatcgcaactggtgtgatcgggacgattttgttggtggcgtatgcagcaacgcggacacgttctggcagtttgaagaaagagtcttaatatggcggcaccagcaattcaacttgatcatgtgacatttcaatatgacagtcaggctgaaccgaccttacacgatattaacctgacaattcagccaggcgaaaaagtcttgattgtcgggccatccgggtcaggcaaatccacactaggcaacctgattaacgggctgattccacatgcatttcccgggaaattaagcgggacagtgaaggtgaacgggaatgttgtgcaggatcagagtctggctgcattgtcgctgaatgtcggaacggtgttgcaggacccagatgcccaatttgtcgcgttgacagccggcgaagatattgcctttgcattggaaaacagcgccgtggctccgagtgagatgcacaccagagttaaaaagtgggccgagcgtctgaaaattggtgatttattggcgcaggcaccgcaatcactttctggcgggcaaaagcagcgggtggcaatggccggcgtcttaattgatgaaggcgacattttgctgtttgatgaaccgttggcgagcctggatccggcaaccggtgaagcatcagtggcgttaattgatgagctgcatcaaacctatcatgtcacggaagtcatcattgagcatcgactggaagacgtgttgcggcggccggttgatcgcgtggtggtgatggcagatggccgcattctcgctgacgacaccccggaagcattgttgcgcggccaattgctccaaaaaatcggactacgcgagccgttgtatcttgaagcagccgagtttgcaggtattgatttgaagcaggcaacgcacttggcaaacctcgaaacattcgacgccccgaatttaggtgccaaacttgcagactttaccaccgaggcgccgaaaacggtcgccgatcagccgcaaacaccgctgttgacggttgccggcttacaatttgcgtatccaaaaggccgccagattttcaccgatttgaacttaacgctgcatcatggtgagatggtggcgttggtgggacgcaatggtgtcggcaagtctaccttgagccatttgatcgcggggtttctgaatccgaatgctggccagattacgctggatggcgaggatttggccacatggtcggttaaagagcgggcagataagattggctatattctgcaggatccgaaccagatgattagcaagcatttgatttttgatgaagttgcactgggaccgcgattacgtggttgggatgaagaccgcgtcaaatcggcagtgctatcggcgcttaaagtttgcggcttgtatccattccgttcctggccaattaacgcgttgagttacggtcaaaagaagcgggtgacgattgcagcaattttggtactagagccggcattgatgattcttgatgaaccgactgccggtcaggattggcggcattttaccgatatgatgcgctttttgaccaagttgaatgaccaaggcattacgatgatgttgattacccatgatatgcacctgatgttggaatatgcgcagcggacgattgtgctcggcgatggcggcgtcttgatggatgccacgcccgctgcggtattgaccaatccggacgtgattcaacacgcttcgctggcccaacccagcctatatcgtttagccaaacgcttaaatcttgacccgctggcatttacccaagcagtgattgatcaggaacggagggtgcgccaatgaattctctttttggatacgacccccaagacacgtggctgcaccgtttaaccggagcaactaaaatgttggcgttcctcggcatttcggttattgtcatggccagttacgacacacgcttcgtttgcgcagtcatgctggcttcgattattttattcttacaagcaaaaattcactggcaccaaattagcttggttatcaaaattattaccatttttgcggtcgtgaacctattactggtttatgtcttctcgccgcaatacggggtggggctctatggaagcaaacatgttttgatccatgccggctacctgaccctgactcaggaacagctattttatgaactgaatctcgctttaaaatacatcgtaactgtcccgctggccttgatcttcttaatcaccaccaatcccagcgaatttgcggcgagtctcaataagttacacgtatcgtatcgcatcagctactcggtggccttggcactgcggtacattcccgatgtccaagccaatttccgccaaatcagcctagctcagcaagcgcgtggctatgaattgtcgcgcaaagccaagctgttccagcggctgaaagggatggggcagattctcatgccgctgatctttacaagtctggatcgcatcgaccaaatcagccaagccatggaactgcggcgttttggtactggtaagcgtcggacgtggtacatggatcagccgcttcggacacctgattggttggtgctgggtggtgttgtggtgattactgtggttggattggtgctgtttcgggttaatggcgggcggttttttaatccgtttctgggctcgaaccagtaattatgcgtgaccgactgttcaatcaatagagataaatatatggcaatggcggcacgattctcctgaagttaaggaaaccgtgccgccattattatgtcaatcgagaattaggtaagaggaaaccttatttgtcttgatggccaatatctcttacactttctcgttcaacaattgaaattgatgtgtaaatttgctgtttggagactattttcttttctgcgtcaggcgcttccaatcgtttaacgccttcaacccccattttatagaatgcttgggtgacactcgttaactgtggttgtaccatttcgcatatttcagtgccgtcaatgctgactattgataaatcgtctggaatatttaggccaaagtcgcgtgcttggttcaaaataccgactgcggcttcatcacttccggcgataatacccgttaactttgttttgcctccgtaagctttcattgccgcttggccagaagtataactatagtcgcctagttgcacccaatcatcttttggcgtgataccggcttcttttagggcctcacggtaaccctctaaacgaagtcttcctgtataaggatacttgtcaatagcggctaatccgatttttcggtgtcctttagctaaaagtaactgtgtggcctgatatccgatttggcgatcgtcagagctaatgaatgggaatcgctgatcattaaatccaattgataagaaacaaaacggtatttgagactcctgcaagagttcaagattttcagcggatagtgcaattgacaataatagaattcctctaacaggacgttcaatagcagtcataagagctcgtctttgttcaacaggatcggcactatttgaatagatgataattaaattcaatccatgcttaattgcttctgattgaataccatcaataatttgacctgaaaagcttgtcttgacagaactaacaacggtcgcaatgacgttactgcgctgtttgactaactcaactgctgcttggtttcttttataacctagttctttagcagcagcacgtacctttgcggctgtagcctgactatatccggattgtttgttacccaaaacgcgggaaacagttgatgctgcaactcctgtctttcttgcaatatccttgattgttgcaaccatacaattgcctcctgattccaaatgatatttaccaacaattgtacattcttaggttcttaaagcaagaattacaaggaggtacttcagcaaattctattttccttcatgaacgataactacggaaatagcaccgatgaccattgacacaaaaccgacaatcatcatcattgattgactgttacccatcattgggaaaatgatgaagcttaaaagtgatccaaagatttgaggtaagcaaattgcaatgttaaatagccctaaatatgatccttcattttgtccattcagagaggatgttaacaaggtaaatggcagtgtattgatcgtgaagttaccgatgccatatagcgcaaaggcggctaaggcaatccacttattaccagtagttgctgtaataatgatactgattgcatttgcaaataagccaaaagaataccagaatttccgttgatttggttttgttttagcataaacgaatccccaaagtagggcggcaacgctataaaaggctgtcataacgccgtaccaatttccggcagcctggaagcctgccgacatgggatcagttgtattccagatgttttttgccatggctccggttgcataagtccaagtgtacatgatgccgatccaactgaataattgaacaacagccagttcccagaaagactttggcgctgtttttgtaagttgccagagacttggggttttagcgtgttgctttttgaggtcaatttcatgatatttggcatacgtttcaggatcatactccttgaccttgagtacggttacgaaagtggtcaaaaggaggatggctgcgccgattaagtaagcccaaataactgtattaggtacctgacctttagcggcagtatttgacatgccacccatcgtcagaaggtagggcagcaatgcagccaagataccgccagcgtaactgaagatctgttgccaagaccatgccagattcttttgcttgttattgaccatgtcgccggccatcattcgatatggagctaggcaaacattgctgaacaagtccatgagagcaattgcgacagcagcgtatacaagcgtagtgattgagccatagccaaaaccaaatgagccagtaaagggaagcataaccatcacaatggcagcaattggcgcaccaaacaacaaatacgggatccggcggccaaaacgggtccaggtcttgtcagaatatttacctagtagtggctgaacaaccatgcctaacaagggtggtagtagaaagaagaagccgagactattaggattaacgccaatcgtttgggtgattcgactcatttgagatccttgtagcgtaaacgccatgttgaccccaatgcacccaaacgtcatggctaagatcgtctgcatggacaggtcaggcatactgctatcgactgtggtcgtttcgactttttccttgctatctactgaaggattcatcgtatttttagacatattagctatacctttctcttagtattgataaacttttgcttcatatggccgaatgttgtctccttgatcatcagcgtaattagaaattaatattttcgcgtgacttggaagatcataatggcgagtcaagtttttgttcgtgtagtttagaatgacgacaagtgtggtatcagcgtttgttcttgtgaaagcataaatctcctcatcgtcagaatttccggggattaatgcgtaggtgccgtcggtgatgactgggagtgtatgacgtagcttgatgagcttttgataataataaaacactgaatttggatcacccaatgcttgttgaacattaatagttttaaagtttgggttcatttttcccaaggactgtgtttcgaaaagcctgcattttcgtgatcactccattgcatcggcgtccgcgcattatcgcggctatgcatcttgatgtaattcatcatggtcgttttgtcgacaagatgttgctcttcaacgatttggtgataagagttaagtgaatcaatatcaacatagtcttcaattttggagaagtatgcattggtcatgcctatttcttcaccctcatagatatatggggttccttgttgcatgtgcagcatggtcgcaagcattttagcgctgaggacgcggttttcttcggtggtatcatcgccaaatcgggatacgactcttggttgatcgtggttattccaataaagtgaattccatgcttttccggctaaggctaattgccatttggtcagattggcgcgaagatcttttaacgaagccttacgatcggcccaacgtcctagggcggggtttgaattgccgtccaagtccatatgttcgaattgaaagaccatgtttagttctttgttgtcaaggctggcatatttttcagcctcgtcaactgtcacacttggggtttcgccgacactgatcaaattgtgtttgctcagcactgtctgattcatttctcgcaagaattcgtggacatgatgtccgttggcaactaagggttcgggattagcatataattcctgtttgccttttttaccatcaggcaatccctcaggcttagaaatataattgataacgtccatgcgaaatccatcaacgcccttgtctgcccaccagttcatcatgtcgtaaacggaatgtcgtactgtagggttttcccaatttaggtctggttgttcaggggcaaacaagtgtaaataatactggtttgactgagcgtcatatttccaagcagacccggtgaagaatgatccccagttgtttggcgctgtgccatctttcccatctcgccagatgtaatagtctctatacgggttatctttgccttttcgtgattcttggaaccaatgatgttcgttagaggtgtgattaaccactaagtccatcatgattttaagcccaagtgaatgtgcttttgctaataattcgtcaaagtctttcatcgtaccaaaagttgggttaatcgcctgatagtccgaaatgtcgtatccattatcgacttgaggtgacttatagattggacttagccataaaacatctacacctaatttcttaatgtagtccaatcgctcagttatacctcttaaatctcctacgccatcgttattgctatcttgaaaactagctgggtagatttgataaatgaccgcgtttttccaccatttttccactggtaaaatcctcctaatagctcttcattgacattgaaaacacaaatacattgaacaagataaggttatctgtgcaccatgagatccctcgctaccaaaccggagcaaggattgcatgtgagatgaactaaatccgatcggcctaaatgataagggtttagacagagcaaaagagtcaattcaataatcagtacttggtttgaaagttacgcaaacgtttgcttaaaatgaatgtaatccctttcattctgaaagtcaatgttttccggagattgtgattaactttatttatgatacgaacataatgtggactgctgccggggcgcaataaagaattttctagttgagttaatttgccctgtttgttacgctgttcacgtgaacaagtacacatgacagggggagttattttgaaaaagtgggttaagatattgggctttatcgcctttttgagtgtgattctggtaggttgtagcagtcagacaagctcaaaatcaagttcttcaagttcaaaaactaacaagtcaacgagtagtaaagttacaagcggtgcttctcagcaaggctattcggatccgaaaactatgaagagcaaatatgatattgtgatcgtcggtgctggtggagcaggaatgacagctgctattgaggcaaaacaacaaggtatgaaccctgtaattcttgaaaagatgccgatcgctggcggtaacacgttaaaagcttctagtggaatgaacgctagccagactaaggtcgaagcggcacagggagttaaggacagcaatgaccaattttatgaggaaaccttaaagggtggcggcggaaccaacgataaggcgctgcttcggtattttgtcgataattctgcgggtgcaatagattggttagactcaatcggaattaagctcgataagctaactatttccggtggtatgtcagtcaagcgaacccacagacctcatgatgggtcagcagttggcggttatcttgttgacggtttggttaaggaagtcaaaaaggaaaacattccactatttgtaaatactgatgtcactaagttgaatgaaacgaatggtaagattactggtgttactgcaaaagttaatcaagacaaaactaaaaaaatcgttgctaaggccgttattgtcacaactggtggttttggtgcaagtaagcaattaattaagaagtatcgacctgatttggcgcattatgtcacaaccaatcaggcgggcgctactggcgatggtattaagatgatcgaaaaggttggcgggtatgcgattgatatgaagaagattcagattcacccgactgtaaatcagagtaaacatatcttgattggtgaagctacccgtggtgaaggtggtatcttggtcaatcaaagcggcaagcggtttttcaatgaaatgaatacacgtgacaaggtatcagctgcaatcaacaaacagaaaggcaaatacgcttgggtagtcattgattccggcgttcggcaacgatcaagtgcgattgatttctatattaaggacaagcttgatgtagagggcaagacactcaatgatttggctaaaaagatgaaggttccagctactacgcttcagaagactgtagcgacatggaacgatgccgttaataacaagaaggatagtgaatttgggcggacaactgggatggatcacggtctgacaacaggtccttactatgcatttaagattgcgcccggtattcattacacaatgggtggcgttaagattaatacaaagactgaggtgttaaccaagaaacagcaaccaattcctgggttatatgctgctggcgaggtggctggtggccttcatggaaacaaccgaatcggaggaaattctgtggccgatattgttatcttcggtcgacaagcaggtacgcaagcgactgctttcgcgaaagctcagtaagataagtcgcgtacttgagaaaagacagttgtcaccatgttttaagtacttctattcatttgaatattaaaaaaaacagccataccaattttgacactggtatggctgttttttaaaccggattacgcaataaatttttgtctacatggcaatcagaattacgtactagtcaccgttaactgccactgctttacggttgtaaatgggtgttccgtcttctaaatcttccaatgagccaatcttgtttcccttagagtagtaaccgtctaaaagacctaacttttgcattagggtttgtttaaaggcgatatcggcattccattcaactgtatctacaattgcaagtgcagaatgaagtgcggtcaatccatccatatctttgccaccagtggtaatgagcacaccgtggctattcaaaagatacatatgcgggattgctttctcaccaatcttggcaatgttagcggagaccagttccgctaatggttctgaacagttcggttcgaatggaagggtttcaataaagcctaccttttgagttgcttcggtgatattcggcatgttcaggccactggttgcccaaaacatagcattcttagcgtgtgaatggaaaacgcatttgatgtcgggatttgcgtcataaaccgcttcatgcatattaatttcgcgggtcaaatttccttcgccagctataatcttacgggtgtgaggttcaacaaccaagatttgttctggagccagatcgcccaaatatgcctcggacatcattgtcggcgtcatgatgatatattcttttccggtatcttccgcactcactttaaaagaaatatttccgcctgcaatatttgtatcatcgcgttccatcacgatttttacaactttggcaagatcttcgcgttcatgttcaaacataattcgacccttaggtgctttaaacatagtcattttaattactccctttttttagatatgactttgacttgatgacatgagactcgatcagttcacgtttgatgatcgctcttttcttctcgttttctgaaaagagaggacgataacccttttccttaatcaaaaggccaagaattatgacgaaaatatttaaccagtaagtttttgaagttattgcaaagacaaagattccaaaggtgataaaactagtgattgtccacgtaagtctttgaattcgtatctttttattagccatgatgtttcgcttctatccttttgtactggccgttgctgtaggctggttagttttatcgacatactttctagccgggtttggatttttcttaaatgaacgatagacaatccagaagagagccatcagcaaagcaagtcccaataatgccagccagctgcctttaaagccttgagccatcaggaaacgcagatctggtgcttcaattgaactccaggaaacagttgatcccttaggtactgcaatagcctgagttgattttgcaagtgcggtgaattcgttagcaaagaaggtaccaccgtacaggaataaaggttcgtagatgattcccagaacaaccatccttaacaggtttccaccagttaataacagtccgccaacgcctaaacagtagttgatgacgcctgcaaacggcagaattgtatttcctggtagaactgcggcatacaaaatgctaactggaataaggatgaccattgtgacccataactcagtactttgacccaaaatcggccaatcaagtccgataacaaattctcgatttttgaaacgctttttcataaagttgctcattgtcgttccaaatggtgtgagagagtccataaagaactttgccatcactgggaagatcgccataattgcgccggtggtaacagctagatttagagccttaccgattgaatatctaccagctagggcgagtaccagaccgatgatgaatcccatgacaactggttctgaaataatgccgattttcttcttgagtgcctttgcatcccagcggtgattgaagactggaatgtaatccattaatttgttaaccggcgccattaacacggcagtgaaagcttcaatgtgggttgttgtaacacctggataaccaagcatttcatggatttcttctgaccacatatcgccaagttttaacataacgatgacttgaattgcaccagcagcgaatgcccagatataactattagttgttgaataaaccatgtatccggtcaaagctactccccagatattccacatatctgcgtttataacatttgttgtctttgtcaaaagcatgattaggttaacgccaatttctacggcaaagaagacgaaagctagtggccacgcccaagtgattgcagcggcaccggtccagccaaagtcaacggtaggtaaattgattccggtgtttgttgccaaggcttttgcagcgggactgactgcagcaactaaagcgttgattgccattgtcatacctacgaaaccaacaccgaggtaaagaccggaaagtatagctttagaagctttcatgccaaacgcgaaccctaaaatcataataagggcagaaacaacgacttgtggtccaggagagagaatcgcctgaacaatttcattccaattcataattcagtcctccaaattgattaccctcagctcttttgtgttgctgctaaaacggcttcctcaactttggcattcgcctcatcttcccccataccggtcaaccaaggaacaccaacgatttcggttacgtgatttgcttcaatggtttcgcgtaaatcatcgtctgcaggtgcaatgccaacataaacaatgatgtcagggttagaatcaattcttgacttggccgtttcaacaggatgcggttcggcgtgagctacgttatccaggtcgtgatctgcgagaaattcgttgattttatttgcaacttggggacttgtggcaacccctgaaccgcaacatacaagaatggttttcatgacaattacctcctagtgtgcactaactttagagaaatgatcggacaatagactgtacatttgttccggtgtattcgctttcaaaaaagcggagacgaaagttgaatctttaaatgcgctcatcaactgggcaaggaggccaacttgctgtgaaggctctttaatacctagaaataaaaagttgcgagtcgtcatttgctgcatatcgcccatctgtcgccacgggatttcggaattagttctaaccacgtaaatgaatggctttaaaacaaattcgggatcaacgtgtggtaatgcaagttttaacttaggaaagatcaaacctgttggaaacttgttttctcttagttgtaaaccctgcttataatcgcttcggacgtatccttttgaatgtgcgactgaagctacagactcgaacaattcgtcttctgtagaggatttgttttctatatcgattaacccctcatcaaacatgaattcatacaatttcggttctcctttctaaatgttcgacatttaaaaaatatttaactttgtttcaattcgtatagtaagcggtttccttttctttgtcaacaaaaaacttttacttttttcaagctaactctgacaatgcattgaaactgattcggaaaactgaaacattcaatgacaaatgccttttaagtcgaacatacttgaacaataacccgaatcaggctattatatgggcaacggctaccagattggagaatttacgtaatgatgaagaagcaacgtcaaagtgccatacttgcacttcttaatgctactgagggtaaaacacttacgacgacagaaattgccaagaagatgaatgttgcctcaatgacaattcgccgtgatttaaatgatatggctaaagaaaaactgatcactagaatttatggcggggcctcgttggttaatgaaaaaaccacgaaggaaaaaacacaggttcaaagagaatcaaagattgaaattggacgaataatcggttcattgatcctgcctaaaatgactgtttttcttggtgcaggaaccacaatctatgcttccgcggatttcttgccaaagacaaaagacatcaactacgtcacaaattctgacttaatctttagatatttggtgagcaaggatattaatgtacttctaactggcggcttttatcatagaacaacgaatgagttcgttggtacgattgctgaacagacattaagcaactatttatttgatttagcgtttatcagtacaaatggtatttttgaaaaccaagtgacaacatccaattttgatgaaggaaatatccaaaaagccgctatgaagcgtagtaagaaaaactatatcgttgctgaccatactaagtttggaaaaggagattcctttagttttgcagaactaaaagattttgacggtttaatcacggattcaaaggcgtcacgacaagaattaaagatcttacagactgctacgaaattgcttgtggggaagggctgaagaggatgttactgacaattacaacgaatccctcaattgatctggtttataagactggttcatttgacttgggaacgacaaaccgggaactggaacactatcaaacaattggtggcaaaggaataaatgcggcccgtgttgcttcgattttgtctgaggacaagcaagctgttgccgctacaggtttcttaggtcgtgagaacgcgaaccaaattgctcatgatttggcccaatacaatgtcaaagatgaaatgattcgggtgtctggagcaacaaggttttgttatacaattattgacaatagcggggttaagacggaactgaatgagttggggcagtctatttctgcgactaaagctgaggagctcttaggacaagtttcaagacatcacaacttgaaaggagtttcgatcaacggctcgttggcaaaggatctctctgacgatttttatatccgattgattgaacaaatcaggatcaacaatccagacgcgaagattatcttagacacttcgggagcagctctggattcggtcttgagcagtagcgcgcctcctgactatatcaagccaaacaatgatgagcttggtgagcttttgggaattgtcgtgccagaggaagatgatgcagttttacatgcgttgcaacagccgatcttccaaaacattcccaatatattagtctcaatgggttctcaaggaggtattgccaaattaggcgttgatgttcctcagtacttcaagttaaaaatttcgcaacaaaaggcagttaacactgaaggatctggtgatgcgactgtgggtggaatgctatatgcagttgctaagggaaagcagggactggacgttattcgatacggtatggcggcaggtatggccaatgttttgcaatcgaagacaggctttgttgaaaaaaatgcatttttaaggtttgtaactagtggtgaggcagtaatagctcaacccattcaagcaataccgatattaggcgaaaattaagctcagtattttttgctctagccgagctcacatataccaagaagctctaggtagccgcatttttaacggcagcacctagagctttttcttgatcttataggatattttgtaaagtcggtgacttcctaatgatatgggaaatagtattactgatgcttttgtgccactgcttgatgaaccaatgcaattgtcttttcactttgaagacccattcgtcggacaagctcggtataaaggacgtcaaaaatcgcaagctgagacgtcattgaaattagcgcatcagatcgatagcgagtatcttcggaaattgaaaagaaaacatccgatactctttttgcgagtggcgaggtggcatagctggtcacagcaattatcggtacttgatgggctgataataaatccacgagtgccaggatgtctgtgtcattgccagtatgagaaataacgatcgcaacatcgtgttcagtaagcttgtttgcgctcattagctgcatgtgatagtcgttgtcggcaataagtgttaatggcaatcgtagaaaagtgtgatacgccgcttttgcaataacatttgaactccccaatccaaataaagccactttatttgcgtccaacaacaaattgacgctgtgatcgatttggtcctgagttaagaatgatagggtgccttcgagcgcggcaatattagcattgacagtttttcgggcactggccaaagaattgtcatttgtttcgacatctccattagttgtgttgtcaatttctttaagcagggctagttttagttgatcaaatgaagcaaaaccgagttgccgtgcaaaacgcgagatggtggctgtcgacacaccaattttatccgacagattccgtaacgaagagttagctactttagcgtagttgtgacggaaatagtctgctacttggcggcttgcttcacctaaagcggaataaacctgggcaatacgactgtcaaatgtgttcatgttgtcacctcgaaatcaaatgcttgatttttgctaatgaaaggggttacaattcccttgtaaaatcgttactttaaatattgacgaatcgtgtaacattatatcatatgaaaggagataaacaaagtggctgactttaaaattgatacatctgacattcaaattaacgttcatgcagattcatggcaatctgcattaagattggcagccaagccactacttgataacggtagtatcacagcaacttatgtcgaaaatatgattcaagcagttattaagtatggaccatacattgtcattgcgcctggattagcacttgggcatgctgaaccggatgaaaatgtgcttaaaaccggctatgcaattgcaacgcttgatacgccagttaaattcggaagtaaaaccaatgatcctgttgatgttgttgtcgtcttagcatcgatcaatagtaaggaccatctgaagttactgcaaaaacttgttaatttcttgggcagttcaacgaatatgcaggcattgcgtcaaatgcagagttctgaagatgctgcccgtattgttcaggcaatattggaagggtaagtgggggtcatgaaagcactgaatttcattgtttttgaaattctaagtaatcagactatttttctgggcttgattgcgttattaggtctcttattgcagcgtaagaagctacctcaagtgattgatggtgttgtaaagacagttattgggattaccgtactgggtgcaggcgcgggcttactaattaattcattgtcgccggtagtgcaagagttaaataagtcgttacatgttaagggcgtgctaccgaccaatgatgctgtatttggagttgtgcttaagttcgatgagattgcccgaaatgcggttgtgatcttcttactggcttttttcctgcatctattactcgttcggctgacgccaggaaaagattttaagaatgtctatttgacggcgcatctgatgttatatcacgcagctttcatggcagtaacgttgccagttgttttacatgccaaggcattgggcacgattgttgtcggaacattgctaaatgccttgtattacacgtattctccagcaattacacgtagacttgcgcgtaaatggacgcatgatcaaattaccttgggattcatggatcaggtgggatcaattcttgcacactttattggaaaatgggtgggcaatgctgatcccgatcaagatgcagataaactgaagcttcctaaatgggcaagcatgttcagagattcaacgattgttttatttttcttgatgccaattatctttattggcattggagtggctgtcggtcccgcgggtatcacaaagctgtcaggcgggtctaattggataatctggcttattttacagggctttcagtttactgccggaatcgtcattttgctttcgggcgtccggatgtttattggttcaattgttcctgcatttaaaggaatttccgacaagttcttaccgggatcagtaccggctttggatgcgccgacattctttccatattcaccaatgggaggtatgttgggattccttggctcaaccattggcgccatcttagttacgattctaacgattgtgcttcacgctcccatcatcgtctttccttcgccaattattatgtactttgacggtaatgtgatgggtgtctttggaaataaagctggtgggtggcgcggggccattgccgccggatttgtaactggtatgatttcatctgctgccgttatccttttttacccgttgacaggtgcagtttatggtagcggattaacttggtctaatattgattatgctttagtctggacaccggttatgtatttgcttaaggcaattagaatgctgttgggtttttaaaattttaggaggttcatcatgaaaattattgcagtttgcggttttggtgttggttcgagtgtcattgctaagatgaatatcgagagcattctagacgaagaaaacaaatcaagcgatgcgacagttgaaacggttgatctcggcagtgtcagtggaactgatggtgatttatacgttacaaccaacgaattgtttgatcagattccagaagatattcaagaaaagacaattgtgctgtctaatttcgtcgataaggatgcaattaagaaaagtattgatcctaagcttgaaaatttgggcaaataagactaagaagttgattttatgacaactaaagacaagcaattatcaaatgtgacagaagatacatggatcaaagcgacttttcctgagtggggtaactggcttaatcagagtattgatcgcgagaaggttcttcgaggtcatatgcgactgtggtggcttggcaatatgggaatttggctgaagaatgatgagcagacaaatattgcgattgatctctgggcagggacaggcaaacaaacacatgacttgccggataatccaccacgtcatcagtggcgacggatgctaggagctatgcagactcaacctaatctgcgcagaacgccacaagtgtttaacccatttagtatcaccactctggatgctttactggtgacccactaccatcatgaccatttagatcgaaatgtagctgctgcgattgttaacaataccgctcttaagacaccattaattggcccccaggctgtcgtcaatcaatggctagcgtggggagtgcctgagaatcgtgttaaggtggttcatccaggggatagttttaaagtcaaggatattaagattgaagtattgccttcgtatgaccgtactattttgattactgatccggtcggcatgtccgtgccagacgatcgacagataccggatatggatgagcgcgcggttgcttatcttttaaccacttctgcgggcaccatctatcatgctggtgattcccactattccgtaaactttgccgatgttgggatacagcatgcgattgacattgccttattagcgtttgcggaaaatccggttggagtgcaggacaaaatgacgtctgttgatatattacgcgcggctgaagctttaaaagcaaagctagttgttccattgcactgggatgtttggacgaatacgttaggtgaccccaatgaaattttggcactttatgattaccgtaaagaacgatttcgatatcaatttcacccgtttatctggcaaatcggcggtgaatttgattggccgagtgaccgtgaactgcgggtttatcattatccgcgtggctttgatgatcgttttaagcatccggcaaacttaccgtatagctcatttttgtaggtgataccaatgatacatgtcattgcaactgatcttgaccatacgctcctgcgtgaaaatcacgccttgtcgaaagaaacagcaaaggttttatcacatttgcacgatcagggattgaaggttatcttggcttctggacgaccggttccaggcctaaccgatctgaatgctcagttgggtctaatgcagccagaagattattcaatttatttaaatggtgcattggttctgaataacagaactggttatgagatttatagccgaacattgacagcagaaaccttagaggcagttggtcagtttgcacagcaagaagctattccagtagagtatattagtgctgacacggtatactcaacaactgattttggtagatctagctacagtacgtttgctccaaaagggatgaagttttcttatgtcaagcaagcggagttttttcctcggaagccaatctataagatagggttcgccaatgaaccattaaggattgatgcccttcaagccacaattaagatgttgaacgtatcagttactcgatcacgaagagaatttttagaattaatgccactaggggtcaataaagcagtgggtctcgaaaaggttgttcaccagttagggtacaatgcccaacaggtaatggcatttggtgacgaggagaacgatctggagatgttgcggtatgcaggggttagcatcgctgtggccaatgcacagacaaaggtaaaagctgttgcaaggtatatcacagatacgaatgaggttgatggagttgcacaatttctgaaaagctggttttcaacttcatcttaagtttacgtgcttgacgttggttcgttttcaaatgcattgattcttataacaaacagagcctttagtgagtttccatggcgcctctgagatatgttctcaagaggcgtttttaaagtttagatgatcacatgaaacgattcccacaatacagtgttggaaaacgattgacaaagctaagaaacagatgttggaactgtactaatgttaacgatattggtctatgtcatcgctttgataattgaaaacagaataatgaaaagtacgttttaacggtattgtttttgaattaaatgaaaaattttatgaaacacttttgtttgaatttagctaatagctgtattatgagcattgatgcaaaacaaatctgaaatatatttcattatttggaacatttcgaaaaatccgaaacttgttcccttttaaatgaaaacgcttgcataaagacttgagcggcataatactcaatgtgtacccggggaagagaagaatccagattgaataaccagtttggtataggaggatacacatcatggatgatcgtaaattttcagtattaattgcaggtggcggcagtacttatacaccaggaattgtcttaacgttgttagatcacatcgagaagtttccacttcggaagcttaagttctatgacattgatgggcatcgccaacaacgcgttgcggatgcctgcaagatcttggtgaaagagcgcgcaccagaagtcgaatttttagcgactacggatcctaaagaagctttcaccgatgttgattttgtgatggcccagattcgcgttggtaaatatgcgatgcgctcacttgatgagaagattccgttaaagcatggtgtggtcggtcaagaaacaactggtcctggcggcattgcgtatggactacgttcgattcctggggttatcggactggttgattacatggaaaaatattcacctaatgcttggatgcttaattattcgaatccagctgcaatcgtagctgaggcaactcgtcggttacgtcctaattcacgaattattaacatctgtgatatgccaattggtattatggatcgaatggcgcaaattgttggtcttaaggatcgtaacgatcttgtattccggtattacgggttaaaccactttggctggtggacagatgttcgggataagactgggaaagatttgatgccaaagcttaaagaatatgttgcaaaaaagggttattggttgggtgacgaggacaaagacaccgaggcaagttgggtatctactttcaaaaaagcagcagatgtgtatgcattagatccaacaacactaccgaatacgtatcttaaatattatctatatccgcaatacgtggttgaacattcaaaccccgactacacgcgaacggatgaagtagaagcctatcgtgagaaaaatgtcttttctgagtgtgatcgaattattggtgcaggaactgctgcagatacacatttcaaatccgacgatcatgcgacttatattgttgatctgtgtacagcaattgcctacgataccaaacagcgaatgttagctattgttcctaatgacggtgccattgagaatattgatcctgaagcgatggttgaggtgccttgcttgtttggggctaatggcccggaacgtttagcaatgggtaaggcagctactttccaaaaaggccttatcaccgaacaaaactgcgttgaaaaactcgttgttgatgcttttgaagagcaatcgtatacgaagctttgggaagcaatgagcctttgcaagattgtacccgatgcaagtgttgctaagacgatcttggatgaaatggttattgcaaacaaagactattggccagtattgaaataagttgactgtgtcaaaatccaaataacgtagagaggacgagaattaagcgaatctgttaattgctcgcccttttctttcgaagagaaaagtaagggcttacattatagaaagcgagatgagcttcaatgatgcagaaacttcagcgattcggtgccgcaatgttcacaccggtattgcttttcacgttcgccgggatcatgactgcaatttgtattttgatgacaaatgagcagatttttggaagtatggctgcccctggaacgaattggtatggtgtgtggcagacgctgcaagccggagccttcacagtctttaatatcatcccattattgtttgttgttggtttgcccattggtttggcaaagcagtctccgggacgagcggcaatggaagcggtcgttatctatgcttcttggaactacatgatcaatgctattttaacgaattggggaccggcgtttggattcaagaactttgccaaaatgacaatcgtggccaattccaccaaccaagggcttacgaacattatcggtatcaaaacacttgatacgagcattgtcggagcattagtagtggccggtattgttgtctggctgcacaaccgttattttgacacaaagttgccagactggctgggtacttttcaaggatcctcttacattgttattttaggactctttattatgattccgttggctgttgctacttgcttcttatggcccaaagttcagatgggtatctctgcgctgcaaggatttatgaaagcatcaggggtgttcggtatctgggtctatgccttcttggaacgggtattgattccgactggactgcatcatttcatttatattccatttgaatatggacctgcagctgtatctggcggattaaaagcttggtggtttgctaatctgaatactttgggtcagtcaactcgtccaatcaaagagttagcgccgttaatgggatttgaaggttatggatttgaaaaagtcttcggcatgcttggcatcggattaggtttgtatgcaacagcgaaaccttcaaaaaagaaagagacagcagcactattaataccggccgtcttaaccggaatgtttgcaggtattacagaacctgttgaattcacctttctctttgcggcaccgctattatggtttgtgcatgcttttctggcagcaacgatggacgccataatgtttgcggtcggcgttgttggtgagtttagcggaggcttgatcggctgggtttcggagaactggatacctctttggaaccatcaatggaaaacgtatctcttacaaattgcaatcggattggtattcgttgccatctattatgttgccttcaagtacttaatcctgaagttcaattttgtgacgcctggtcgtgaaccggaagatcaaagcgcgaagcttatgaccaagaaagaatacaaagcggctaaggaggcagaaaaatctgctcattcagtggcttccgacccgtatacacaaagggcaattgcttacctgagcgcacttggcggaccggataatatcaaggaaatgaccagttgtgcaacgcgacttcgagtgacggttaatgatgaaaccaaggtggcgccagatgctgaatttaaagctaataaggccgtgaatgtggttcatcacggcaaggccttacaggttattgttggcctagatgtgccacaagttcttgaaaagattcaaggtcttttgacggatcaggatactgttcaaccggctgcaccatcaatcgcggttgatgatacgcctgagtctcagaccgccgcgcttcttagcgattcactgggtacgcaggaaaatgtgcaaagcgtcaaagatcagggtagcactttaattgttcaagtgaacgatcctaatttagtcgattcggttgatgtctttaaatctctgggaatcggggtcaaagacgtccaagttactgataagactgtcactattacattttcagagatggccgatattgcacgacaaatcatggcgtaaacggttacatgatataatcgggtaaaccagttcatgagagagggcattattgtgcaactagaatccctgattaatcaaaaatataccagtttgaaccaaagcgataaggaaatcctgacctttattgtgaagaatcgtgagtttgtccgcaactcaagcttaagcgaagttgcggcaaaatccttgttttctaaatcagcgattttccgttgttgccaaaaaatcgggctcaccggctttagccaacttcgctatgtgttggctgaggagcaggaaagcgaccaagattcacttagcaacgttgattatttggcccaaacagttaagtccatgttatggacggttaaccaatttaagagcacgaatgttgagggtatttatgccacgcttgaaaatgctggcacgatctatatttattcgactggatggcagcagcagatcatggcccaacaactgcaacgcgatttataccttatcggcaaatttgcgtttctgtttccaactggccatgacgagatgcaactgtcaagcaccaagatcaagccaggggatgttgtgattgtgatttcgtacaagggcatgaatgcaacgattgtccagctggtaaataacttaaaattaaacggtgttcagatcgtgtcatttacgtcatttcggcaaaatcgacttgctcaagcggcaaactataacttgtactatgacgtgatcaacaagacgatcggggccgacaaaaaagtcgagcgtttcttcgcaaatttaacacttcttatcgatattttcagcatgggatttgccaattatttggcagcacaggaagagaggacgcgtgagcatggtgaatacaatcagagggaaagtaagtaactactttcaatcgttggcgcagctgttgcaccttaatcttaaaagggtcttctatactattattctgattctcgcgctcgtcccgttggcttatgtactctttttgatgctgaatgctgccaaagaaggcctgagcataactggtgtcatgaaagaacggcctacgattgcgattctgtccatcgttgcgggtcttgacgtcatgtgcggttattcattgtggatgatacgtgagcaggttctggcagatcgccggctttatcagatgatcttgatcggcgtcctgatcacccaattgtttgtaagtaatctgctggtcgccggagctgctgtggctggtcttatgtttagcggtcagattcagaataccgatgcgatcctgccgaagagtaaagtgattgttcccatgagcttactgacgtttggatatgttttctgcatggctatgatggtagccgtcatgacacgataacactgagcttaataaatgcgggtaaagacgaaaaaggtgatgacagtgcagccgaattataaagatattgcggacaactatatccaagctttgggtggtgcagataatattgattctttggttaattgcgctacccggattcgggttattgttaaggacccagataagactgcttccaatcgtgtctttatgcacgtaggggccgtaaattttaatcttcacggacactttgcccagattatcattggtttggatgtcgctcaggttttagaagcaatgcgcaaacggttaaacctgaccgatgagggtacgttggacgagtatgggttgacgccaaatggcgaacgcgctcggattctttacgagtgtctggggctccctgagaacattctaagcgtcacggtcattggttcggcggtcgctgttcaagttgttgatccggattgggttgatccttacgacgttatgttgcagttaaacattggtattaagagtttaaccaaacacggtcatcaggttcgtatcgagatggaccaagcaaccgcaattgcacgggaacttaatcgcttgcttcggcaaaacaaaagacagatccagtgacgattgcatcaaacacgcaaaagcttttatgaagagtgctaaagaagaaaacgactttaaggagaggcgggactgaagatgtttggtttgtttaaaaataagaaaaagactggtgaagaagttgttgctcctgcaaccggggtgctgatgccgctagatgatgtcaccgatgacgttttctcgcaaaagatgatgggcgatggctttgcagttgatccagaagataatgaagtcgtggcgccagtggctggtactatctcaaccgtctttccaactaaacatgcgattggcattacgacaccaagcggactagatgttcttgttcacatgggtctagacacagttgagttggaaggaaaaccattcgctgttagcgttaatttgaatgatacggttacggcaggacaaatattagcgacgattgatcgtgatgagattaaagccagtggttacgacgatacgatcgtggttatctacacgaacatggacaaactaaagaactttccaaccgttgtgcagagccatgtcgttcaaggacatcaaattggagaattagtttacagttaaattctaccgaccttttgatgaagacttcatcaaggcgactaaccatcaaacttctaggcaatttggaggatgagacatggcgggctttattttcgattttaatggtacgcttttcgcggatgcggataaacaggagatttcctggcgtcgttttgcacgcgactatgcgaataaggaactttctgaccaagagtttgatgatcatgttcatggtcagaacgccgaactgacgctgaactatttgtttgatcgtcagcttacgagaacggaagttaacgattatagtgagcgtaaggaaaagatctaccggaatttatgtcaggcagacactgaccggtttcatttgctacaaggagcaccggaatttcttgatgagctgcgcagggcaaacgtgccaatgacgattgcaactgcttcggcgaagaagaatgttgacttcttttttgaggcgttcggtttgtcaagatggtttgatatgaagcaggttatttacgatgatggcacaatgaagagtaagcctgacccagatccctttctcagagcggcgttaaaattggagttacgaccagaacaaactgtcatctttgaagattcaccgtcaggattcggtgcagccaaagcagctggtgctaaatgtattgtcggtgttgtgactaatcataatcgcgcggtgttggaaaaggattcgcgcttaacgctggtgattgatgattatcttgaaataccgatgtcgaagataaaacagcttataaattaggtgtcttgcttaggtttgtaagcattagcttcaaacagcatgtcatttgcacatttgaaagatttcacttacgagaacaggttttccaagcaaaagtccttgccacggaagatctgtttttgtacgcttgcacagaaatcaatgctaaagtaaggcttaggatctctatcatatagcgtacaagggggtaggcaggtggaaatatacaagatccttaacaacaacgtcatcgttacgaaagatgaacaaggttttgaacaagttgcgatgggaaagggtatcggatttaagcggagtgccggcgagacgctggatccgtcattggtcgataagatcttttatctgaagaacagcgatctgcaggaacatttttcgtcgctgatcaatgaagtaccttatgcgattctaagtgttagtgagaagtttattgacgaggcagccagtcaattaaaacaaaagctgaacgcaagcttgcatgtgtcacttgttgatcatatctatcatgcgctgaaacgttacgaaaaagggcaacttatttcaaactcacttatttttgagatcgaaaatttgtaccctgaggaatttgagctgtctgagcactttttacagatgatcgctgaacaagaaggcgttcagttaccagttgatgaggccggattcattgcaatgcatttaattaatgctgagatgaatgaagagatgggaacgacggtttccatcatgaaagaagtttatgcgattctaaacatcattaagtactcaatggatgtcgagtatgatgaaagatcgttaagctattatcgtttgttgacgcaccttaagttcttcgttcaacgtgttatgaaggggagcatgctggcgagtgacgatgcagaattgtacatgttggtcagccgtaaatatccggatgcttatcgtgttgccaacaagattacaaagtatgtcgccaacgcttttcacgttgtgctgcctgctgaggaagtgctgtatctcatgattcatcttaaccgtttaaagacacgtgaaacggaacttgatcgggcgtagctacgtgctatgaacttgagaaccgattttgttttaaaaaagatggttgacttttgaaaatgtaaccggtaccattgaggtaacttaataatactgtataagattagtggattgtgactgttcggcaggcgaaacctaagcttttacgaggattcatatgcagatacgtgtatgtttctttgttgaagcttaggtttttcttttgcccaaaaactggttgaatttacgagtcagcacagcattggcgagactatacgaggaggcgtactcatggataaccagaagttagcaaaggaaatactagccggggtgggcggtgaaagtaatgtgaattcgctggtacattgtgcaacccggttgcgattcaaactcaagaatcgcgatattgtcaataaagatcaagttgccgatattcctggcgttgtgaccgtgatggaaagtggcggtcaatttcaagttgtgattggcaatacagtttcagatgtttatcaagcattcaacggcatttcccacttagttgatgacgatcaatcagccgcaccagcggctacagatgagaaagagaccatctttggaaaatttgttgatttggtgtctggattgttcacaccgctacttggggtgatggctggcgcaggtatcttaaaaggcttactttcaattgcgctccagcttaaatgggtagttgccaatacgtcaacctatacaattcttaatgcgattgctgatagtctgttttattttctgccagtattgctggcgattactgcggcgcgtaaatttaaagcgaatacctttgttgctgtcacgattgcaggtactttggtttacccatcaattatcacattagctaatccgggggttcatgctgacctgtttggcatcccgcttgttatggtgaaatacacctcaacggttattccgatcattttagcggtttatgtggctaacaaaattgaaaagtttctaaatgatcacttgcatgaaagtatcaagaacttcatcacgccgatggttgtcttagtcacagttgtgccattgaccttgatggtgtttggaccattcggcgtttatgttgggaatgcgcttgctgctgttttgaccgctatttttaactttagtccgattattgccggtgcgcttatggccactgcatggcagatcctggtcatcttcgggttgcactgggggattgtgccagtcatgctcaataacttagcgacgcttggaaaggatcctttgaagcccggcgttgccatttcagtctttgcacaggccggcgcaacgctgggggttatgctgaaaacgaagaacaagcaatttaaggcattatccgcctcagccgcgatttccgccttgtttggcatcacagaaccagcgatctatggggttactttacgtctcaagcgtccctttatcattgcggtgtcttcagctgcaatcggtggcgggattgccggttttgctggtagtgctggctatgctgctgggccttccagcattctgatgattcccgccttttatggtaaaaccggcgctggatttgtcgggttcttaatcgcgatggttgtcgcattctctaccgccgccattctcacgtatttgattggtttcgaggatgtaccagtcaaggctgattcattggctgcaaacaaagagaagcctcaggttggtgaaccgacaacgacgcatatttttagcccgttaacaggaacgattgtgccactagcggaaattaaagacaaagcatttgcatcaggcgcgctaggcaaaggagtggcaattttaccaacaaagggtgaggtactatcaccggttgacggtaccattaccatggcatttgcgacaggtcatgctattgggttaacggccaatgatggtacagagattctcattcatatcggattggataccgtgaagttaaatggccaatattttactctgaaagttgaacaagaccaaaaggttaaagtcggcgatccgcttgtgacatttgatttggatgcgattaaagcagcagggtatgacattacaacgccagtgattattacaagcatggcgccacatgaggacatgattgaaagtacgcaaacagagattgaaactggagaacgattggcaaccttaatttgagctaaggtcttggatcgtacttgtaggacgaaatcactgaaattaagtgcataggatcggtattacgatcgcctatattcttatgcaaaagttttgactgattgctaattgaggaggatataatcaatgaacgtatttccaaaggactttttatggggcggcgcactagctgcctgtcaagctgaaggcgcttatttgcaggaaggtagcggcatggctgtttctgatatttctttctttgaccctaagttggatcgtgaggatttatcgaagcatcgacatgtgaccacccagaatatcgaagttgcgatggctgatcctggaacaacacgctatcctaagcgacatggcattgatttttaccatcgttatcgcgaggatattgcattgtgtgctgaaatgggatttaaggtgtttcgcttttccattaagtggagtcgtgtctttccaactggtgaagaggcggagccgaatcctgaagcgttggctttttatgatcgagttttgactgaaatcgaacatcatgggatgacgccgctggtcacgatttcacactttgagatgccgttggcgttagtcaatcggtataatggctgggccgatcgccgggttattgatcttttttatcggtatgcggacagcttgtttgaacatttcgggcaacgggtgccttattggatctcattcaacgagattaatgcaggtcgtttttcaacttttaaatcgacaggtgtcgttgaagataagagcgacaactacttgcaagcctgctatcaggcggttcaccatcaatttgttgcagccgcgaaaattaccaaacggttgcatgaagtgaatcctaaagctcaaatgggatgtatgattgcccgctttacaacgtatgcggccaccagcaagcccgaagatgttttgcaaatgatgcatgatgatcaatatgataacttcttttatacagatgtcatggtaagaggtgcttatcctggttatatggggcggtttttccgggagcatcatgttgaaattgtttggggcgatgaagacgagacgctgctaaaacaatatccggctgactatttagccttcagttattatgtgtcgaatgtttcaagcgccgcaccagatgatcttgatgtgaccgattctaatctaaaacagactttgaagaatccatatctggaaagctcggcgtggggatggcaaatcgatcccaagggtttaagatacacactgaataatttgtatgatcgctatcaaataccgcttttcattgtcgagaacggcctcggcgccgaggattccgtgtctgaagatgggcaaatcatcgacacttatcgaattgactatcttcaacggcacattgaacagatgaaggaagccattattgatggcgttgatctcattggctatacaacttggtcgtcgcttgatgttgtatcctcaggaacttctgaaatgtcaaaacgctatggctttatctatgtggatttagatgatgagggtcagggcacgcttaaacgtattcgtaaagcgtcgttttattggtatcgacaagtcattgcgtctaatggcgaagatttggcttttcgggaagcagcggcgcttaaacgttagaaattgaatatcgcctgacattgaagccagttgagtaaggcttgatgtcaggttattttatggctgtttttttggtctgaagcggataactgttacgagttttcgagaaatattaataaagtataagcttaatcgctttccgtgaaggttgttatcaacgtatattggaagcgtcgattctagtttagatcagcaacttttatgtcctcctcaaaggacaaaaacttgtaagcgcttactggcctggctgagataatgatagtggaaggagatgagaccaaatgaccaccgatcttgcgcagtcagtgatccatctactgcaagaccaacaaggtttcttgacttctaatgagctggccagagaacttaaagtttcttctaaaaccattcagcgggttgtgagtcgaatcaacaccgcttatggcaataacatcattacttccgagaaggggcggggatataagctagattacgaacgatttcttctaagtaaattgagcggaaagtcgtcagctgaccattcgctgccagctgaacgacagaagaaaatgctaaagcgattattgctcgcggcaccatcggaacttaaagtcgcacagttagcagaagatttctatgtcagtgaatctgtgattcaaagtgatatcagctctttagagtcgtggctgcaaaggtacgatttaagcgttaaacggattaatcgaaccttgcatattcaaggagaggagaaggacattcgcgatgctttgatggaggcgattctgggtttgagtaaggatacaacgatgaattttcaagcgatgacgcagggcttagcggaacacgatacaacttttgcgctaaaacaagttgatgttgtctcgcaagttttaaaggccgacctaccttatccatacgatgtcaatctgttttcgcatatttacgtgttgatcaatagaattcggaaatttgtcaagctgccaattgaagacgaggacattacccgtctaaaggcaaaagtgcacaactatccggatttgtacagtgtcagcgaaattgtgaagcacaacttggagaattatctgggtgagccagttgcggagaatgaagtttattacctctttcaatatctgatttctgccagatttacgggaagtgatttcaagacaaaggccggcacctcggcttatacgtttgcggaggcgctcatcgataaagtcgctaaggatattcagttgcctgacaatactggggctatggttgaagaacttgttccgcacgtggcgcccatgcttaatcggttggaaaacaatatccgactgccgaatgcgctactcaaagaaattcaggatgaatatcctcgtgtctatcaatcagtgctgttggcgacagcatcactcgccaaagcataccatttgccagagatttcagctgacgaagttggttttctctctctttatatcgccaagtatatggaaagttccaagcgtcctaaaaaagcgctcgtgatttgcacaacagggttaggttcgtccgagctgatcagcgccaagattcgcaaagatttaccggatctggagattttggatattatttcaaatttgaacttggaaaaggctttagccagacatcctgatgttgacattctcattagcacgattaatttgccaaagcaaaagcacattccacaagtattagtgagcgcgatgttcacagttcaggataaaaacaaggttgaagaggcgttgaggaggcggcaagatgactagcttcaaagcgattcaattaattccaattttagacttgccagccgaggtatcgccgactaaattggcttgtctcgatgcgatatcgaccacgttagctgacgtatcggggaaggacaagggtcaaatcaagactgcatttttggaacgagaggctgttggtaatacggcgctagaatcgggtgttgttattccccatgcagtcttggtaggacgtcaggcgccctttcttggcatcctgtgctgtcccgacggcattagtgattggcaagatttggatagtcatgccgtgaggctggttttagccattctgttaggacgagacggcctgacgtcacaagaaggcgatgctattaaggtattatttgaagcactggcatcacctcaatttttggacacacttgcacaagcgtctgaaccgcaagcggttatgacaacaatcaaaaacaaattggaggacaactaatatgttagtatctggagatcgtcttttacaagtagctaaggaacatcactttgccatcccggccttcaatgcggggtcaggacaacttttcacggcaacattagagaaggcagaagaactgcaggcaccctttattatggctattcatcctactgaactcgagtttttgcgggatagttttgtggcgcaggtgattgatgcggctaaccatactgatctgccgattgcattgcatttggaccatggcgcttcatatgaacaagtgattcatgccatccatctgggcttcacaagcgtcatgattgatgcttcactaaccgattatgagcaaaatgttgcgctaactaaaaaagtggttgaagccgcccatgcgacaggcgtttcggttgaagctgaattaggaacgattgcagatacgggaaatgatgttgaaggtcatttaacggataacgtcaaatacaccgacccagaaactgcaaaagaattcgtcgcggcaactggtattgattcattggcaattgcgattgggacggcccatggtttataccccaaagatgttaaacctaaactcaaaccagaaattgcaaaagcagttgcggaagcggtagacattccgctggtattacatggtgcatccgataatccggatgacaagattgcccaggcaattgagtatgggattaataagatcaatatttcaagcgacattaagattgcgtttgccaaggatttgcggaccgtccttaatgaaaatgaccctgacgagattcgtgagccaaaagtgcttttcccttcaccgatgatcgccacccagaaggttgttgcccagaagatcaagttgtttggggatgtagaccggacaaaactctactatcagcacgaaccggttaacgaaattccctatgatatcaagaatctccaagttgaacatttcagcgcttaatgcaacttgagggaagggggcttaattgatggaacagcttgaggaagttcttgatccaaggttgatcagactcaatttgcaggcaagctctaagcgtgatgcgattacgcaattatcagagacgctcgaggctgcagattatattaacgatgtccccgccttcgtcaaagatatttatttgcgggaagaagagggcatcaccggaattggcgacgggattgcgattccccatggcaagagtgattacgtcaccaaggtgggtgtggcgattggcattttaaataaaccaattgcatgggaaacattggatggcgaaggggtgaatattgttatcctctttgcggtaagcaatgatactgaatctgcgcgcaatcaattgaagttattatcgttgtttgcggcacaactgggacatgatgacgtcgttaagaggctaaagcacgctgctacgcctgatgcagtcattgcagcgttcactcagaaagaaggttcggaacaatgaagattgtcggtatttctgcatgtgcagctggcatcgcccacacttacattgcaaaggaaaaaattctgcaggcggctaaggatgccggggacacggcctatgtagaaacgcaaggaacgattggcactgaagatgccttaacctcggaacaaattagtcaggcagatattgtcttgctggccattgatgtcaagatagccgggcgtgaacgatttgcgggtaaaaaagtcgttgaagtgccaactgatgttgcaattaaaagtcccaaaaagcttatcgctaaacttcacgagctttctgggcagcccagttaagcgaggtgggtaagatgaaaaagattcaaattaagcaaccggcattgaccgcaatttcgtatttgattccggttgttgttgcaggtgggttcttgctggcaattggcaatattatgggtggtaagaatttagaagcagtcaaaggcatcgcgaatgtctgggatgccttttcaacaatgggcggcttgatcttggggatgttgccagttgttgtttctacaggggttgcctttgcaattgctgacaagccggggattgcaccgggatttctggttgggcttatatcgcgcattattggtgcagggtttctgggtggcttgattggtggtcacattgccggttggtcagcattgctcatcattgcctacgtgaaagtaccgaagtgggcagcaggtttaatgccgacgctgatcattccttttttagcgtcagtgattgccggattcttcatgttctatattttgggtgggccaatcgctgcagggacagtttggctcactgggtacatgaagacattggatacaagtcaaaagtttctgtatggcttaattattggtatcttggcgtcaattgattatggcggggcaattaataaaacagtctttgcatttgttcttgccttgcaggctgaagggattaatgaaccgattacggttttaattcttgcgtcaatggtaacgccaatgggttatacgttggcctacttcttgggtaaagcggttcacaagaatatctacacaccattggaagttgagacactcaagacagcttttccgatggggctggtagagattaccgaaggcagtttgccgatcgtgttgaacgatctttggcgaagcgttgtcgcaactggtgccggtggtgcgattggcggcggtttctcgatgttatggggagcagattcaaagattcctgctagtggtttgtttgcagttccgacaatgtcgcgaccgtgggcatttattatcgcactcatcattggcagtgttgtgaccgcagttgtctatctggtgctaaagaagccagtttcagctgaagacttggcaacggagaaggaagaagaagacctcaatctcaaggatttgaagatttccgattaagcttaatcaaggagaatggaccatatggaaagtagtctgtttgtaggtaatccgctccaaacatcaggtgcacagacaatccaatttttagaaggtaaagcagctggtttgaaaatgattcgaatgtacaacgaagcgggtctcagcatgctcgttgcgccggatcgcggcatggatataccagagctgaaagttcatgggaccaatatctccttcgtctcggtgactggtttcgtcaacagcacgtattttgtggagcagggcgcaactggattcatgcggaacttcaatgtcggctttttgacgactggtggtctcagttatatgggcgcccccaaggatccagcccgagggctacatggaacgattggcaatacgccggctgaaaacttctatcatcaggataacggtcaggccattgtggctcagggggatgtaagagaagcggagatgttcggggttaatctcttattgaagcgtcgcatcacgctaccaaaagcccaaacgagtatttatctgcatgacatcgtcgtcaatgaaggcagtcgtccagcacctttaatgatgttatatcacatgaacttcgggtatccattctttggtcctgaaacccagctggtgctcgatccgcttgtaacaacagatcgagacggactgccggcaaccgactggaagacattctcattgcccaaagcaaaaactgaagagcgcgtttatttccacagctttaaacctgatttcgacgatatggtgcagtataagctgttaagtcccgagacggggttgcaggcaactatttctgttcaatcatcgttgttgtcggtattaaatgaatggaaacttatgcagacaaagaattatgttctgggtttagagccggcaactaacaatgttaatggcattgaagctgccgagcgtgctggaacattgaagaaacttgctccggatgagcaagcaacatttgatttgcgggttgatttttcaaggatggaggtctgagcttcaatgaagcgatcaaggatcaatcagattttaaaggaaagcgaaagattcctcaggcagcgtcaagttgttcttcccccttttggtcagtggcaaccagctgactggggagatctggatacttcttatgcagaaatcaaggataatatgcttggatgggatgtcacggatttcggaaccggtgatttcgacaaatacggcttggttgcttttacatttagaaatggcaactatgcggaaccagaaaagtatccgaagccttattgcgaaaaagtcttgttgttgaatgaaggtcaggagttaccttatcattttcatcgactgaaagaggaagatacaatcaaccgcggcggcggcaatttgcaaatcacggtgtggcattcaactgaggatgaaggattggatcgcacaacgccggtagaattggttaaagatggtcacaagcttgtcttggatcctggtacagtggtgacgctccatccaggagaaagcctgacaacaacaacaggtatttaccataagtgggaagtagagcccggcacaggtgaagtcttggtttgggaagtctcctctacgaatgatgacaacatcgacaatcgatttttacgtgatactccgcgagttcctgaaattgaagaagatgaagagccgtatcggttgttgttcggagattatcgaaaattgtagttaattttagcctgaagacgtcacaatcttcaggctttttcaaatcaatatgctaaaattctttggcatgtagcgaagagcctagggaggtaaatgatggcaaacgatgtggttttgggaatagatttgggcacaagtgccgttaaaattttggcgctttgtaaggatgggcgcctttatacccattcggagccgctccaattgattcatccgcaaaatggctataacgaacaggacccagaagactgggtcttgcagacttataaagcaattcggattattgtgcaggaaaattcaatttcgcctgaagctattcgtgctgtcagtttttcaggccaaatgcacggcttagttgcgttaggggcggagcatcaggctttaagaaatgccattttatggaatgatacccgagcggctgaagaagttaatgaaattcatagtgatctgggagaagcatatattaaagtcaccggcaatcgagccgttgaagggtatgttttaccaaagtttttatggctgcagcgacatgaacctgatgtttggaatcagatacgggcaattattttacccaaggactttctgcgattaagaatgaccgggaaactaggaactgattattcagatgcaactggaacgggctattttgatattcagaaaggcacttggagtcaggaaattttgacacattttgggattccgcttgagtggatgccaccggtgatatcgtccgggacgattgttggcgccttaggtgtagaagctgcaatggctaccggattatcaacggatacgatggtcacaatgggcggtgcagacaatgccatgggcgctatcggagctggtgttcttcatcctgatcagatgatgtctagtattgggacttcaggcgtcattttacatcctgaagaccatctgccacagaactatggtggtcaactccagctggaacgacatgctattcagtcacgttattattcgatgggcgtgaccttggctgccggcaattcgctgagttggtttagagatacgttcgctaaagacaagacttttgaagacttgattgacgtggcacgtcgctcaacaattggtgctaatggtgttcgctttgcgccgtatctttcaggagagagaacgccttactttgatccgcacattcgtggtgcctttacagatatttcaaatgcaaatacatttgacgattttgcgcgagcggtgctggaaggcattgtgttttcacttaatgatgtcattaacttgtatagcaagtttggtattttaccgaaggaagtgatcgctatcggtggtggtgcaaaaaatgccttttgggcacaaatgcaagcagatatttttaaagtaccaattaaaattcccaaggttgatgaagggcctggatttggcgctgccatgatagcatcggttgcggctggttggtttagaaatgtcgaggaagcgattaagactttggtgttttacccatatgtctatgtacctgttgagaatcaatcatctagatatgaaattgtttatgaatcatatcatcaattatatgcccgactaaaataaggcatttgattctcaagaacgtttaattggccagaaatcatggaagtcaatccgaagagaaatatgtttggattttgactgcgtgatggagacatcgcctagattagtgattttaactgggatcttcagcctttgtcttggacataaagaaaccctctaatcttcttggtaatccaagcatagatagagggtttcggtaattttatgcagcaacggaatgttctaagggctgtctgcgagctgctataatgatgtcgatagctgaaatttcaaattgatttttaatcctgaacagcagcatcactaggttcaaggttccatccattttctttaagataatcatctaatttttcgcggacatcctggacacctaggccgattatgatctggatgtgcttatgcttgtctacgacacctgaggacggataggtcttcaaggttgcaatatcaactttatcggcgtctttaacgtcaattcgcaatcgagtgaaacaattatttacattttcaatgttgttgatacctccaaggccttttacgattactgcgagatcagaagcgggcttaggtgctgctggtgatctcttttcttggacagctcctttggcagttttttttgttaattcatctggaattaattcgttttcgccatttcgtccaagagtggggatattaagcttaataatcagtgccttaaacacaaagtattcaagaagcgctagtccgagtccaatcggtataagaagccactgccttcctaagccgaatggaaccgcaatactatacatgatggtattgatgatgttttcaaccatcacatttaagcccaatacgttggaaataaatagtccgaaaccatagatgatcccatgcgctaaccacagaattggtgaaatgaaaaggaagagaaactcaatgggttccgtaataccggcgaatgcagaggcaaagaccgctggaatcaggattgctcgtagcttaacgcggttttccggtttagctgtgtgaatcaatgcgaatgcaataccaattggtagggcaatataaccgaaattgactagatagccaacagaggaatgaattgaggtgacggacgacatattaccgatctcagcgagccagatattcattgccccattgtacgtttttcctgcaacctgtgccgttccaccaagtggagtgtaataaagtggcatccacaggaggtgatgcatgccgactggcagtagcattctgtttaggaaaccataaaggaagaagccaaacgcgcccataccagatagacctccgacaatggcgttgaccgcgccattaattggtggccaaatatatgaaactgcgatggcgaagatgatggtcaaaaagatcagtactacatatgcaaatttggttccttcatagggtgatagatatttgtgaaatttgacatcccctaatttattgacaaagaagccgactaggcagcccaagatgatacccagaaaaacccccatgtcggtaacttgaacaccgaggacaatgttttgcccagtgccgaatagtccttgtttacccgctttggcaagttgaccagtttgggacaaccaaaagttattagcatagatgaagatcaaaaagacagtgattcctaatatagcggcatccgtcttcttcttttttgcaattgctgctgcaataccaacgcagaagatgactgataattgattgatggccgcgctggttagaattgtaaataaacccgtccccacatttttgataccttcaggtaattgttcaagcttcataacagcggcaactgaaatcaagagtccggtgacggccataaacatgacaggttgaatgatagaacgggcaaatgtttgagtgattttttgcaatttgtccttcataccggttcctcctccagaggttgatcctgggtgactaaatcgcgataggtaccaagcttgacaccctcagcagccaaccttgctttaagttcgggcttgataagctcgcgaagggtataagtgcggccggtcgtaaaactagaatgttcggtcagatctgcatcaacatatcctgggtgacacatggcttccacactgccaaaggttttgacgtcttcgattaagttgtgaagcggcatcggctgccaaatcggtttgcaaaccccaatttgatcgagagcatcattaaatcgtttgatcgttacaattcccggcgatacgttataatttccgcgaacgggtaattcgtaatcagtggcaagttgttcgaatacttccgttacaccatttagagtatggacgtgatgatggctatccaaatgatcaggcgtaataccgctggcgatcacacgatcaatttgggctttccactctcgataaagctcattttggttaatttcaaaatggtcttcatagaagcttagtcgtttgaattcaccgttgctggtggttagagagggcacatcttgtaaaagtggtttgccacaggttagggtgaggtgaacgccaatacccagggatggcgtttgaattgccagtctaacagccctttcaaaaccaggcattccagccattattgtggtcgatgttagaacgccttttttatgggcatcaaggatacctaaagtaatcccgctgccgtacccaaaatcgtcagcattaataattaacagacgcataggtcggacctccttttagttcaacccattgatcaccatttgccttaatcatttcgtccaatgcttgtttggcgactgttgcatttggcactgtttggttaagggtgaaagcttgaaaggctttttgataagaatgttcaaagaaggcatcaacgagtaatttttctgcagcaacttgtgcttccatcagacccttgtgaaaatcgggaatcggatcacgtaacgagatcggttcgacacccttagcattgacatagcaaggaacttcaacaactgcatcttcgcgcacgtttggaatcgcgcctctatttggaacgatgagcatgaagcgatcattgcgactatgcagaattgaaattgccattcggacaatgtactgaccatgaacgccgctttggtaattgatggtttctagatcacgtttttccttgatttttgaaacggtatcagtaatctgctttagtcggccgtccataatctcatttgcacgcgtgtaatcgggattcgcttcttctacgattttgttgggatagaggtagtattcaagatagttgttaggcagatactgaggaaagtcttgttgcatctcagccatcagctggtacgtttttgcccacgatggatcaagatcggaagttttaaacccttgcgtgataatcttttcaatgatttctggcatgatatctttaccgcgttgaacatcgtatatttcgcggtaccaaccaaaatggtttaaaccataataggtcgaaatgaagttttgcctatcatagccaaacgagttttcaagcaattcttcaatgccaatggtcatatcacaagcattaatgatctttgcttttggaaaacgccggcgcaccgtttcagcgataattgattcggggttggtgtaatttaagatccatgcatcaggtgcatactcttggatgaatccgactagttcaacaaaacttttcatggaacgcatcccataggcaaagccgccgagtccgcaggtttcttggacgactaacccaagcttgagtgggattttttcatccatttcgcgcattttcatgccaccagctcgaatctgagagaagacaaagttgcagccgtaaaaagcaacttgcggatctgaagtcgcaatcagttcgacatccacgttttctcggtgtaacaggtaatccatgataattcgcatttgttcattacgttcttcatcaatgtcatacaggcgaatttccttaattgggaattcatccttatagctcaaggcagttagcagaattcccggagtgtacccgcttcctgaaccagcaatcgtaatgatattcttcatcctaaacctccatttaagttgatcagtgacttgacactctaagttaaccatgtaaccgtttacatttgaacagtgtataatcataatgactggttgttcactaaattgaaaaaaagtgtcattaaatggaaaattatgtcaacagggaggtgctttctgatgttacgtcttttttcttcgcgtattcagcaagcaaaagttacactgactcataatgaaactgaactactgaggtcgcttagtgctcaggctggcgtgattcctagagcgactattacggaattggcacagtccgtttttagttcgccatcaaccatacatcgactaattcggaaactcggcttcaaaggttacacagactttaaagtgcgtgttgaagactcgcttgaaagtgaattgcccttggttcttgcgcaacctaatttgctaaagatcactataagctcaatcgagcatacgttcagacttaatcaaggcgtgattagagatgccgcaaggctgtttttggcagctgagcgccattatgtctatggaaccggctggcgacaaaaacaggccgtggataacttctccacggacctgcttgtttatggtgaaagcagcattacattacgcaataaatacgatttaggtaatgcggtcaagcaaatgaatgagcatagtgtattgctgttcacatcgctctccggtaatacggatgagtatgccgccacgcttcagcaagcaaagcttcaaaaggtatcaatcatttcggtcaccagagatgtttctaaccccttgagtgagatcagcgatgtagccatttactttgcggatgacaccaatcttcaagataatcggcattggccggcaataacgatgtctttttctttagaaatgttaataaatgagattttaaattttcaacatgaatgaatactataacctgaactttattggatgtgcgaaagtggaataagttttgagggcggctctgggactccttatcttaataagggtttccaaaaccgtcatttttattaggtgtgagttagagtaatgaagtttaatttgcaacgatggaaacagagtttattaaattagataccaataattgaaagcggcacatttgatgaatagcagagtactaggaactggatttttacttgctctacatgtgctttatataatccggcaagaagaccttatttaattggagtgagcggcaaatatcaatatctataggtttgcggaagagctgagcgaaaagcgatgacaaatgctgagaatataatggcatcaattttacatgtcacacctcagtgacaaaatcataattaagtttgaaagcggaatcatttaatataaagactgtaaagaagaaagcgaggacagagaccatgccgatgttcacaaaagataatatgatcatggaacttcatggagataatcagaaagaaatattggaagcactagcagcaaaggcttatcaacttggcgctgttaaagatgcagagacattggttgcggattacctggcgcgggaagaagagtcgacaacgggatttgggaacggtgttgcaattccgcattcaaagtcggacaacaacctgaaagcaaccattatttttggtagaagtaaacaagcgattgagtggcaatctttagacgggcaacctgcaaatacctttattagtttaattgtgccagcgtctgaagcgggtgttcatttgcagctgctagcaaaactcagtcgtcagttagttcatcctgattttgttgatgtgttgaagaaaggcagtcaagatgaggtctttgacgtaatccagaaggcaattaattagaagagggtcacgtactcatcacgagttatgattgaatgttttcgttagttttgaatcgaggaggaaaagatgatggcaaagctgaagatagtaggtgtaacgaattgtcccgctggaattgctcacacttacatggtcgccgaagcaattgagcaaaaggcaaaagcgcttggctatgaagtacatgttgaaactcaaggcgctaatggaattgaaaataagcttacaccagcagaaattgcggctgctgattacgttatcctggccttggggaaaggtatgagtgatgaagacaaagctcgttttaatgggaagcaggttatcgaacttcctgtttctgaagcattgaaaaagatcaatgtcatttttgataatctacacgatgaagcgcatttgtacacggcatctaaggttcaattgggcgatcgtaaacaaacaactggtatcatgagccacttaatggccggtgtttcggcagcattgccgtttgttattggcggtggactattgatggcacttgggagcttaatggtccaatttggtgctcctaatgtcgcacctaaagccggccaaatggcttccttggcttgggttcttaatactgttggtggtttaggctttacaatgatgatcccaattatgggtgcttatattgcttattcaattggtgataaacctgctttggctcctgcatttctggtgacttaccttgcaaacactccagatatcttgggaactcaaggcggtgccggtttcttgggtgcaattgttattgggctgagtgttggttattttgtcaaagctttcagaaaagtcaaattagggaagacattccaatcgactttgggttttctaattattccgttcgtgacgctattgctctttggcctcgtgacctattatctcttgggacctggtatggcgtggttgatggctgctttgctgagcttcctgcgcagtattccaccggaaatgaagattgctggtgggttcttagtcggcgcaatgttggcatttgatatgggtggcccgattaacaagacggcttggttcttcgggttctccttgttgagttctcatgtttatacctggtatggaattgcgggtgttgtcacggtgttgcctccgatggctgcggcgattgcaacatggttacggccgggtctgttcaccaagcaagagcgtgaatctagctggccttctatgcttgtcggaatgaccgttgcaacggagcctgcaattccatacgctttagcagcgccagtacctatgattacagcaaatacacttgctggcgggattgccggagctgtctcaatgggactgggcgttgaaagattagcaccgggtctgggtgttttcgatccgctaattggattatcacgacctgcatgggcttattacattgcactagcggtaggcttgatcttgaacgttctgtttgtgattgtcttcaaatcggcatggttgaaacggcaggaacgtaaaaatgggcttgtgagtttggatgatcagccacaaagtaccgttattgcaggcgacacaaatgtttcaaagccagcagcaaaaggtgttcaggcaacaaagacattgtcacccgatgctgccaagaaatagttagcaaactagggatggtgcaggggcttaggcttctgtgcctttttagaaagaagcgattaaattgacaacttatgactttgatcatgttatcgatcgccggggtacgtttagcactcaatgggattatattgctgataggtttggccgtaacgatatcctgcccttttcgatctcggatacagattttccagtaccagttgaagtgcaagatgcgctaaaagaacggttaacacatccaatttatggctatacgcggtggaatcatgctacttacaaagacagtattgttcgctggttcgagcgtgatggtcatacaaagataaacccggattggattgtttatagccctagcgttgtttttacgattgctacgctcattcgaatgaagagcgatcccggggacggagtggctgtgtttacacctatgtatgatgccttctatggtacgattgaacagaacgatcgagtgttgatcccgattcgattagcagctgcagatgaaggctatgtgattgattgggatagtttggcaacggtacttgctgaaaagcaaacaaaaatatttttattaacaaatccgcataatccgacaggatatgtttttacaaaatcggaattagcgcgaatttataacttgtgtcaggctgcccatgtgtttttgatctctgatgatattcatcgtgatattgtttatccaggtcattcgtacgaaccaatgacaaatgtcggcacaagtgatgttgcactctgctgctcagggtcaaaaacgtttaacacaccaggcctgattggctcatatgctttcttacccgatcatgatgtaaggacacaatttttgacggaattaaagcagaaaaatgctttgtcttctgtaagcatctttggcatgttggcgcaaattgcggcttataacggttcagaggattacgtggaacaactgactgcctatacaaaaaataatatggagttggttgctagttatttagaggaaaatttgccggaattgcagttttcgttaccggatgccacgtacttagcctggataaatgtgtctaaactgggattaacatcagaggaacttcaacatcggttagtaaacggcggccatgttggcattatggcgggcaaaacttatggtgataccagatatctaaggatgaatattgcctgtccaaagaagaagttagtgatggggctagaacgtttaaagaagggaattaggggataatatgctcttactcagagaaatcaaagtcttacgccgcctgtcccaacaagatttctctgggggcgagctggctaaacaactaaaggcatctcgtcgaaccattgtccgtgatattgccgcaattaatactgagttgcagtcttcaggcattgggatgattacaacccaaaacaagtaccatctcaccatccttaatcctggtcgattaatggctttgttagatacaagtcgcgatgaagctaatgaaattctcttacggttgtgtatctccgaaacgattccaatggccgacttgattgctgagacttatttatcacggacccaaatcatggattacatctccgagctaaatgcggattacgcggatatttttcgcataagtagtcgcccaggaatgggaatgaccatcaagatgaaacggttaacgcgaattgacattgctgctgactgtatctttgaatatccacaattgttggataaagttgcaccgggtactgaccgcttgccgcaactgacagattatttaagcgagaatatttgtccttaccagacatgggtaatcgacagtcagtggcgtgcacaagtgcttgcagcctttatttgctcaccgtcttcggggacattgacggcagcaagacagtctaatcaaatcgataattttgtaaagacacgtgaagcactgttaatgggtttaggaaagagtcgggacaagattgttcaaatgtttagtgagattgcagatgacttccagttagaagcgattggtcaatcaacttttgagtcactattcacacattttgttcgcgagtgtgcttttcctaggccactgagtgttttaagtgactatgatattgccaagttgtctgcccagaacccagtagcttttgattatgctcatgttgttgcactcgatttgtttaagatcagtcatcaagtttggctggattcagactttttagccttgtatattgtccaagcagttaatcaaagagaggcaaaacccgtcaggatcctttttttggcaccgcgaatgtccttggctcaaattaatgcgacaattatccagcaaaagctgcataatatttctttgcatatggtacgcagccttaaggaagccgaaacaattttcgaccagcgccactttgacttagctattgcaaatgtgcgccatgatgttgttgagcatgcctcaattagttttgtgttaactttttcggcagttgttactgatcaagatatagctgcgcttgagcagttggtcaatggccaatattatcgagagaacattgcagccatgcttgcccccaatcattttgttggccaaattacaggggataagtttctaacagttttacagaaaggacttcagaactttgtcagaaatgatctcttagatcgagcggatgctgtaaagattattgaacgtgaacaagctggcaatcagctggtcttaaatcatatctcgatcccacatattgttacgaatagcgtgactgattatcgcttgtttgccattaaaccaaaagaggtcattacaattgatgaccaaccaatatacttgttggttattgtgttggtcggaacatctcaggctgaaaagaatacaatcttcagctatttatatcaaacattgcgaagatacgtaccggctgatattgaagatgttcaggattatcagcaggtgattaaattgctgaaaggtagcgtgtaaactttataaaataggcttttactccgggagttagaaacaaacatcggggcataaaaagtgcatgttggtctagttttccaccaacatgcactttttatgtgttgtcttaactgtgtcattgcaaatttattttttattcgagacttccttgtttaagcaacttttgacctaatgcgccgcctgggtgatataaggcaaagtctgaagcagtgaatccttttaaccttgagattgtgcaggcaagcgcatcaccgaccattagcgcagcagttgaactgcttgtaggtgcgagtcccaagtcatcagcctcatgggtaactgggatggttaagacgctttcacaagcctgggctaagtgggagtcatcctgtcctgtaaaggcaacggtcgcggctccgatacgtttgagtgagggaagcggcgcaagtgtttctttggtttcgccgctattcgaaataaggatcactaaatcttccgaggtaatcatacccatgtcaccgtgcattgcctctgtggcatgaacaaaaatagcgggcgttcccaaacttgcaaatgtggcagcaagtttaacgccaatatgaccagtcttaccgacacccatgaaaactaatcgaccagttaaatgcataattttatcgatcactgaacaatactgcacgtcattaatttgagattcgatcagttgcattgcggcaatttctcgctgcatataagtatgcaccaagtctagcttgttttctttcattctgatgacctccttgcgtcaccatcattgttgactgggttatgctcaatagcaattgttgttgttagttctttttgttgaccaactcacataaatgaaaggtctttatacgctttgatattcagaaaagcgatgtggtggcagcgctttctaaaagtgatcagagacattgttgatattgtgagaagacaaacaaaaggtgcaatcgaatccagttgaagcatgggcagttagcgcttacatttgatatgtagaaacgaagaaggtgaattcagaatgattgaagatattatcacaattccgctcattcagctgagagtaaaaacgactgactggcgtgatgccattaaaaagtccggacgtgttttggttgaaaatggtgatgtgacacaaaattatgttgaggaaattatccgttcggcagagaagtttggcccgtatttcgtcattgcgccgcatgttgcattagcacatgcacctcgtcaagcgggcgcaaggaaattagctatgggcataaccacactggatccgcccatcgttttccacaatcaggcaaatgatcctgttcgatatgtgtttacattaagcgcaacagatgctgacacacatcttaaggcgatgcaagaatttgtccaattactttcaatgggcgacttttatactacccttgatcgagcaggatctggtcaggaaattatggcgtatattaaatcagctttggcaatgaataaggagtgatcatgatggttaaagtattagttgcatgtcgtgcaggggttggatccagcttaatgttaaagatcaagttaaatgaggttatctctgagcataagtggaacttagaagttattcattcgtcactggatgaattaagtagttttgacggaccaattgttgtgacactaagtgatgtcgcagaggaattaaaagaagaagggatccataaagaaattgtcggtatcaggaatctactagataaaaatgaaatttatacaaaggtctcaaaagcattacaagatgttggcgttaattagcggcgttaagatgggggatcaattatgaagttcttagttagtctgctttccacaccagcaatgcttttggctgttgtttcgatgataggtttaatttcacagcggaaaaatccaaccgaggttttcactggtactgctaaaacagcaattggttttttaatctttggaattggtgccactacgatgactggcacactgcaaaatttcaacaagctttttacagaagggtttcatatcaatggggttattgcttcacctgaagctgcgactgcccttgcccaagacaagtttggttttgctgtgtcgatgaccttgattattggcttcatcatgaacctagtgtttgcccgtattacaccatttaaaaacgtgtttttcaccggtggacatagtctcttttttgcttgtgtgcttgccttggtgatgaaggcaaatgggttcaataatacgtggacaattgttgttggagggacgatattaggcttttgttctgcagctttaccacaattatgtcagccgtttatgcgaaaaattaccggtggagactttcaagcaatcggacattttaacatgtttggttatgcactttccggcttgcttggcaacttttttaaaaaacatgttgatgatacaacagaaaacattaagttccctaaagcgttgtctttcttcaaagattttctgatgggctttgcttttgtaatgctgattttattctatattgccgcgattgctgctggaaaaccagctgtcatgaagatctctggtggcgttgattggttagtctttccgctcattcaggcactgacatgtactgctgggatctcggttttgatgactggtgttcggatgtttctagctgaaatcactgccgcattcaacgcttttgcggagaaatttattccaggatcgcgaccggcacttgatgtcccaacgatttttccgtttgcaccaactgcggttcttgtaggcttcttaagctcttatgcagcaggactgattggtgttggcatcatgattgcctttcacttcgatatggttatcatcccggcagcacatatctgtttcttctctggcggaaccgctgcgatttttggcaattctacaggaggatggcgtggggcagttttcggctcattcatcgttggcctgttacttgttttcttaccggtgttactatatcctgcaatttcaagtatgggtgtttcaacggctatgttcccgaatgttgattataacgtggtaggctccttactcaatagcattttaggcctgtttcattagtgccagttgattagtgaatgagaagagggataaacaaaatggcacctttatcaggtatcttagttgcgatggtaacacctttagacgatgatcaggaaatcagctttaaaagaacagatcggttgttggatcgtttattaactgaagagattgcgggcattttcattttaggaacaaatggtgaggcttacgtcttagcggagaatgaaaagttggcatttgcagaacatgttatcgactatgtccatggtcgaaccaaagtacttgtaggaacaggtttgaacggaacagcggaaaccattcgcttcagtcaaaagatagcatctttaaaaccagacgcaattaccttggttgctccttcatttgttgctccctcgcagcaggaacttgttgatcattttgctgccataatccacgcggttgatatacctgttctactgtacaatatgccagcaaaaacgggcattaacattgagcctgcctcattaaaacagttgtcaaaatataagaacttaatcggtataaaagatagctcgggaaagtgggagaattttgacggttatctagccaatcgccccgaacggccattctcagttattatgggctctgacggtcgcattcttgaaagctttcagcacggcggtaatgcggctattgcaagtacagccaatctcctgacggctaacaatgtagcgttgtatcacgcatttgttaatgacaatattgaaaaagcccagaaatttcaggatcggattcaggcccttagaagtgtcttgcataaagcgacgatacccgtatcgcttaagacagcactcaatattgcaggtattacggtcggaccagcaagactgcctgcaaagatgccacgagaacaggatgcgttataccaagagattggtgatgtgatcaaggaatatgaacttcagggcattatttagcaaaggagaacgcattgaaaaaatttgacttaatccaaagaattctagctagtggcgcgcttgcagttgtacgcgcaaagccaaagcgagtgttggaaattgcagaaggtattgttggcggcggcattcccgtaatggaaattagttatactaactcggatgcgccagaagcaatagatcttgtgcatcaacgtttgggtgacagaattctggttggcgcggggactgtgaacaatggtgcgactgcaaaggatgctatttcgcacggtgtaggctttttatactcccctatctttgatcaggaggtcatgagcttagcaaacgaatatcagattccttacgcaccaggctgctcaactgttaccgaagcggtgcacgccatgagagcaggggcaacgttcattaaatactttccttatggtggattattggggccggatattattaagacaatcaagacgccaattcccgagatgccattgttagaatcaggtggtgttgatgctagcaatgtccagcagtggtttaaggcaggggtcgaggttgtaggcattggcagtgccttatcaaaaggtactagtcaggaaatcgaagcaagtgcacaggctattcgccaagaaattgacgcgtttcggtcggcagctaaataaagcgttagggctaggcaaaattggcttagcctttttcgcattaggaaaggaggaagaatggatgcttgatataaagcaattacaaatcatcgacacaatgattcagaatcctattttgactaagactagattaagcgaggaactcgactttacaaatcgtcaaatagattatgcaatcgaaaagctgaaccagcagcttgtagataacaaaatgccgcagattgatgttgatggcgcatatattaatgtcccgagtgagtcgtatcaatacttactgaatttacgcgcctctgaaaatctgacagcactctccggttatgttctaagcaactcagaacgccaattgtttcttgcactgctattggcttgccataaagggtatttagcgcttatacatcttcaagattacttgcaggtaagtcagtcgaccatatccaaggatcttagagtgctggagcaacgactcctgaactttcagcttagaattcattatgatcgtcgttcgggctacaggctagaaggctctgaggataagatacgaagctttatgattaagttagtttctaaacagttgtttaaaaaccatgctgatttgttaacgacatgtgctcaattgattcagcaggttgatgtcagtgccaaactgacgcaaatttcaaagctggctcatgccagcgaaattgattttgtggaaaatcgttttcttgaatttggctatatctttatctttatgttggcgcggttgcggattaagaaggattatttacctgctcgggcacaaaagatgaatatacagagcactcgggaatatgagcttgctgaatctttgttgaacaacgaaggcattcataatattaccgcaacagagtatctaacaacgattattttatgtcttagcattggtggcttagagaatatgcgggcagatcgcaacatcttttcggttaccaatcaatttgtccagaggttttcagacgtttctgggatcgtctttgcagataatcataaggttactagacaaatgttcactcattttagatcaatgtattatcgattacagtttgggtatcctattacgaatcccttaacggaacaggtgatcgaaaattatggggaagttttcaccttagttgctcaagctatccaaacgtttgaggacatccttggcaaagtgcctgatgatgagattgcgtttttgacgattcacctgattagctttatctacacaagtgataactcgaagaatgattatgtaacagccgtcattgtttgtcctaatggcattggtagttcggccttagcctatctgcaattaaccagtttgtttcctaatataaaatttctgaaaccttttcgttatgcagatttggatagtcacttagctgacgcagacttgatcttttcaacattttataggagcgagctttttgctaaaggtaaaccatgtttcattatcaagccgatcatgtcagctgaggaaaaatataatcttattcaggaagtcaacactcgaatgtcatcaagcacattgactatccccacgttaaactccgtgatggaaattgtcgcacgaactgtcaagaatactaagcagttaggacagattcgcagagaactggatgttaacttgtttaagccaaaagttcaccaagaaaacatgaagcttacgttgattgatgttttagaagaggaagatattcaattgggcgtcaaagtcgatacgcctgaagaagccattcggattgctgccaagccattgaaggccaaaggtgcaatcaatcagcactatgttgaaaagatgatatctcctgatgatgggcattctttagacgcttatattatttcaccgggcgttgcactgccgcatacagatcctaaaaatggtgcacaaagagtcgctataggtataacgactttagagaaacccgttttctttagccaagcaaaaagcgaaaaagtaaaattcatctttgtgttaagcgcggttaaccctactgaccacttgatggtgttacaagatttaatggatttgttgggcgatgccaattttatgaaactgttagcagataagaagacagattcgcgaaaggtaatgcagtatttacgtgaaaagaaagtaaaacagagttgatgagcgcgactgttgtactaaaactttatccattccgccatcccctcaataaccggcttcaccgtctcaccacgagctgtcaaccgataaacagtagtcagaggttcttgcgagagaatctctttttgaattaggccatcagtgcatagtgccgcgagttggcgagctaacatgcgagttgaacaaggtggaatgctggcgtttagttcaccgaagtgccacttagcttgttgggtgaagcggtacagaatgattgctttccatttgccggagatggcttgtagtagctgggttgctggacatttttttgcggtggtcgatgtgcaagctggcatttaaagacggctcctttcgatactagtgacaaaaagtgcagtattgtggcgatgtgtcagtcattataccattaacgaaacacaggaaacgattgacctgtgacgatgcttagtctcttattgaaaggatgtttttcagtgaattcgattgccccttattatcagcggcactctactcggttgtttactgaccaaccagtaccgcgagaaacgcttacggaagttattcgaacggctaatcatgcaccttcatgggaaaactcacagccgtggaaggtttacctggcgattggcaagacagcaaatgccattcgggccgagcattttaaggctgttcaggctcatcggaaaagttggactgaggtgacgccgccgcttgcttggcaaaaaacagcgcaggcaaatattgatcattggcaagcctccacagctaatttcttcaatgaaaccgaagcacatgcatttcatcaggcggggccgatgctttatcgtgctccggcgttaatttatttaaccatcccgcgggctgcttcggcgtattcagcttatgatgcaggtgcgtttggttatggggtacttttggctgctgctgcgaatgggcttgggtcaatacctgcttatgagatcattcgttatcccgaagaaattcacgcgcattttgatattccggatgatgaggtcttgttgatgggaattgccatcggttatccagcgaaaagtaaaatcaacgaattacgcacagatcgccgttcgctaggtgactttgtgcaaataagtgactagtcaaactgccctgagcttagtagcaatgctgttttttaaactccatccccacctaacccttcatcccacccagcttgcagccgatactcctcttccccaacaacctgcttagccccaaaataagcctcccgttgatgcgtcgtgttcatcagtgtccgagccatcgtcgcagtgaccacaatgtgatgttgttgctgggcatcctttgtcagcggcaagttgccttcagcgatgcgtgccagttgactgataacgtccatcagcaagttgctgccggctaagatttccccaaaacgtgcggtgtgatacgtggtgggtaaggtaagtgtgcggcctttttggaagcggacggtgacgattcggtgatgctgccggtttgtgatggcgtaatcaacaagccggtgggtcgcgatccaaccgacattgcggtgatcgggagccgctagcggcatgaaggcatagcatggaccggtgagcatcttgggcagttttttggcggtcccgtgatataatttttgcacgataacttggcgcatcgttggggagtaaaccgaactgttttcgtgcgaacgaatgaagcctaacgtcgatggcttgatcaggtgtgccgcagtggccgtgagtatcagcgtttttcggggaaggaaagacgctggtaaagggagaatcgccaaaatctcctttaacggcaactgcgaggcgtctgatgctatcgcgttacgggcgagttcagtcacgagacagtcgggatcatctggagcggttttgaccatagccgcgttatgtatggctcaattttagtttaaacttatgctaattaaaagctaaaaatgttaaacgcggtgaatttatggtacgaaattgcgacaggtgttcaggaaatggcaacaaattgtctagtattggctgattttatcgagcttaggaggtaattgggcgaggagcgaggtgggtgtgttatgtatgaagctgcctttttggtgtgagcgtgagtcagcccaggttggctcacgcgttatggtgtgacgtgacaaggtaactgaaaaagtcgatacttaatgaaaaacgcgtccggctgcgacacccggatgcgttttttgatgggcgtgagccggcgtggttagggatcggagtataagtggtcttggtcgtgatgacggggttttggccattgcgaccaagatcctgacacgcagattcctgtgccggtgaacacgttaagaagcgtgtgttttgatggaagtgcgatccgatgaggtgaaaagtcggggagcacttttttaaatgcaaaaaaagttagctgaaaatttcgcgcaatttatgtttgaaaaggcgataaacccaggcctgcacagataaatacccgcactcactaaatcgaaagcttgatagaacaggttttcactcatctgattgcgaccaagacgaatcactgcttgcctcgttaaactaaccttatcgatatcgaaacaaacaaggcgccggatcggatgaagtgatggtaacagaagcgacaggatttgatttttttcttgcgcatcaaggagtggtttatggggcgttggcacggttggggattcatcgtggccgcagtgattttcaggattggcgggatgaagggatgttggtgtatctcaactacttcaaccgttatcgcgagccgttggtggatgagacggcaatcgcaaagttcaataagttggcgtggcgcttcgtgtttctgaccttgatgcagcggctgcaaaaagcgcagcatcggcgggagttggaaaacgtaccggcaaatacgacgcatattcaaacgaccacgctggcgatggcgccggggagcttgcaacaagcgctggaattgaagtggcagttgcagcagttgcacaggttgttaaccccgatggaacgccatgtgttgcagttgcggttaagcggattgtcagatgctgccattgccgcccagctgcatgtcagtcggcagcggattttgcaggtgcgcaaacgggtgcaggtaaaataccgagcgctgagtcaaaactgtgcctcggtttaaacaaaatagtgtgcgcgattgcgagagacagtagcaaaacgctgcgttcctatccgcatgctgaaaatagctgcgaatcagcgacaatcaattaacttttatggaggataacgcaaatggataaagaattattgacgtatgtattagatcaggcagtcggtgttgtcattgccgtgattttactcacgcgtattgaacggcgcctcgacacgctgatcacacatatcgaaacgttcatggccaagcttgatggcaagcaattacggtaggaggggaaaagatggcgatgttaatggcagatgtaagcagttggcagccggattcggatagctggtttcgcaagttggctgatctgggtgtcaaggcggtggtcgtcaaactgacagaaggaacgacttaccagaatcctaaggcggcggcacagttggcggctgggcgcaggatggggatgcaggtgcacgcttatcactatgcccattttcataacagtgccgaagccgttgcagaaggacgtttcttcggcgtcacggcccgcgcgctgggcgtgtcgacgcaaagtgtgatggcagcggatgttgaagcacctgatttgaatggggagctgacggggctgacgaatgttttcattcagacggtcaaagcgctagggtatccacacacagacctgtatacaatggcgaattggatgaaaaccagacgctttgatcgcgtggcattgattcctaagaacctgtggattgcgagttatggcgttgatcagccgggcatcaataatgtcgggacctggcagtttaccaataactttcacggcttaggggtggatatgagttatgactttttcggtcactacaccacgcgcttgaccggtaacctcaatggcggcgtggcgcgcgttcccacgattcgctatcacacggttttggcaggcgaaagctggtgggcgattgcagatcgatatggcttgaatatgtacaagctcgcggccctcaatggtaagacgatctacagtgtgattcatccgggcgatcagctgcggttgaattaaagcggcgatattttgacaaacggttgtcgatgcggtgtgatgccttgcgtcggcgatcgtttttaatttgaagcgggtttctgaaaaaagattttgcaaaagatgttgacaccgtgtcactatccgtgtagactacaaattgttgaacggtgacacggtgtcaccacgcgtactcgtcaccaccaaggtttaaccgtggcggcgaaagcttaaggaggatcaacatggttttagcaacgttccaacatttagatcaaacaaaacagcaacgggttctggctgcgttggtgaccgaattttcgcagcatccgttggcacaggcgcaggtggcgcggattgtgaagcaggctgacattgcgcgtggggcgttttataaatatttcagtgatttaaaagatgcgtatcaatatgcgtttaaagccgtgatcgggcggttgcatatgggcattgcgggtccggaaatgcggcgtgatccgtatgctgccaccgcggcgttcttgcacgaagctgatgaaagtcaggatcgtgatttcatccgcatgcattttaccaaaaacagcgggttggtgacggttgggcagcccccgattccagccgatgcgattgaatgggcggtagcgaccttatgccacagcgcgatttccgaggcgctggccaacccagaacaggcggatttgattttgaagcatctaaaagcagcacttaaccagctgcaagtgaaggagtgagtcgatgtatctctcattaaaagaaatttggcatgaaaaattacgttatggtttaattatcgccatgattctgctggtcacctatctggtgttcattctcagcgcgctggcaaacgggctggcgcagcaaaatacccaggcgattgaatcctgggacacgtcccgagtcgttttggccaaggattccgacattaacttaagccagtccttgttgacgtctgaacagaccaaggatctcaagctaggtaaaagtcaggcctatgtcggaacaatcggcgcggtggcaacgagcagccagcacaaagagatccgctccacgatgattggtttggattggaatcaatatattggcaaggacatgaagctggtcagtggtcaccgagttcaaaacgaccatcaagtggtggtggacacgcaattcaagaatgaaggttacgcgctgggcgacaagattcgcttgagtaccaaaggcgatcgctacaccattgtcgggtttaccgagaacgccaagatgagtgtggcgccggttgtctatggcacgatgaccacctggcgtaccttgcacaatctgccgaccagttttaccgccagtgggatcatctccaagacggccgattttaaaatcaacaccagcgatcttaagacgtattcggccaacacgtttattcagaaactcccagggtattcggcgcaaaatagcaccttcacctttatgattgggttcctgtttgtcatttcactgatcgtcattgctgttttcctttacattttgaccatgcaaaaactgccaaactacgcggtattgcgggcccaaggtgtaccagcacggactttggttgcgaccacgattgatcaggcgttgattctagtcagtctgggactcgttttaggcggcgcattgacggcgatgacagctaagttcatgccgctgggtgtaccgatgattttctcggcgggactcagcattgcagttatcttaggcatcctgctcaccggttttctcggtgcgattatccccgtacgcaccatcttaaaagttgatcctgttaccgctattggaggttgatgatatgccagcaatcgaattaaaaaacatcattaaaaactttaaaacgccaaccagtgacgttgaagtgctcaagaacgtcaatttcagtgccgatgccggcagtctctcactggtactcgggccatctggatccgggaaaagcaccttcctaaccattgctgggggaattcaaaccccgactgacgggattgtaaccacagccggggaaaatctggaacaactttctggcaaggcacgagatgcgttgcggttggacaaaatcggctttgttctgcagtcttataatttggtgccgtatttaacagtcggcgagcagtttaagctggtcgataaaatcaaaccaaaagggaaccttagccatgcagccctttctgagttattggatgatttgggtattgcaaacttggtcaatcagtatccggcatcgttatcaggcggccaaacccagcgtgttgcaatagcgcgggcgctttatccggatccggcgattgtactggcggatgaaccgactgcggcactcgatagcccgcgggtggcagtggttggccagttgttggctgatcttgcccacaagcataacaaagcgattgttgtcgtgacccacgatgttcgccttgaaaagtttgctgatcggaagtttacacttttggatggtaagttacgtgaaggcgaaccggagtatgcggcataaggctgtgcgtctttaaccttcatggccatcatcgtgcagatctctaagcgcgccagttcatgctcacccaaaaaagaccaagctcactaaatcagtgaaagcttggtctttttgcatggcggatgattaaaagaggaaacaatgttgcagtaggactagcaactgactagaagcgtggttcacctagtgcgtgttgagcggcgaggttgagcaggctccattgccggtcgaatcctggctggaagaagaagtcagcttcagctaagtcttccaacgtgaggccgtgttgaatggctaaggccaaaacattgccttgcgcggtgacgtcgtaagtggacagaactgcgcctccaagcagccggtgcgtttgtggatcaaagacaaggttgacgcaaacttgcggattaccattggcttccggaacataagccggacgtagggaatctgcgtaaaatgcggtgtcgacttggacatttgagcgtccggcagtgaacgtattcagaccgcttgctgcaaagtggtaatcaaatacactcaacgcgctggaaccgacaacgccgccaaacggacgtgccgggtgttccgcaaagatattagccgccagataacgggcttcacgccgcgcaactgttgccaaggcaatcggaactttttgctgtgccggtacggaataaaccagcgttgcatcaccaatggcgtaaacatcaggcaaattcgtgcgcaggtatgggtcggtgttgatgaaaccgcgatcgtctagcgaaaccgtgcccttgagccattcggtggctggttgaataccagcagcttgaatcacaaggtctgtggcaatttcgccagcatcggttttcacggcgctgactgcaccatcgccggtgaacgcttcgatttttacaccgagtttcagctcaacgcctttgtcagtcagctctttagctaagatgtcggtcatgtccggatcaagataggtacctagtggccggtcaatcatatcaagcaaggtgacttctttacctgctttgcgactggcttcagcggcttcaatcccgatgtagccggcaccgatcaccgtgatatgcttgactgccggatctgcaagtttggctttgatactggttgcccaatcgtaaccgcgcatcaggaaaacatttttcaagtcgttgcctggtaccggtagtgagttcggccgcacgcctgaactcagaatcaatttgtcgtaaggataatcctgtgccgtgccgttcttcgtgtcgcggacagtaacggttttgacatcagcgttgatggccgttacttcatggttgctgaacacatgcgcaccacgtttgattaaatcatcagggcggaagttccgaacatcattcacatctgtgacctgatcttctaagaataattccatcccgcaggacataaacgaaacaaagtcacccgcttcaaacatggtaatttctgcatccggataccgatgcaataattccagaacgctttggtgaccgccgtgtgatgccccaacaacaatgatctttggcttgtccacaaaaatccctcctaggatatgtagtaaccgcagttatgtaacaacggctctatctctatattagaataattacaatctagcgtcaatagccgagaacaattaattattggacaattttattttagctttgcctaaacccaatgatacaccttggcgtttgaaaattgccaacgtgtcggtctaaggggtaagaaaaaaccgctgcacagaacattgagggttctctgcagcggtttcgtctgtaaaactagataattttaaaatgttttagcgccttcacaacgccatcgtcatcattgctggcggttacataatcagcatggctcttgacgacattctgaccgtttgccatggccacacttaccccggcaaaatcaaacatatcaaggtcattgtgttcatcgccaaaagcaatcacgtcggccggttttagccccagatgctgtgtgagttgcgccagcccccagcctttatcgaccccttgtggcataatttccagcataaacggcatgctgcgaatcacggtaaaccgattgccaaattcggcttcggcttgcggttgaatgttagccacctgctctggttcgccgagtaagataccttttgcaatgacaaaatcatctggcatctcctgaggctcgcgaaccttgatgccagcgtgattttcccatgcctgcaaaactgtgtaccggctgatgttccgatcggcggtgtagacgtcaccggctggggttaagacgttgctatcaattccggccgccgataccgaggttgcaaaagtcgagaagtctttataatcctgatggttcatgaatttttgcgcgatgattttcccactggtactctgaaccacaccgccaccttgaacgatgacatattgatcatcaccatgcagccccagcgcgtccaacgttgtccgtacccctggcagtggccgcccggtacacggcacgactttgatcccggaagccagagccgtttgcaaaccctcgaccgtggccggtgacaattgcttatgcgaattcaataatgtgtcatccaaatcgactgcgatcaaacgaatcatggcagtcacaccccttcctgaaatcagcttagcacaggggcgttggtggcaacaatatgcaaccttgccgaccagcacaagtccggtgaaaagaatgctcgggcactaagccgtcacaaccgttaaatctcgccatggcggccaacatcaatcaagcggatcgcgtctggttcaactcggtaaatgagcagccaattacctttgatgaacaaagcacgatctggtttgcgttttttgatcacgtgatcgtcatacttttccggcagtggggtgctggtttgtaagtaagcaaggacttgctgaaagtcagccttggtgaagcgcccggcttggaggagttgtttgagatgttttttgaagcgggattgttcgatgaggggcagggaggtgggcatggttgggacctttctttttcttctagcgtaacgccggatggaagaaaacggggaattcttttataaagttattgtcgttgcttgtgaaacactgcggcgtgaagctgaagaaaaggagaggcatctgcacaaaatagcatatgagaaatttttgaaatcgataccaaaaatgcttgacatattttttgaaagcgctatattgttcttgtgattaaggaacaaaggagaacggtgataaatggcaacgatttcagaagtcgcaaaattggcgggggtctcagtatcaacagtttcaagaatcattaataacaagccccacgtatcaccaagcaaagcagcgctggtagcagaagcaatgaagaaactgggttatcagcctctgcaagcagcacgacaaatgcgggggtctggatcacaaaccattgcggtgacagtaccatatattacaaatccgtttttctctgagctggtagcagcaatcgaacgaacagctgatgagcggtcatacaaaaccgtaattgttcaaacatttggtcaaaagagtcacgagcgcaatgcgttggattttttaaagacgaatcaggttgatgctgtaatcatgtgtgcgatcgaaaatgactgggacctgattaaacaataccggcaatatggcttaattgcggtctgcaatgaatatgtggctgattcagatacattaatggtacgtgctgatcaagaaagtggcatgtatgctggtgctaaatacctgttaaatcgtggttatcgaaagcttgccttttgtacgggacagaaagccattcgttacaattcggaagcggaggatctcaacagcgatcggtatcgcggttatctgcgagctttacaggaatttaacttagagcctgtcatggagtggcagtttacggatatcaatacgattgctgatggtcaaaagttattgcagaggctcatggtaatgaagaaacgtccagatgctgttattgctggctccgatcaagtggccgctggtattattgccgaagctcaaactatgcaattaaaggttccggaagatctggctgttttgggttttgacgatcaaccgttaagtcgagttgtggcacggcccttaacaacgattcatcagccggttcacgaaattggggatcgaatcgcaaatatggtagcggatgcgttagaaggcaaatcgattgaagtcaaggaggtcgtattgcccctttctctggttgttcggcagtcggtctagagtttttatttaaccaaaattggtatcaataccaaaaaatggaggaaattaaaatgacagttgtattagctcgagtagatcaacgtttagttcatggtatcgttgtcaatcaatggtcggctgaagtgcagccgaagcgttatatggtgattgacgatgttgtcagtcaagatgaaaacgtgaaggctagcatgcgattaagcaaaccagctggtaccgggatgtcaattatcgatactgaaaaggccttgactaattttaaagccggcaagtatgacgcacagcgagtttttgtcattgcaaaagaacctgacacgatgttgaaattattggatgctggtattgagattccgcgtgttgatatcggtattatttttgcggaagacggtcgaactcaaatcagtaaatttgtttcagtcaatcagcaagaagttaacgatttcagagcattagaaaagcgcagtgtaccagtgaatattcgctacgtacccgctgatgccccaataccattggaaagagcacttgaagggaaaaccattcagtaaccagagctgaaacatgataggaggaaatgtcatgccccatattttgcaggatattttaattattttgctggcctcgtatgccaccttggacaaccaagggattacgattatgaattattggccagtgacggttgggctttttgcgggtttgattatgggagacttacccactgcaatgacgattgccggaacatttcagttgatgagcctcggagttgcaggtttaggcggtgcttcggttcctgattatggcttggcaacaatagtgggaatctatctctcggcacgtacaggagctggtttgggagctgctgtggcagttggactgccggttggcctactcactattcaattggacgttttgattaagattatcaataactttatcgctcataaagctcaagcatacgcacatgccaaagaatttaacaaaatgcgtatgattaactggcttggaccgttgttctttggacttaaaaactttattccgatgattttgattgttacagtcggaccttcagccattagtgccttgttaaagattattcctaaatggttaactaatggactaacgattgccggcagtatgttgcctgttgtcgggattggtatgttgatgcactatatgcccctgaaaaaatatatttgggttctcatgattggctttgtcatgtcggcttatctgaaagtgccaattctgggggttgcaattattggcttagcacttgcaatctacacgtatcaaaatctgatcagcgcttctaagaagagggaagttgcagctgctaataatgcaggtactacggatgacgatgaaggagacgactacgatgagtgatgcacaaccaaaattgacaaaaaaagaacgtcatagcgccatccttcgttacatggcgatgggagttaacaattttaactatgaaactcaacaaggtccgtcagttgtctgggcattttcaaaggttttgcggaaaatttatcctgatgatgacgaatatgtagcagcgttagacaatcacttcaaatatttcaacaccacgactgcaatggcaggtatgattcttggtgcgactttggcgatggaagaacgcgatggaataaagtctaaggatgccgtgcaagcgttaaagacttccttaatgggaccgtttgctggcgtaggtgacaccattatctggattttgttaccgacaattatgggatctatcgccggatatatggcattacagggaaatccattgggggctattatttggatcttagtggatatattgttgttctggatccgtattaagctttttgatataggatatgattccggggttaaattagtaacaacgatggcaaaccaactgagtgccttcactgaagcggcttcagtcatgggaattacggttgtcggcacactaattgccaccgtggtgaaggtctatacaccgcttcagttccaatttggcaaggttaagttggcgatgcaaaccggtattttggataagatcatgccggcattattaccagctttagtggcctggatggtttataaattacttgggtctaaaaaatggactccgaatcgggttatcatattgattctggttattgcactcgtcggttcattttttggcattctaggcgtacagccaacaaaataagtgagtcgaagaagttagatagtgaggttgatcatttgaatcagaaaaatcagattgtcggggagcaatatcgttttaccgttatcacagataaaatgattcgcatggaatatcaacccgagggtcagtttgaagatgcaacaacacagatcgtcacaaaccgtgatttcgcacaacctaaattcaaagtttatcgcgatatggacggatttgctgttcaaattgagactgattcgtttcatctttactatcgggacggcgaatttaatggagctaacttatttattgacacgaaatataactatcagactcactattctcggtggcattacggagatagtgaccctaagaatttgctgggaacggctcgaacattggatggtgcagatggttccattccgcttgcaccagggataatgtcaaaaaacggctttgcaatattggatgattcgcaaagtatgttacaatccggttcaactatccgcaatcggtcggttgctgaggttgacatttatggatttgcgtatggtcatgattatcgtgcggcattgcgagattattatcaattaacaggttttcccccttctgtcccgcgcttcgcacttggtaattggtggagtcgcttttatccatatacgcaaaaaacttacctcgacttgatggaacgctttcaaaagtcgggcataccaatatccgttgcggtactggatatgaattggcatatcacagacattccagctaagtacggaagcggatggacaggatatacttggaatcgatcattatttcccgacccggttaaattgttacagacactgcatgcacaaggtaaacgtgtcacacttaatgtgcatccagctgcgggaatacgtccgtctgaagcccagtatcaagcggttgcgaaggcagttgggattgaccctgcctcgcaacggccggtgttattcgatttgaataatcggcaatttgttaaagcctatttcaatcttgtgcaccatccacttgaactggaaggggttgacttttggtggattgattggcagcagggaaaagcacgatcgcgaactcagattgacccgttgtggacattaaacgcattgcatttcttggatcaacaacaagaaaaaggggatcaagcgttaattctctcacgctatgcaggaccgggaagtcatcgatatccaatcggtttttcaggggattcgattgccagttggcagtcgttgaagtttcagccttatttcaccgcgacagccacgaatattggttatacgtggtggagccatgatattggtggacacatgcatggtcattatgatccggagctttcactaagatggttgcagttcggtatttttagtccaatcatgcgtcttcacagctcagataatccgttcatgggaaaagaaccatggaattacgatgctgtcataactaaaacgatgattcgattcatgcgtctgcgggctcaattagttccctatttagctacggccgatatattgacccatcaaaaaggccgcgccctcatcgagccgatttattaccgtgattcggaggctgaagaggcctatcagttcaaaaatgaatacttttttggctcagagatgcttgtcgtgccgatcacctcgcctagtgatgaaacgactgggttagcaagtgtgaagggctatgtgccagccggtacttggacagacttctttacacagcaaatatacactggcccagctgtcgtgaaatttcatcgaaatagcgaagattatccggttttggtacgttctgggggaattatcccactggcagttgatccgatggcaccggttgatacgttaccgggcgcaatgacaatcaaactttttccgggtgaacgaaataagtatgttttgcgggagcagactgcttcagggatggctcagacaaaatttacttgggatccgaaaacaaagatatttacgattaaagtaagcgatcctgctaacatcattccgactgaacgagtatatcaactggaagctattggctatgagggctacctagatccgattgacggtcacaaagaccatgaactgacacttaaactgaaaccgcaagatcatcaaggcgccaaattggctcgtgttttcaccattctgcagcatgccaaacttggatttgatctcaagaagcagttgtggcaagccattaaagatatgccaagagctaaggctgctttggcgctgacaagtctcgcacctgagagtctaagcgatgccctgctggaaatacttctaaacgatgaggcttaaatgaagagataacttgacgagttagttgagcttaagagtgcttggtgtggcagttaaacgctatgaaccttcttaaggatctgctgttaactgtaccaccacacttgcaaggaggaaaaacacatggaacgcacaattgtattagcatcgcatcatagactggcagatggattaaaagatacgctggaatttattagtggtggcagtcaggatgttgtggccatggcagcgtatttggacaatcaacctgttgaaaagcaggttgatacattgatggcagctttgcccgctgatcgtgatgtgattgtactgactgatatgacagcaggaagtgtcaatcagaagtttttccgatatagaacccgtccgcatactcacatcattagtggcatgaatttaccacttgctctaggcgttacaatggagcctactgatcaatacatcagtgattcacgtattgatgctttaattcaagaagccaagaacgccattgtcaatgttaatgagatacaagttgaggcggatgacgatgatgaatgaaattccttggtggaaaaacagcgttgtttatcaagtttatccgaagagtttcaacgatagcaatggtgatgggattggtgatttaaacggaattaccgaaaagttggattacttggccgatttgggcgtggatgtgctctggctgaatccgatttatcggtcgccacaagttgacaatggttatgatatctcaaattatcgtgatattgaaccgcagctagggactatggctgattttgaacagctcttacacgctgctcatgatcggcagttaaagattatcttggacctggtggttaatcacacatcagatcaacatccatggttcaaagcggcaaaatcgtcggtgtcaaacaagtatcacgattattatatctggaaaaagccggttgataaccatgttcccaataattggggttcgagttttggtggctcggcatgggcttatgagaaagacttgggcgaatattacttacaccttttcgcaagacagcagccggatctcaattggaaaaatcccaaggtccggcaagaagtttatgagcttatgcgcttttggttggataaaggcgtcgacggcttccgaatggatgttatttcgctaatctccaaggaccctgcttatccggatggcccattaattcaaggtaaggtgtatggcagttattatgctggcgcagcgaacggacctaaggttcacaattacttacaggaaatgcatgaacaggttttgtcgcattacgatatcatgacagttggtgagacaccgcatacgacagccgaacaggcccaactatatacagcagcgaatcgccacgagctggacatggtttttcactttgatcatatgcatcttgattatggcaaatatggaaagttctcaacgaatcggtttaaactagttgatcttaaagcggtgttggctcgttgggagaccacattagcgcaggtcgatgggtggaacagtttatattggagtaatcatgatcagccgcgcccagttacacgttttggagatgaaggtcaatatcggattcgatcagccaagatgttagggacagtgttacacatgcttcaaggaacgccgtttatttttgaaggtgaagaacttggcctgaaaaatgttcgctttgatcatttgaatcagtacaacgatcttgaaactaagaatatctttagcgaactgactaatcaacatcatgaaagtcctgaagctgcgatggaagccatttatctccactcgcgagataacgcccgcacaccaatgccgtgggacgggagccaaaaggggggatttacaaccggaaagccgtggttagaactaaatcccgatcatcaacaaattaatgctgaaaaggacttagcagatagtgacggtgtctatcactattatcaacgcttgattaagctgcgacatgaagaaccgttagttacaactggcgattttgaattgttggctccagatgatcccgatttgtttatttatctccgaagaggtaaaaatgaaacgttattagtagctggaaacttctcggagtcacaacgaagatggccattaccagacgccttgcaaaataagcaagtaaccactttaattagcaacgtaccaatagctaaacgagttggcaagatcatcacactaccaccatttggtagcgttgtttataaacttcaatgagtaacagagttggtttcaatcgattttcatgaagacaaagtcgccgtttgggtgggctttgtctttttaatttacaagccgctttaacatataaccagcaaaggcttttaactcagtcgcctgatattcactcacacgtccacttccagattgatattcgtttaacgccagcttgatgagtgggcgccatttgggggataacgttgccagtgcccactccccaccggaagactttgatgtgacgaggcgttcatttttaaacgccaatgcccggcataggtttaaaatcgtatacattggctgattaataattgtagtgtctgcgttgccaacgtcataaagaatactttttaaatacgcttgggcaggaactggtgcgaaaacttcggcgattggttccccggttaaaacttgaccatattgattgacgatcatcaaatgtgccgtgagatcggggtcggttccgtgcatttgattaatatactttgctggttcgcgcaaatactcttgatagtgcatttttgaaaaatgaaaatcaaagggaacgggttcggaaaaagtagataggtcttgtttaagaagaatgtgaaattccaatccctttgccggactcaaaggccaaagcttctcaagtgttacatgcatgatactagccttagctttgttacttagcgggctattgataacaacaagaaagtctaaatcgcttactgccgggttgaaacagcccatgacataggatccgtgcaagtaaataccgactaaattggtagttaagatgcttgtataactggtttttaaaagtgccaataattgattggttttatccacgctcatttccccttcagtcggactcgctaactttttaggcactcaataacaagttcaaaataggcaagcttatgaaaaatacccatccgctagtttgacttacgggatgggtgctttcactcattgatgtgcagtcgtgtcctgagacgtttctggtaacttgatcgtttcaacgcgcacatgctggggatttcctcgaagatactcactgatttgttcggcacttttttctatgtttggttttgacattgaaaaatcctcctgctttctgattcacaacgattgtatcttaaaagccgctgattttgttagcttttaacataagtaattgacgactttcaaatagtttagcgattgaagccaaaaagtagtgtgtgaaaaggcgggagagcaaagagttactggcttctcaaatgaaaaaaccatcgcgccacaatctgatacagcacgatggtttgaaactagcttcaacaaaagactctttcttgtatttaccctttttaaactttttcatcggcacaactcggccaactgtcggtttgttatcttttttggctttcacttcaggcgttgatgactctggcgccaacgccttgattttttcatcgacggcttcagcaaaatctttgacttgttttgctgaccagagacctttattggcagttgaacgaataaacgctgccaatgcttgtaagaccggtttacgttgatttgctttgataatttccttgtcgcttaggatgaaggccagggttgttgaaaggtcttccttggtccacgcttttatttcgtgattgaacatcaccttattactttgcatgattagcaaaactagcatggtgagcaggtcggggtcttgcactttttccggaagacggtcccaagcggatgattcgatgaaacgcgaaagtaaatccaaaagtgtttgggtttgcggtgaagagaagtcaatggctttttcctcgaattccgggtcattttcgacgtcagctaatgctttttcaatttcggcatcatagccatcatcatctacagcttcgtcatcgtcgtcaaagtcattatcaccgaatgggtcatcatcatcttcataatcagcatagtcggcgtactggctaatagcagcgtgggtagtggtttcggtgagtgcatggatgagtgccgtcatgaaatcatcgctggtgagctgaatctttttctgctgaatcagccacatgatcattgcgcgaataacgtctgcatcaaagtcaatgtcagcatatggatcatctgaattcgccgatgcctctaaagtttgttccaagccatcaacaatttggggaatatcgagtttggcaatgcttgagcgaagatttgcaaacgcggtggcgaaaaatgttatgagcgtcgaacgggcttgagaagttgcatccccaacccacgtcgtctcttgaagcagcttaacaaaaaccggagtgatgtgaaaatcgtcctaatacttatcaagttcacgtcctgcgtggcgcaacattttcgtttcataagttaatttttcttttgccgttgccttgctcctttatttataagtgaggctaccattggctttagtttagcaggtgcaaggaggtgtgcctagtggagaatacgaggggattttgaaacccatgtggaacaggttgttgctgtgtcagttatgtgcgaaaaaagatgattcataacaaatggtatatatggaatgataaagtaacaactgataaactaaaaccaacaatgctacgcgacggcggctctttttgaagaagggggtggtgcttatggtgtaaaaacgataagaccgcagaattctttagaaaggagcagaaatgtccgacttcgaagctttgagcctcatgatcatggccgcactattgttaatcgccgtgatcgagttggttctaaagctaatcgatcgagactaacaaaaaagccgtcacgtcagcttaacgggctcgtgatggcttaattaagttagaatgagccgccgtcaagcagcattgttgtttcacgggtcgctggtgattagccagcgactctttttagtacacttttattttcagtgatccgtgcagagatgtcaacatatttttctcggtgttaagaattgagaatacgatcgcgctctttacatgttaacgttttaactgatagaacaatcacaaattggcaaacatcaagttgctatttatttgtgaagagggtatgatgcattcaataacgtgacctgtttaacgagaatagcgttaaagatgttattaaatcaacacttcgagaagaagattagccttagcgcaagcgttgcagagaacccggatggtgaaaaaggggcgttggcaaaaaggtgaagatgagcttcgaatagtgattcgtgcggataacgcctgcggatcggttgcagccgttatcctgccaggtatcaacaggtactggaggcgatgtttcggcattgcaaacgagggtggtaacacggcatggccgtcccttgacgacatttttggtggtcaagggacggccttttttgaattcatcttgtgtcggttttggttgaaaagtgatgatgaggaggcattttcatgcgaagttggaaaaaattagtgctagtcggtgcggcgttgttggcgttggtcagcgtgacagcttgtggaaaaactaccagcagtacggcgacttcgagcaacaagacgattgtaattggcagcagtggctcggattatcagatctggcaacatattgcgcaatcaccacaagctaaaaaggctggtgtgaagctcaaagtcaaacaggtggcagacggcaatgtaacaaattcggcaaccgctgaagggcagttggatgtcaatgcgtttcaatcttacgcgtatttcgaacagtataacaaggcaaatccaagtcaaaagttggcggcgcttggtacaacttatttagagccgatgggattgtattccaaaaaatataagcgattaaatcagcttcctgatggtgcaacgattggtatttccaatgacccggcgaatgcgacgcgcggtttgttgctgctggctgcggccaagttgattacgttaaagccggattttaatgccttgagtaccgtcaaggatattcaaagcaatccgaaacatttaaagttcaaagaggtggatccttcagttcaggtattgcctgacctagatgcaggattgatatcaaatacgcgtgctttggatggtgggctaaatgttttaaaggattcgttggtgcatgagaagctgggtcaggatactcgtgccaacgtgaatattttggtgacggcggttaaaaataaaaacaagcccgaacttaaaaagttagtcacgctttatcacaactcaacgattcaggcctggatcaagaagactttttctggtactaaaattgaggtgaataagccgattagttatttacaaaagaaatagctttcagacagaggcggctttgctaggtataaatggacgtattttctggatctggcgctaaaagatagccgactcagcgtataataacagttgtatcgttaccgaaaaaagcgagttttccagtgaaaaggtcggcggataatgccctagttaaacaccgtccaccgtcattcacacacagactcacgctgacaataggaggttttatatatgtgctcatccatgacaattaaatcgcttcaaggggatattttctggggtcgaacgatggactataacacgagtttcttccacgagtcgcctgctggtggggtgccggggaaaattgtgagtctgcctgcgaaccagacattgccagcgcaaacggctacttggaagactaaatatgccgcagttggtgttggggttgatcaaagcgtggcgctgtttgatggcgtcaacagtgaaggtttggccggggacttgcaggtgctggtggaatgcagttgggcaagtgccgagtcactggcgaagcgcaatctgaagccgattaaaggtgaggagtttgtcacgttggcgctgacgacttgcaagaatgttgcggaagtgcgcgcacttgcgagtcagtatggactgctggacgagccgtttcagtttggtggtcaaggcgtcaagattcctttgcattacacgttcgttgatccatccggtgccggactcgtgattgaaccgactgaccatggtgccttcaagctgtatgacagtgtcggcgctatgacaaatagtccggaatacgggtggcatacaaccaatttacggaactatgtcagtcttaatgatcgcaactatccggaaggggccgatcttggcgaccaacatctggagccgattgaattaggaaccggttatggcatgtttggcctgccaggtgattatacgtctccatcccgctttgttcgggcgatgttcgtgtcacgcaacctcgacccgttcaatagcaacgaaggtatccgcgtgctttacaatgcgttcaaaaccgttttgattcctcaaggtctaggccgcgacccgaagcattcgattttaaccgattatacccagtactggtccggatacgacctgagcaagcgcgccatttttgttcaggacgccaacacgttaaccatgacgaccaagacactcgatccgaacctgactgaagtgacctatgatgatttggttaaaacggaacagtttaatcaactttaagtaagatttgcgggcatgaaaatacgaacggtgcgctatacttaagtcgattcattaggtcgcaggctcagcagattgaataagaaaaaagacgtctcaaccaagtacggattttgccatacctgattgtgacgtctctttttatgcggttaattaaaaacactgctggttgacatgattactttttgtggcgacctttctgccagtctgccatgggaatgacgcgatctgatggacctgtcgccggtgttgccgcggctgtggcttttggcggtgtcgccggcatcttggcgagcgcttctttgacctgtgcttgggcggtatccgccaaagccttgagttgcgttgccgtccaaagatgcgagttggcagttgacttaatgaagattgccagcgatttacccagtgcctgctgcttatcacgcggaacgatctttgtgtcacgcagcagtagcaacaaagcagcgccaatatcctggctggtccactctttaggttcgtgaccaaacatgttttgaatggtttgaatcaggaaaaagatgaccgcaccgaagaactcttcgtcttgagctgaatgcggtagttgatgccaggtcttagagtcgaaaaagagcatcaattgttcaatcagcgtggccatgctcgctgaatcgatcgtcatgtcgtcatcatcgtcaaaacgttcgtcacgttggccggcacgtggcgaagcaagatcgccttcttcgaccagtcccaatacataagtcgtcgtgagtaaggcgcccatcaacgcatcgacaaaatcaatgatggtcaacttaacgcgtttggttcgaatcaaccaaatcatcatgctcttaatcagctcggcagcaatcgcaatcgcttcactacgccggcgatgcttatcgctgatttgttgcagcgtggtttcgagtgcgattgaaaccgcctcggctgaaagggctttaatcgtcgagcgcagattttcaaatgattcggaaaaaaaggtgacgagaattgaacggatttcttgcggcggaattttcgcgaaatccggatcctgcattaaggccgtgtagtcgctgcttttttgaaaatcaggccagtaaagatcgatttcgcgactggcgtgtcgttgcagttttacttgatagtccatgatatgccctccatatacggtcattgcgggttttattacccttagtttaacaggtgccaggtggtgctcacataaaaacttgctgtgggtgacgagagaaagtgcagaaaaaattgacgctgaattttcatgctagttagcgggggttgtggcggggaaccggggattttttagcatttaaaaacaggcatctaaagatacattacgcatctcatatgcctgttacacttttttggtcaataaactttttaaattgcaaatagcgcgtggttattcaaacattttcttggttgcgcgcatcaaagtcttgatatctttgtcatatcgtggcttgtgtacgaggtggctcatcgggataccggtgaagtgataagccgcaatttcgcctgaacggaccgcgctttgttcggtgaagaccatctggaatggctgctcggcaaattcaccggtgaaagcgaggttggttgagtgggcgggaatgacttccggtcgatcaactttggcgcgattattgaagagggccgaagcatacggcatgtaaaccggaatgttgttgatgatacttgccatgatttcatcttggcgatcgcgaatgttgtcaggacccggatcgactttggcaagctgaccgatcagttccaatgccatttccttccccgtcattttgatgtatggcttgttaacaaattcaccataacggcgaggatacaggaagtagccccacaaaacggtttcgttaggtttttgggtggtgaagtgcggttggtgatgcaccacaatcgacatcatcacgtctttttgtccaagcgcggtgatgggttgggtggataagaaagagttcaatgcattgccagggacttgggtggtaatgcgctcgatttcgttgagcagcaagtgatccttggtggttaaggtgaagctgacccactcgctggctgcccgatccgcgaagaacttatccgggttgcctaggttgtagaagtggtccgtggcttgtttccataagctagccgcggcaccgtagtccatgttttcaacagcaggatggtcaaaatcaccttgagtggctgagtcggtgatggagccgttagtgaagaagacggcggtatcgtcatccacgaccacatgttccggcttatcggtttcggtgttcagcattttcaaaccggttaccgtgatttcatcggtcatcgcggtgtctttaaactcgaacgctgtgacgcggcggttgaggatgatgcggcagccttgatccttaaggtagttgattagcggcaacatgatgctttcaaattgattgtaacgggtgcggttgacgccgaccagatgctcgatttgggtgaactcgtaaatcatcatatgcatgtaacgccgcaactcctgcgccgaactttcaacgcggaaggcaaaagtggtctcccacatgtaccagaagttggtttggaacatatgcgggtcatctttgaagtagtcggcgatgctaacattgtcgagtttctcttcttccgaatccggcatcataatcagcttggttagcaaaaggcgatccttgttgtttaagccaaggtgaccggcttggataatgccgatgccgccttccattaaccgcgccttatcaaacgtccggtgctgagcgtcaaattgccgggtatcttcttccgccgtcaatccgggttcagttgccgatggaatgcgactcagcaagtccatcaaatcgacataggttcgataattgagcatccgaccaccgcgcgcgacgtagcctttggtattttccattggatgatatttattccaatattcgtctgccgttgcttctgccggtgcgccgtcgttggacccgtgatcatccagggaatagaacgtaatctgatcaccttgccagtgaccttcttgaattaaataaacggcggctgccatgttggctaaccccgcgccgatcatgatcgccttatgcttgatcattattttgcctcctagcgactttcaaacttcttgtatgcgtcagcgtcatctttgaacagttccattttgtttgcaaagtagcaagccgtgccacctgcaaccagcgctaatcccagcgccgtccacaagaattttttcatcataaaacgcttcctttcgctttctgacttcattatagccaggcggaaaagaagcgtctttagtcaaaatatgatgtttgttcgaaaattaacgttcttttccatgcgcctgtttgtgcacgatgaacgcaattgaaccattcaacatgagatccgctcgtttgatcaggtcacgctcgggttcttgcaaggattgggctagccacaatagaatctgacctacgatggcggcaccatagaagttacagatatcggccaccattttcgccggagtggtgggatcgatgtcgagcaccaccggcttcaccatgtcggtcgctgattgaaacaaaaactcttccagcatgtcacggcccacggaatgataggcattcaggcaaaaggcttggttggcaatgatgtaatcgagtaccagttgatacttagcctcccaagtcgccgcgccaagattttgcatgactttacggccaatatcggcttccagcgtccacttcaacaagccgtagatgtcttcaaaatggtaataaaaagtgttgcgattcacgtgtgttgccgcgcttaattcagcgatggtaatgcgatccaacggcttgtggtgcatgaggtctttcaaggtggtcgcaaattgcattttggtttggtcagatgtggccatcacacttcactcctgtggttaaaaaatatcagcttacgaatgcgaaaaaccgcctgtctgcaagggatgccgacaagcggaaatgaaagttacttgacctttagtggcttcaattgggcttcgattttatccaatgtcacgttagcttccagtaaagccgcagcggcgtaagcaccttccacaaaggccacgtcataaacgtgcatctgtttgtcgctgacctcttcggcaatatccaaattcattttggcactgccgaggtcgtaaaagacgagcaactcggaagccggattgtcgttgattgctttttgaatatggtccagatccgttccgatttgaccatcactggtaccgccagccgtggtgatcggaacatctttggccacttgtttgattaaggtctcaaggccgctggcgatggccggcacatgggagacgagcaacatgcccattgccatgaaaatcacactcctttggtttttgacggtaatttgctgaaacgcgttcactggcgcagagatctgcgtgtaaggaccttggtcgcaatggcaaaacccagccatcacgcccaaggctacttacactccgatctctaaccgcgccagttcacgctcttgcctctaggtatgcctttagcagctctccagttgaggcagcgccgggatcgatgtggccgacacttttttcaccgaggtaggaggcacggccgcgtttggcagtcatgggtttggtggcttcaacgagtttgtcaatggcagcatcgtccagcttgccttgtttgattaagtcagcggcgggggcccagacatctagcatggtcttgtcgcctggtttggcttggccgcgtttggcaatgccttttgctgccgcttcaaccagatcgccgaagtcagtatcggttttggcgagtttggccatttccagaaaagcagtgccatacaatgggccgctagcaccaccgactttgctgagcatggccatggcgatggtcttgaagtcttgggcaagatcggcagttggtggcgttttttcgaaggcagccttgatggcattcacgccacgctccatgttgttaccgtggtcggaatcaccaatgacccgatcaagttcggtgagatggtctttttgctgcgtaatgcgattttcaaaatttgtcatccatttagtcaaaatttcagcgtttaacatcagtatccccccagccaacagtgtgcgcagatgcattcagatagttcaaccattgcggatcatccagtgccagcattgtcagtgaaatccccgccatgtcaagtgatgtgacatagttgccagccttggtgaagtctgctttaaggccttgtgcgtgtaactcgttcaaaacatcacccatgaaaatgtattgttccgacagcggagttgcgcccataccgttgactaaaacggcataggcatgcgctttaggatctttaaactcaacagttaacttaccaatcaattgtttggcaagtgctttggaagtcggcaacttttcctgaccagtgccgggttcattgtgaatcccaacgccaaattcgatttcatcaggcttgaggtcaaaaccgggtttgcccacttcaggaaccgtcgcggcgtgcagtgcaacggcaaacgacttggtatttttaaccacagcatcgcctaactttttgagctcatctaggctgagaccggcctcggcagccgcgccgataatcttttcgacaaaaatagtgccggcaacgccacggcgaccttgtgtatacagcgaatctttgactgccacatcatcgtcgaccaccacggattcaacgttgatatcgtcgacactggcgagatccttggccatgtcgaagttcataacatcgccggagtagttcttgacgatcatcagaaccccttcgccttggtcaaccgccttgatcgcggcataaatctgatccggggtgggtgaggtgaagacctgaccggcaacggctgcatccaacatgccttgaccgacatagccggcgtgcagcggttcgtgacctgagccgccaccggagataaccccgactttcttcttctgcttgaacgcggcgtcattgcggacgaccgccgttgtttcaggaatctgtttcaaatattgcggataactggcagtgagaccagcaatcatttccgggacaatatcgcctggagcattgataatcttcttcatatttgcaactcccttctagttatcagtgtaacgcttgcagtgctaaaaatcaggtgggatgcaaagaataacagaaggtatttgatcgtatggctgtaggctggcaaccagtttttgcatgatgatcgcaaggcatcaaaaatcgcctcatcaagtgtgggtaacttaacgaggcgattttcgggcaagcaattaatcagcgaaatcagtaacggtttcgatggtgtaattgccgctatttttaagtaattttgaaaccgggcagcgattttcaatttcgttggtaaaagccttggccgtgtcaagatcaacacctttgaccataacctgagcgtgaactaagaattgatactccgcgcgttcgccaataaaggcaactttaactcggaccgcgcctgtatgcggcaagccgtgttccttttcaacggcctctagggttgcttccagacaggtgcttaacgacaagcccaaaagttgttctgggttggtgccgggatgatcgttcaatggactgcttgtttgaactttaaggccgccgggaacatacgcgtgcccctcgaggccttcatcgttaattgcttcggttgtatacagtggatgttgccaacgttcatctgccattattttgcctcctaaaaatttgttattgtgttcacttgttgcggagatgcgcctcgcatcagtcgtacgtgacagtgaagtacagacatatagggttaaagttgggattaatcattgaaaccgtgaacgctatttattataagcgcttacacgaacttcgcaattaatttatagcgccttgcaatttcgttaagctgatagacatatattaagattttactgaccgttaatacttctccttccacttgggattactgtatttaaggcatcaacacctgactttactatgaactgtttatagccgtctctgttcatcataagggtctttggcttggtgaaacagcttaggaaaatataaaaacagtgttggcaatactttcaaatgtgctaatagaaaaaataaatatatttttattcatgggagtagtttaaatgaacaaaaagttgacaatgggcgactttaaggtattattcgttttacacataagggttatttactgagttgcactatgtttggggaggggctatcatgctgcaaaagttaagaagatcgaatcttgtgaatatctatttcggcgctagggggacttttctaacatgcttcacattgatgttcttttattttttattctcagttttaaccaatacattcttaataccatctgacaaatttgtcggaaatataccatcaattttaagaggcgaatactggtatatcataacaggaccgcttttccattatgaatggcatcacttaatgtggaatcttttaccgattgctgttctagggccctttattgagtggaaaattggtagttgggttttcgtaaccagtttctttgtttctggatgggttgggtcttctatattctgttttgtatttggtgagtttattcagtcgattttgggcataggtctatatctctgtgtgttctatggcgcgtcaattgcagtatatgcattgtttcctctgactatagcggcgtttttaataaaagaacctgaatattccttcattactaaggcagtggttattggcgcgttctcatatctcatactcggactttttcctaaagcagatgcatcggatgcccagagatttgtggaaattgcgcatgtaagtggatttattgcgggaataatcggagcaattgttgtctctgtaatcaaactgcgaaggaaagttgtttcttttttccttcgccgatcaacagattagacgtatattgctgtggtacggtcacaattgctttgcttttaaattttgttacctgaatccggtttttgatccggttccgggttattagcgcgttccggtgggcgttgagaaaagccggtagcatgggtgatgagcgggtggttttggcatcactgaacgcggcgtgggagcagattgaagtaactggttgtgttttgccgatttcgaactatttataggctaaaacagtagcactaaacgctcgtattgctcaatcttaatggacatgatggcgtggtaaccagccgattttcacccagtctatgattcctttgccttgataccaggatctttaaaaaccttaaggagataaaaaaccatactatctttcaaattcaagtgaataatagtatggctatatttttaaactgtatattgcatcatgatttatttgttatgagctgtttgacccagcacactacaatttaaatttggaagactttcatctgaccttaaaaggctaaaaatacaatcgttcgagcagtccaataagctgctgtactgttccatcccatttgagtgactaaaaagctttggataccatcttgcatatcaccttcaaagtttgtaagatagttgacccagtcacttaatgttttttcacccatctttgccccgagtaccttagcagcagccttgaaaacagcttttataacggctaccttccatcttgcctgtactgctggatcgtcagcaatacctgcttttgattgtagaaattgagttttttcggaatcagaccatccataatggcttgctaatgtatcaaagtttgctttgtcttcgggtgatagttcagcgtaaagctgggaaaaacttttggagctaggatgaatgatcgtgtcagaccaattgatctctccagaataatcgggggcagattttccaaacgtttgatctattaagtcgtctaatgttcccccattgtttggttggatcgaatctgagatggcagtatccgattctgcggcgtgcacacttgtaacagccgaaagcggaccaaccgatccaagaactatagctagaccaagtactgagagtttctttgcgctgaattgcataaatataatcctcctaaatgtctctattacgattttaaagcgtttgagatgcttttataagcaatgaaaatcagtatagcgaaactgattaggccaaagataaagatcgtagataaaacgatgccgctttgggtttgcttgtaaagaaatgcgagtaacatcgcaatgacgaatgttaccaaaaatgaaatccataattttagcattgatttaaacctcggaacatatatttaacaatctaactcgattttagcgagtagccgttggattttcgatcagccacctgcgataacgcgaccgccaagaggcactaagattgaaagaagtacggtcatcatcacttcttcagctccttcctttgttctgcatatagtgtaggggatgaacgctgttttttgtgttaatatgaaatcattcatatttttggctaaaaattaggagtttatatattgaagtatgcagcgggttctatttaccatgaagtacggcgacgacgagaactgaggattaaggaggttagaggaaacctccaccaatcaacgatttcgcacctggaacatgatacgggtgacatgaccttaaatacgatgatgaagatacttaaaccaacttttatgtcggctgaagaattctgccaattgattgatgaacaaagcgagtcaccaaccttcattttcaaaaagattgcgcgttattatgatgaaatgaacgtggctggcttgaaacagctagtgactgtttacaaaagggataaattgctaaccacaccaaacagactggttttattgacaatccaaagctgcattgatgaattatctgaaaaaaagcacttgttgtctcaagatgattgtgactttgttcaaggatatcttctgcatccaggacgatggtttagctttgaatatattgtttttgctaacctgtcattttcaatgccggctaagattaacttaagagtttccaagaaaatggtgcgagcatacgaacagtttcatttacccagttatgatagtcttttggtaaatgtcttatataatttatcgacctcatttcttgatcaagaagaccctaaattatcagcacgctttttaaactttcttgatttagataagttaaatcacaacaatctttatatgcgacaccatataacttttctgaagctagttattcgatttcaaacaaatccattagacaaagctaacgtagaaaagctaaaggtgttcttagaagcgactaggcttattgatgagactttatttaaaaagaatattgactggattgagtcgctaaaaataaatcccgtgattattttagggaaatagagatagtaaattagacatcacttaataatcgttgacaatcagttttgatttttcctaatgaagtcatacaagttggcattttttatgaccaagaaggtttgcagtagctagaagcaagagtgaaacagaaagatcgctttaaaaagaattagccaaaatcaacttttgttttcgaacagctgatgagactgcaccaatagtcgtcctcgtgtgtagattttttgctggaagtatttgtagtgttaatctttgttgtatgaatccggtttttgatccggttccgggttattagcgtgttccggtgggcgttgagaaaaaccgatatcacgagtgatgagcgggtggccttgccagatgaggtgttccagcagcgccatcgtggttttggcatcactgagcgcggtgtgggagggcaggtcgattccgagtgcctctttgtaatgttgcagtgacggggtgtgttttttgccgataccgaacgttttacgcgccagcaccgcagcatcaaacgcttgtagaggggcaactttgatggctaggccggattcaatggcgcggagatcgttgcttaaagcgaacccgacaactaattcatgctggagcagctgttgcagcgcagttttaacaagtggcagaggttggccgtatttttccaataagtcgtcggtaatgccggtgattttaaccgagaatggcatgacgtgatggccggctggcagttgcgtgaaaatatcgaatgtctgatcaatctgatgctggcggatgcgcaacaaactgatttcggttaagtcaagctgattgcgatcggcgacgaattcggtgtcgatgacgacataatcaccgtgagcaaggcggtcaatgacatcgcggtgggttgtcaatgctggctgatctgaggcaagctcggttactaaagtggggttaagctgcaatgacttagctgcgcggcgctgggctgcttgaactagcggcatctcttcgcgggcaaattttgcggcgagccgggccatcagttgatctgcttgaacttgccgctgatgttgtagtgagaccagcgattgatccgcggtgccaagggtaatatcaaataaccgtgcgagccagatagccgcatcagaagccggagcggtagtgacatacaccccgtttatatcgggcagagcgaatgccacctgtccattttctgcccagttggttaaccccaaggcgagtagatgaacccaatcgcgaaaaggccgcatgaaagcaaacaactggcgctgacggtctaaccgatctagacgcttagccgctgcggacacagcagcggctaattgcaaggcgaggcttttgcgatgattgccaaagtctttgagcttaaacttgactggtaaaatggcactacgcgggcgcaacatataacgcagacggccaccttccgggaaccagcgggctagatcaaagctgacatcgccacgaggagagacctgattaacggtggccggctgtttagcggttggggtacgatgctggagaaccgccatcagttcgttgagtcgggtgcgaacctcggcggcgttgcgcggcttgataatcggatcacgcagcaaatgatttagctgccggcgagcttgacgcggtgagtgacttggcttgcgatgtggtctggactgcaccatgatgacagcctcctttcttagcgagattaaatctaagaacagtataccaagtgtggcggggatttacatttttggctcttgagtgatggttgagcagacacaatgaaagtacagattggttttgcgtatgttaaaacaaaaacagccatcttcgaactgaaagtgagttgcggatggctgtttggattgtctcgtaaagtttaaatgtttaacgagtttgatcttactcaatgttcaatgtatcgcggtgtgtgcctgttgcaagaagcattaaaattaacgcttcagcatcgactttataaacgagaagccaatcaggagcaacacgcaatgctcgttcgccgctgtgagcaccctttaaagcatggtcatgtagagaagctaattttacatgaccttgacgctgcaaagttgttgcctgtcaatatgcatgcagttaatcgtcaacatcactgtataaatccttcatcaaagcatcgacagtcttgaagctttttattcgccccgctttaacatcagcttctgcaacttgaagctgatcaacaaatgacattggaggtgtaaatggcaatgcaccggtgtcaccaatccgtttcaggtacatgttaatagccgaggaaatatctaatcccatgctattaagaacatggagcgctcgttctttagttttggtatcaatcctaacgctgatgcgggattttttggtcatgttcatcaactccttcagctgagaatgtacgtcacttaatgccaaattcaactataacttcatttaaccacatacattgttgatttcaaaaatgcgatgtctttaaacgaaggcaaggagctggaacgtcatgatctagatgaaacaatttagcagatgcgcataaaatcaacaaaataaagggttgtagatttacgagatctagttgcgagatattgtattggtattacttttaaaggatgggctaacattggtcgggagtacttacagaatgacctaatatacaagacatatagagacttcatattcgacaacaaaatgcgggtataaattgttgacctcggaaacggtatgggtgtaaattaagcgcggcaagatgaacttgaacgcgtcttcataaatgctgttgtagaatgtccggctggtttcattctaagtaagccatatattttggcctattgcagacaggagagaataaaaatgaagagcacattaatcgggcttattcttgttggggcatcggcgtttggcatgactagcgtgtgaaggagatgaccacaaatggctgtctgggattttattcagattgtgttcaccgcagttgtcattatctggatagtgataacttctaagggtaaggcggatcggagaacaaaggaactaatttggataattattggtttagttgttgttggcaacattgctggctatatcattgcaagtgaaagaagtcagtgggcaatcgcctataattattcatttgctttcttccaattggtcattttgtggtcttttgcgcgtaacttttgaaaacaagatataaggtagctctagcaattcgtatgtgagaattactagagctattttgttgcttgaggaaaggtacaacgaaatgctagaacggtcgcacacagaaatgtcatcggttaagtattacttctcaagaaaaggatgaactgtgatgttcacaattattttgcgtttactaacctgctagcagtcttgaagataccccccttgttttagaaccaaaattatgcgataactgttgtatggatatcaaacaatcagtcattaccgagaattttaaacaacggttgttctttgcgctgtctgatcccggtcgatataaaattgtccgcatgctttaccacgtgggccacgagatgggttgcaacgagttgaacgaacacgtggagattgacaaatcaacgatgtcatatcatttgcgaacacttcgagaaatcggcatgatcaccacacgaacgcagggacggcaaaagtttgtcacgttgaatcgagaaaaaattgaagcagcgtttccgggattactggaaaggctttaaaaataagcaaaccaatgcttattttttagcagtaattgtttgatatttttaaaactataaaatgaaccgggggctttttgcatgaaacatcgtcaactatccttacttttcttcttagtcatgtttgtgatcgggacggacactttcctggtttcaccgctgttaccgacactgacacattattatggcattacgaccagcctttccgggtttattgtcagcgcttatgccattggatacatgctgtcagcgctgttgatcggcccgatttcggatcgccatgatcgtaaaaagatcctggttggtgggttagtcgttttcaccgtggcgactgcgagttgtggattagcgaatacttttgcgtggatgttgatcacgcgctttgttgccggaattgccgctgcgactgccggtccacagatttgggctgcgatccctgttttattcccgcgtcagcaagtggtcaaagtgatgggctatgcgaccgctggcttggcagtggcgcaaatcgtcggcgttcctttaggcagttacttagcagtttggtcttggcgtttcccgttctttttcgtcggagccattgcgttgatcctgacgcttttggttatgcgtctaatgcctagtttgaacgatgcaaaggctgcaccggcatccgagagtatttatcggcagctagtcggtaatcacccggttatgaagttgttagcggcgtacttattgttccaaacggccaatttctgcggctttgcgtttatcggtacgtggtttgctaaaagtttcaacttatccgttggcgcgattggcagctttattctgttaatcggcgtaggtcagtttgtaggcagccttcttggcagtcggcttgtgacatggttaggtcaacctcacgcctttttacttgaatttatcttgttcatcatcggttatgtggtgctaccgtttgccaactcaccacttgcggccacgattattcttgcgctcatttatactattggcggggctttgttgccgctgtttatgagcacgttacaggagcatgccggtacagctcgcagcacgatctcggcgttggccaatgcagtgatgtatttaggcgaagcaattggcggcgtcatcggtggcgttttaatcaagcagtttgccggtttttccggaattgcaacgtttacggcagtggtcgcggtgttggcaatgctgttatatgcacagcaggggtactttaagcagttacagacaagtagataacttaacttgcattggaaaatgattcgtcaacctcggttttgacatcattgttttgcaaatcacgcgttgacaagttggcgttgttttaacctgacagagactgtataattaaaaggcagaacatatgtttgtatcttggaaggggaatgtcaattgccagctaataaacaaagatgcgcgtgggcggataccaccaatgatttaatgcgccaatatcatgataccgaatggggacgtccgagccatgacaatcgccacttgtttgagctgttgtcacttgaaatcatgcaagcaggattgagctggcagaccgtattaaacaagcgggcagcatttaaggcggcgtttgctgatttcgattatcaacaagttgcacaaatgacgccacaaattcctgcgcttttgaaaaatgatcaaattattcggaatcgaatgaaagtgacggcgatgatcaaaaatgccaatgccgttgcgcagttagtggccaatggtacggattttgaccattatgtttggaattttgtcagtaaccaacccattcaacatcatattgagcggcatgaacaggtaccgaatacaaccgatttggccaaacagatgagcaagcagatgaagaaggatggctttgcgtttaccggtcctgtggttgtgtactcgtttatgcaagcggcggggttggttaacgatcacgaaacaggttgctttgtttatcagcagcttggccaataactggggatttagattttggattgacgtaaccatgatttcacagcttttaaacggggaggtgatcaacagtacctataaacatggaacaatatagaatataagggtataatacgagcataataatcaagtggaaggtgctcgtatgttcaaaccaaacgaaatggctaagcgacttggtgtgaccgtcaaaactctgcaaaaatgggataattccggtaagtttaaagctcatcgaacgccgacaaatcgacgctattacactgaggatcaatatttggcttatatcagtcataatgatcaaccaaagaaacgtcttcaggtggcttatgctcgagtatcaaatgtcgggcaaaaagatgatctagctaatcaaattgattttttgcgtcgatatgctaatggtaagggcattattcttgatgaagtgataacggatattgggagtggcctaaactacaaacgcaaaaaatggaatgccttgttagatgatgtgatggctggtcatgttgaaactattttcgtgacttataaagatcgttttgttcgtttcggctacgactggtttgaacgcctagcgcaaaagttcgacacccaaatcgtggtgttgaataaccctgatctttcgcctcaagaagaactaactgaagacctgattagtattattcacgtgttttcttgccgattatatggcttacgtaaatacaagaagaaacttgaagacgatccgtctttgaagtaagtcccttagttaacttgaaaggaggtgaacacttttgattaaaacgcataagatcaaactatatcccaattcaacgatgcgcaaagaactagataaattgtttgattatcgccgtttcgtctggaatcaagcgctggaaatctggaatgacatgtatgatgcttctttagtcatgatagataagtcaatacggcctaatgagcgaaaagttcgtgatgaactggtggcgaataaggcagattggcagtttgaacgatcagcgcgagtcttacagcttgccgtgaatgatttaagtaaggcgtgggcaaactatttcaatcctaaaatgcccaatcatgacaagcctaggtggaagtcgaaaaagcgatcacgtaaaacttttaaaacggatcgtgctcagatagtcaatggcaagcttcgtttggatcagccacgtggtaccaaactctggtatgacattaaactggctgaactgccacgatggcggggtgacatcaagcaagtttgcatcgttcaagacgcagatggctactatgcatcgttgtctattgaagctgcagtcctagctgaaaaaagacccattcgacgggttactggcgttgatgtcaatgtgggcaagttcgactaccgaactgcctccggttatgccattcagccgacaatacctgcttcgctagcagcactttacgctcgtatcacgcactaccaaaaacagcttgcccgtaaacgaaccacaaatccaaagcgctttaattcagcgacctatcgcgcaacgagaaccaagttgaagcgaaactatcaacgcgttgaacggatacaaatggatttgttaaacaaatttacaaccaagctaattgtagataacgatctaattgggatagaagacttggataatcagcacatgcgcatgaatcgtcgtcttgctaaaaacctgcatcgttcaatgtttggtaaattcaaaatcatgatgcaatacaaagcggattggaacggcagtactttaattcttgccgatccaatgtttccgagtacgcaacggtgttcaaaatgtggttacatcaaaactggtgaagagaaacttactttgcacggtaatgccaaataccacactggacatgacgattacatttgctaccaatgcggtgctaggatgcggcgcgatgaaaatgcagttgataacctgatcgattatgcgaaatcaaaagtacaggggtaggctataccctaaaagttcaagaggcggtcactgtcatgatgaattatttcagagtgggaatatcgctgttgacgggactaaatgaaatgctgaatgtcaatcaagaaaggaaatatatagaacctttattggtgtcaaagagacattcttccacattttatatagcagcgtatttgattaaaatacaacaacccatttatactgatttaaaaccaaaaagaggtctgatcaatggaaacgacaatttgtaagattggagattcggttggcgtcatttttccacgagcattacaagctgaagttggcagaaaatataagatttctaaagttaaggatacatttgtgctgacaccgctgcgatctgatttatttgccgctgccgctgattggcaaggattcagagatgctgtgactgatgaagacctagcatgggatgagatagaggactaagcgtacgtcatcctaaattcagtcacagcggcagcactcatccttaacagctcaagtaacgagagacgaaaagaacccactcgcaattttcagcgagtgggttctttaaatagtctttgattaaaaaattaaagtgcttcaggaaccatcttaactggcttgttgccaatccagccggtgatttccttgaaggtatcggtgatcgcatcggtgcctggcttgagcatcttacgagggtcaaagcccttgccttgttgatccttaccagcttcgatgtattcacgtgttgccttagcaaaggcaagttggcattcggtgttgatgttcaacttggaaatgcccatggtgatcgccttttgaacttgttcttgagggataccggaaccaccgtggagaacgagcggcatcttaacagcgtcgttcaattcttgtaagcggtcgaagtgcagacctttccagttgtctggatattggccgtggatgttaccaatgccagctgccaggaagtcgatcccggtagctgccaaagtcttggcttcttcaacatcagctaattcaccttcgccgacaacaccgtcttcttcaccgccgatggaaccaacttcagcttcaacggaaatgcccttggcgtgggccagcttaacgatttccttggtcttttccaagttatcttcaaagtcgaggtcgtggccgtcaaacataactgagttgtagccagcagcaatagcttccttggctgcttcatagttaccgtggtccaagtgaatcacaacaggaactgtgatgtccatggctttaacggcagcttcgatcatggtttggcaaaattcatagccacccatgtacttagcagcacccatggaagtctggatgataaccggaacgttcaattcttgagcgccggcgagaatggcacgagtccattccaagttgttggtgttgaaggcaccgatacagtagtgacctttatgtgcagcttttacaagctctgcagcgttaactaatggcatgtagatatcctcctacgaaatatacaattcacaactgttgtattctaccataaatgacaaaagaaaagggcgagaaaatgatgagaacgtgacggttttactgaccggtttgaaagaaaacggtcacgttgataacccaccgttaccaaggctccattaaatttaccgtagtttcagaaaaaacgccattgattgactcggcattttcagaggttagaatctgcttactcaagccaactagccaacaatgaaaaaggtcatgacaatgacggtgattagcgattgttacaggttgaaatgagatttttctcattttatattagatgagctgcggggtaacgtagtggatttcacaagctgatttaaaatgaccgacgcataaatcgctttctttagtgggttgtgatggtagaatcttcaaaaaataactgaataaaaagagcttttcacaagcttttggtgtccccacaaataagaccttgcttagaacgattgaccctggaaatcaaagcactaaggtaaaggtagtaacagattgataacaattgagttgttcacacgaataaattaaccaaaggagatcttgatatggcaacaaaagcagcggatcagttagtcagcgtcttgatggattggcaggttaagcatgtgtttggcttgcctggtgactccattgacaccaccgtggatgctttacggcgccaacaagataagatcaagttcgttcaggtacgtcatgaagaagtcgccgcactggctgctgcatcaacggctaagctgacaggtggcctcggtgtttgcttgtcaatcggcgggcccggcgcgattcatctattgaatggcctgtatgatgccaaaatggatcatgttcctgtactggcattattagggcaagtcacaaccagtaacttaaatgaaggctttttccaggaagtcaacacgcctaagctattcgatgacgtggcggtttacaacaaaactgtcatggcatcagataatttaggccagatcgttgacacggccattcgcaccgcgttcacggaaaaaggcgttgcggtgttgacgattccagacgacttgcctgatcaaaaggaaaccaccagttaccgcgacagtgcagcggcgtttgccttgaatgtaccggaagtggatcctaagcagttggatgatgtggcttcgcttttgcaaaagtcccagaaacctttagccttgattggccgtggggcggaaaatgccggtgaagccgttcaaaaatttgttgaagcgaaccatatcccgtttattcagaccatgccggcgaaaggaacggtggcagacgatcatccgaatagcctcggtaatgtcggcaagctcgggacgaagcctgcgtatgaagccatgaaggcaacagacctgttgtttatgatcgggaccaattatccatacaccccctatttgccagatgcagggcaggctaagtgtgtccagattgatacgcagccggagaacttaggcaagcggtattcggttgatgttgccgtggacggcgatgtcggtgcctttttaaccgaactgaatgccaaaggagctttgcgtgatgatgatcgcttcttgaaagcatgccggaagaatatggagagttgggacaaatggatggccgaaaaacggctactggatacgaaccctgcctcaccggaagccgtctttgcgacaattgaccaaacggcgcctaaagatgcggtttactcgattgatgtcggcacgtcaacgtcttggggtgcccgttttctgaatgtccagccaacgcagaagtatacgatttctgcgtggttagggacgatgggctgtgggctacccggagcgattgcaggtgccgaggcatttccaaagcggcaaaatatcagcgtggccggtgacggtgcttttgccatggtcatgcaggattttgtcacggcggtcaagtataagctgccaatcatcatggtggttttgaataatcaaaagcttgccttcattgaatacgaacaacaaagcgccggtcagttgaattatgaaattgatttggccgacatggattacgccaaaattgccgaggccgctggtggcgttggctataccgcacacagtaatgctgaatttaaagaggcactcaccaaagcctatcaagaaacagacaagccggttttgatcaatacctatgttcaagacgacgcgccactaccaggaaagattgttggtgaagaagcgaaaggctacatgaagtatggctcccagtatcttgaaaattattggaagattccttccatgccgccattgaaagatattatgcggcaattcttctaaaatttatgggagtgcaacaatgaaaacaggcatggcttaaattggacagtgacttaagccgtgcctgtttttgtttggagtggttgacgagcaaataacgggaatccggcagctgaacttagtctgccggattttgctagcttgtgcatgagttatttgttaacggtattaacacgccgcagcttccaacatcacaattgcgtatcaaagcctataaacttagcggccaaagattattgccgagctgtttaaacgagaagactttatcccagagcgctttttcttcaacagtaaacgaaaagcgatcactcaacttaacggaaggcgcaaaattgaaaaaagattggagcgcgccggtgaaggcagttccgtggctgtttttcagctcttttaaacttttggcaacgtatctcgccgtctcggaactcggatggttgtggctcagctttacgctcagttgttccatactggcgatgacttcttcgggttgaactttcatgaggcgatcctcctgcttttcaatagaatacgcttacattataattctaaggcaagttggatgcaatgcattttacttttaaagcagatggggatgccgatgtttattgatttattttactctttatactaaatattacacctttaattaataaataaactaatatcaacttgctatcttggcgtaaattattgcctttaaactataacgatgtgcgccagttggccatctcctcttgccattttttgagtgtctcaacaccaggcgacatgttggtcagcgtaatctgtgctaattgcttttcaaatgaaacatcaaaaaacgcccagtaaccgaaaatatgaccattgtgacttaaccagtgctgtgttcgggatttcatccaacccatgccgtaaaagtcgtgggtcagcgtcagtgcctcatcccacgcggattccggcaaaatgcggcgctgtaaaacggcccgcgcccagatggccaagtctgcgagtgaactcaccaccgcgccatctccaccttggtagtggccgcggccaagggcgactggtttgccgttagtaaagtccaaatcatcgtaactattggcatcagcatgttgcgtgcccagttgagtcttcgtcatcgccaatggctcaaagaagtgttggttgagaaagtcacgcaatggcatattcgcaacctgcctaataatatgtcccagaaggtagtagttactattggaataggcaccttttgcatccggcgcaaagtcgaggggatgctgattgagcaattcgataatctgctgaagggcgtcattgccgttgagatcttctaggatggggtaacttaaatgcgattcgctcgcatcgggcattttttttgcatagtcggccagcagtagctccgtataatccggaatcccactcgccatatgtagcatctgacgcaaggtgatttgtttggcgaaacgatattcaggcaagtagtccgacagcggtgcatcgatattcagttttcccgcggcatttagtaataagatactgttggccgtgaactgtttgctcagtgagcctaagccgctagtggtgttgagcgtaaacggctgatgcttggcaaagtcagccataccgttttgccagtatgacagcatacggtgagcgtcgaccaaaacagtggcaccatttagttgatactttttattaattagttgataaccttgaagattatgcacgtaaaattctccttatatgtttggctaaaattcacacttcttctataaatgaacttcaacacctaatcccggccgatcagacaaggttaaggtttctccgtctgcttcaaacccgccagtgagccaatcggtttcttctagcagcatgaagctatcgacatcgccgtaacgaacattggcgtgggctgcgataaagtgggcggaggcggcggttcctaggcgggtttcggcgttgcagccgaccatacacccaatcccggctgctgcggcgatggcattgatagcgttggcgcctgcaaaaccgcctgatttggctaatttaatattgatcaggtcagttgcaccgagtttaaccgcggcactggcatcatgtgcgttgtgaacactttcatcaagcatcaacggcaccgcgagttcttggcgaagtgctggggcttccatgagttgccaatccggtaatggttgttcgagggcgatgaggttgggaagttgcaattgagccatgatgcggcgggtttgggcggcggtccaagcttggttggcatcgaccttaatggaaacgttaggaccgactgctgcactgaccgctttgatagccgcgatatcggcaagttcatcgttacctgcctttaactttaaggcggtgaatccggcgtgtacatattgttgggctgttgctgccatttcttcagctgagccgatgggaatcgtgatatcggtggtaatggtgttgcagtcgccaccgaacaattgccaaagcggcatgccagccgattttcccaaaatatcgctgcaggcaacgtcaatcccgcactttaaggcagtgtgaccggccatcaccgcatccatgcgcgcatggacttgttcgagattgcgcggatcagtgcccactagtgctgcggcaaatgttggtaaagcagcttgctcggtttcattcgtttcgccattgaccggtgcatatggtgatgcctcgccaaagccggtcatgccagtatccgtttcaattttaatgatgagagtcgtgatcgcactcaattctcctaaggcaagtttgaacggggttttgagtttaatcggccggggatgagcggtaatcgcagtaatttgcatggctgcctcctattgataagtattgagccaacggtagcatgcatcgtcatgattttcaaactaaaatatcattggaatgtaacccgaatcaaatttttgacgggcagttttctagccgcgcggttgcgtcaccgcgacaggactgcgatgatggcaataagcagacaacgatggaggcaaaacatgacagctatttatgatgatccggattttttcaaggcttatagtcaaatggatcgctcgaaaaaaggtttagccggcgctggcgagtggcacgagttgaaaacggtgctgccggactttaccggtaaacgggtactcgatctggggtgtggctatgggtggcactgtcgatacgccgctgagcatggggccaaaacggtgctaggaattgatacttccgccaaaatgctggccgaagccgcgacgatgacccacgatcaacccatcgtttatcaacaaatggatatgcaggccattgatcaattgccaggatcttttgatgtcatcttaagttcactggccattcattacattgctgattatgcaggtctggttcaaaaaatcagtgccaaattacccgtggacggccagtttatcatgtcagtggaacatccggtttttacggctcaaggtgacgagacatggatcaaagatgatcgcgggcataacctttattggccggtagatcgatattttgcggaaggtcagcgtgaaaccgagtttttggaccaccgcattcaaaaataccaccggacgttgacgacctatttgaatacgctgcttgatcatcacttacgcttggatcgtgtgattgaaccgacgcccactgccgcgatggtgcgggatattcccggtatggctgatgagctgcggcgaccgatgatgttaattgtggctacgactaaaaccgcttgaccattcgaaattaagatgcaggcagagacttgaatattgtcgcgtcaaaaataacggggtatacttttgaaaatgaaaataagaagaaagcgaagggacctcgcgtgaaatttaagattggtattcccaccgatgaactcattgaaattaatcctatcatgccgaacaatcatccggcttatgcaccacatgatgtcaaagaagctttcattaaattaggcgcgataccgttgatcatcgcttttccggatgatgtcagcaaggttgaccagctggcacaagattatgtgcagctgattgacggcctgatgttgccaggtggaccggatgtggacccaacgttttacggggaagagccacatccgaagattgggatgacgctgtaccagaaagatcgttttgaaattgccttgattaaggcggcgttggctgcggacaagccgattttcggcatttgccgcgggattcagattatgaacgtggcgatgggtggaacgttgtatcaggatcttgagagtcagtatccggagttgaaaatccaacacccacaagccacactggggcaatttgcgacccaccatgtcgaattgaccgctggcagcaaattggccaagctttacgggcagtcaacgattaaagttaactcgcgccatcaccaagctgttaaagcggtgggtaagggattgaaagtgacggcggttgcaccggatggcgtgattgaaggcatggaatccacagataccgatctcttcctcggcgttcaatggcatccggaaaacatgtggcaacaggaagatccgcagcagttagttgtctttcaggactttctggatcgaatcgctgctcatcgcaagtaaatcagctggccagctagcacacgcatcatggtgaaaattgaatctaaaaagccgtctccagtttggatggcggctttttagattttctatttctcggtttgcggcgcgctaaaaatttgggtaagttgtttccttgcactgtctaacacgcgagtaaagcggatatcttgcgcaaatttctttgtttgctgatagcttttccaagatagtgccattccaggtgctgttttgagttcttcgagtatggcttctccctgacttaacgtgagattaccgatcttttttgctttagctgtttcgtgaaaggctttgatcaactgttgatggtctaagtcgattgatattagtgtactgagagcccaaatgtcatagaagtctttggctctggtattgttgggacccttttggtagatcgttatcaatttatcagccatgatttgttcttgaggaaaggcgtttattgtaattttgtcatgcgcgtcaataaagttagtatgcacaaactttattggattagggtaaatcacgtcacctgttgaaatatcaatattcagttttgatcgtgtttttcccattgttccaatgacacccaagcggaatccgggatatttattttcattcatttctgactttacttgcgtgatttcaaaatgaattggtccttccgcgtgctcaaagatgtcaaaaaagatttttttgagttcgtcagcgtttaagctgtaatgatttaaagttacgtcgagatcagttgttgttcgtaagggggcgccgattaatgtcataatctcaaagccccctttaaagacaaaatcacttctgtactttgattcagaaatctggcgcaaaagttcctgcagtcgaaagagcagctgtaggtcctgacgcggcactccaagagaatctgctgatttgttaatgcgattagcaatcatttggggagatagattagcatacggcggcattaggctagtacctccagtaatttaaagatgtcgctctgcggatatagttgctctttaagttttttaagccgcttataggaattgacgttattgccatattcgtacatgtaattgttaattgcttctttgcgcgagtatggggcaacatctgatcgttcccagaattcaagtaaggttcgttccaccgaataagccggcactagtcccatgttgggcgtttggactgatgtgatacctggaaaataacggtcggggacatagtaaatcggcacaataccatgctcagctaaacggggattactgtaaccatgtggaaaagccatgatgaatcggtcaggcagttgatcggttaatccatgcagaaacaaggctgtatcaagagcaaagacgccttttgtatagcgctgcgataaaacttcaaagtcatcccatgtgtacccgttctcaacataaacgccgcgcgcctctcgcaagatttttccatttttgacggcttgattaagcgtagaggaggagacaccaaaacgcttggctgtgccgctaacaaaagtgtgatgttcctgtaataacgcattgaggccgctcgcaacacccataagaggctctcctttcgagttggctttatatacatcaaatatatcatatgtagtatatataaacaaaccaactttcttatagagatttacttttgctgtaggatgcaaggggagatgtgtctaagttgagcagtgtcgttaagagtaatgccagtttcttaacaagatgtttagaggagattcgaaaggcaattttcagaaattctttcatttcaccaataatcatgtaagattgaagccgagtgatgttacgtaacgggtgttgtttaagacggcaagcatgatgaaaaggggctgaggttagcaatgaatgaagaagctgtgattgagcaattgacagaaaagcaaaccgagctgatcgagtttctgtatgtggattataacggcctgacacgaggaaaggtgattccactagcaagtttgaaagctaaactggcagatggcattggcttgaccaaggcaaccttgaatgtcagcgagcgcgatacgattttaccggtgcaggatatgacgccaatcggggagttgcggctggttggcgatccggcttcggcccatgtgctgccatatatgccgcaagtagccactttaatgggtgacatttataacctcgataaaacgccttatgcatcagatccgcggtcgatattgaagcgtgttgttgagcagcttgcggatgctgggttcagtgtgaaaatgacctatgaaaacgagtttgagttatttactggcgacaaggatcatcgggagcctgcgatgccgcgggttgctttttcaactgagtcaatggactttgcttatccttttattctcaaagcgattaatcagcttcaacaagtcgggattatgccgaatgcgtattatccggaaggcgggattggccagcatgaattgagcatgttgccgcaagatccggtaacggccgcggataatgaagtgatttataagcggattatcaaaaatacggctaaggatttcgatctctatgcatcctttgcaccaaaaccgcttgtggattcggctggctccggagcgcacattcacttttcgttgtggcaagaccaaaaagatgctttttttgatgacgatgcgccgatgcatttgtcgcagaccggtcagtattttgtggggggcattttgaaacatattcaaggtttgctggcattaacctgtccgtcagtcaattcgtatcaacgcctcgccccgggacattggagtagtgcttatgcgacatatggtcaggataatcgcgaagccgccgtgcgaattccgtcaacggcctggagcgatccagccagctcgatgaacattgaattaaaagcgagtgacgccacggccaatccatacttagcgtttgcagggctattagcggccggacttgatggcatcacccaccaactgcaacctggtgactattgcgatgtcgatccggccagccttagcgatgcggaacgcgcggcaaaaggtatccgacgcttgccgcgaacattaggtcaggcagttgatgcatttgtggcggatccgctatttcaggatttgttcggcgctcagctggtagatgcttatgcaaaaatcaagcgtgaagatgaccactactatggcaagttggaactggaaaagattgccgcattgcatcgggaattgtattgattgtaggaaaattttaagccagcgccgatccgtacgatttcatttacccgcaccggatcacgctcaccataacgcgttcaccggcgcagaagtctgcgtgtaaggaccttggtcgcaatgaccaaacccgggtcatcacgcccaaggccgcttacactccgacttctaccgcgccggatcacgctcactttctttgaggaggtttcattttggacgacttaacggaatttgtcgaccaagtcccattgttggaccatcactgtcactttttgattaatggcaaagtgccggatcgggatgaacgattggcacaggtttcgactgaagcggataatgattatcccttagccgataccaaaaaccgccttgcttatcatggctttttggctttagcaaagcagtttgcccttgatgccaagcacccgttagcagcgatgaatgatccggggtatgcaacctataatcagcgcatttttagctattatcattttcaggagttgttgattgatactggatttgtgcccgatgatgcgattttggatttagatgaaaccgctaaattgactggggttccggttaaagccatttatcggctggagacgcatgctgaagcgctgatgttgcagcatgataactttgctgcgtggtggcaggcgttgcgtgatgatattcgccaagctaaagaacgtggttttgtcggatttaagtcgattgcggcttaccgcgtgggcttgcacattgagccggttaatctgatggaagcggcagcagggtttgatacctggaaacagtctggtgaaacccggctgacgtcaaagccgttgattgattacatcttgtaccacgcggcgccgctaattatcgcccaagacctgccgcttcagtttcatgttggttatggcgacgcggatacggatatgtatctaggtaacccgctgttgatgcgcgactttttaaatgcgtttgcgaaaaaagggcttaaagtcgttttattacattgttacccgtatcagcgggaggctggttatctcgccagtgtctttccaaatttgtattttgatatttcgctgttggacaatcttggtcccagcggcgtgcggcgggtgttcaatgaggcagttgaactggcgccgtatacccggatactatttgcgtctgatgcgagcacgtatccggaaatgtacggcttagcggcgcagcaatttaagcaggcactcatcgcgcatttttcaccgttgccatttgtcgatttagcccagaaaaaagcgtggatcaacgccatctgctgggaaaccgcggctaagctctaccaccaagaggatgagtttaagcccacagatccgcaccgctaaaagcgagtttgctaatagaggagaaacaaacccattatggaaaaacgtaaaaaattaaccttacttgaggtctttggtctttcaatcgccatggttgctcccactggcgccatgtcgtttaacaccgcaagtgccgccgcaatgccgggatcaatatgccaattgctttcttgcttggtggcattggtgtcttgtttgtggccatttcgtttgttgagctaggcaagcgcatccctggcgatggttcggcatatgcttacaatgccaaagcgcttggcgaaaaggccggcttcatttccggctggttgttggtgctgacctacgtgacctttgtgttcagttccggcgccattgtcggaaactttgccaatgtctttctaagtcacttaggcatccatttgccagtcaatttatacaatattatcgtcctgttgttagggggctggctcagtcataaaggcattgagttctccactcgtttgaccttggtgctggaattgctggcggctttagtgttgagtgtgttgactgtcgtgattattttctccggcggtcgcagcggtaattcggtgcagccgttgatccctcagccccacatggcaactggcttaggcatggggatggtgtttgctctgatgtcatttgccgggtttgaaggttcagcaaccattgctccgcgcgccacgaatccacgcaaggcgatcagtattgcgctgctaggtgcggtaagctttgcggcaattttctatttcttggtgagttacgcggaagtcatcggttttggctcggcacacattggcgatcttgccaaaagtaccgcgccaatgaacttcctggcgacccattatctcggcaccaacgcggcgatctttatggactttgccgccatggtgagctactttgcctgttacttcggcgcactcaatgctggggccttcatgctggaagcacttgggaaaagtgggtatctgcatccatggttggcggaagaaaccggggacaagcagacgccgacgcatgcgcttgatagcatcacggggctggcgttgattgtgtatgtcatttttgcaatcggcttgggcgttagtgccagtgatatgtacaactggtttggtacgattgggatgctgggcttgctgacagtgtatgtgctggtgaatattggcgcgattgtttatttccgcaaagataaaggccgctcaatgttcaaacatgtgcttgctcctgtcattgggattctggtcctcatctatcctatctacaccagtctttggcccattccggcatttccaatgaacaccttcccgtacattgcaatcgcttggttcctcattggcctctgggtggcagcaaaacggcgtaaggtcacaacgcggctagaagatttttaaatcattcctgaatccatcaaaaaacgcctgccatcatcgcgatgcaggcgtttttttgatcccatattgggtgtctaaactagagacattttcaaaatcgtcagcggttttagtcagtccccgcgactttttcatgggctgtgccggttttgacgtatttttccgtgccatcagcaacggcctggcgataataatgctgcttgtattcaatcgtgttaagggtttggcgcagttgctgcatttgagtttcaacggactcatgaagatgattgaaaaagtccagccgcttttccagtgtcgtgtcgccttccagcgtccactgcatgaaggtgcggatatctttaatcgacatgccagcagttttgagacagttgatcatttccagcgcgccgagattgtggtcgtcaaaacagcgaaccccggcaggatctttcttgagatcgggaatgagaccttctttatcatagtagcggatggtggggacggagagatgcgtgatggcagcgacttcgccaatcgaataagatacggacatatgaacctccaatggtgatgactaaagataatttaaaaaatagttgccctaaagttgactttaggggctaggctgagtgtagcacttatcaaaacaagtgcaaaaaagttgatcatgctagggtgctttttcaattcgttgaaaacacccggcgaaagtcaaaagagggatgaaaacttgttagaagaaacgtatctattagccaatggggttaagatccctaaaattggttttggcacttggatgattgcagacaatgccgctgcagcaacggccgtgcacgaggcgatcgacgctggttaccgacatatcgatacagccgaagcttatggtaatgaagtcggcgtgggcgaaggcgtgcgggcagccggtattgcgcggcaggacattttcgtcaacaccaagttagccgcagagatcaaggaacacgatgcagcagttaaagcaattgacgagtcgctgcaaaaactgaatttggattatatcgacatgatgatcattcacgcaccgaagccatgggcaaaatacgatgagcctgaccgttactttgaaggcaacctggaagcatggcgggcgctggaagaagcgtataaagctggcaaactgagggcgatcggtgtgtctaattttgatcccaccgatctcaggaatctgttggatcatgccgagattgcgccaatggttgaccaagtgttagcacacattacccagacgccgtttaaaacaattgaatttgccaaacaacatcatattctggttgaggcatattcaccgtttggacatggtgaaatgttcaaaaatcaggcaattaagcagatggcggaaaagtatcacgtttcagtggcacaattagggatgcgatatttattgcagctaggcctgttaccgctgccgaagacggtcaaaccggaacatatgaaggcgaatgccgaggttgactttgagatcaatgaaaccgacatgtcgacgcttgaacacatgaagccattgacagactatggtcagtatcagtctttcccggtttatagtgatcggttaagttgagaacagactattgattgcgtacagaccaacaaaaaagagcggcagtgagtcgctcgcttttgttagtcaactttagacgcatacactaacttttgtgaagttttaaatactgtttcagccgcaatgcttagcgatttggtcctgctttgatcactcttaggcgtctatatgccagcaaattatgcccatggtccagcaaccacaatcttcccgatcatgtgtccggattcaacgagtgcatgtgcctgacgcaggtttgcggcattaagcggttgtagtgtcttagtcaaggtgcattgcagcgtgcctttgtcgagaagcgcggcaacttgatcaagaatggcgccttgcgaatctaggccatagccataccaagactttgagaacatccactcccacgcaaatgttgcccgcttcttagtgagtttctgcaagttgatgccgtggcgattttcggtaatagccgcgacccaaccatcaggacgaatcatggtggcgatctcggaccagtgctcgtctagatgcgacagattaaggatataatcgacatctttaaacccggctgccttcagctgcggtggtaatggcttgcggtggtttaaaacgtgatcagcaccatgatcctgtacccatttttgtgattcgggacgtgaagcggttgccagaacctgcagaccggccagatgcgctaactgtgtcgccatggaaccgacaccgccggaaccgttgataattaagatcgtatgatgccgattttctgcagttgcatccggcgaaatatgtaacttttcaaacaacgcttcccatgcggtgagactggttagtggcatggcggctgcttgggcatcgttcaggttcttcggtgcgtgaccgacaatgcgttcatcgactaactgatattcggcatcgcttccggagcgtttataactaccagcgtagaagacccgatcaccaactctaaagcgcgtgacatcttgacccacagcattgacggtaccaacagcatcccatcccaacactttaggctgagccaactgcgcgtgccctgctcctcgtgtacctgtgtcaacaggattaacagacacagcacgaacattcactagaaggtcgtgaccagtgggggttggcttagaaagggtcagatcttctaaactacgagcatcttgaatgggtaaatgttgcgtaaaaccaattgctttcattgaagtagcttcctttcgctaagtttcaccttgtatgttagcgggcatgttctaaaatagtaagtgagtaaattgtaagtaacttaaaaaaggaagtcctatgatgtcaggcgaactttatgattgtgcggctgggtgtccagttcaaaatacagttgacattatttcaggtaaatggaaaagtgtgatcctataccatctttttcagggtgacgcgacacggttcagtacgcttaataaagccatcccatcagtaactgaacggatgttggcattacaattagcacagctagaagcggatcatgtcattactaaaaagccaggtgacgccgatggacgagccacagaatacggactaacagaattcgggcagacactggcaccagtgatccaagcgatggcaacctggggcgaggcttatcaagcacgacaaaaagcgaccgcctgactggacatactgaagatgaacattaaaaagcatcgttgggatttttaaatggtccccaacgatgctttttatgctataaatacgcctgatagaacaggaaaaccgcaagcccaagtgcaaagataccgactgcagttttaataatgcgagatgggatcaagcgaacaatgaccggtccgagaaaaccacctgcaaataagccgatgcagaccgggattaggacaccccaggcaattggcattgagaagataaacatgatggatgtcactaggttattcacaagtgaggcaagattgcgcatggcattgtaggtggcataagggccttcaacaagtcgcgaaagtacggccaccatcagcaatccggcaccggcaccaaaatagccaacataaataccgactaacatcaccagcacatagcccaaccaccgcaagtgctgacgcgtagaactgttactgcttgcgggtttgggtggcattagaatcaagacgccagccaaaaagatgataaacgggacgactcttttgaatcctgcgttggaactatgaattaaaataagagccccaaaaacgccgccaatggtattaagcaacgtgatgacaagcgcctgatgccagtgatcttttaattcgtggcgagaagcagcaaccgcagatgaaccgctaaataaaagtccaattgtattggtagcgttagctgtaatcggcgccacgccaactgacaatagcaccggataaagcgtgagtgctgccatcccgacaataccgttgagaatgccggcaagtagactcatgcctagtaagaaaaggatggtttcgattgtcatgaattcgcctcgttttgctttagctgaaattatatatctttgataccagaaattcgttaatagtgcatcttttacacatctgaaaaggtgattcaattgatgttagtgtgcggtcgttttgcatgataagcaaaataattgaatgatacggacttcatgacataataaatggaacccaacttacggttaaattgagtaaaacgcattgacgtctgaggagcttttatgactaagaaagtttaccgcattctcatcccaaccctaacctttttctacctatggcttgccctaggtggccttgatcaagctgcaaaactctggcttaaactggtcatcatcgcaatcggggcctttttaagtctgctttggattcgaatggttcggttgccgccttttcgtgaggtgcggcacttgtggcatcaaattgaaacgctgcagtttatgattgtttctgatccgaagaaccggctagatttgttgaagcggcgcgtttttgccgatcaggcgcgacattttcgcgggttggccgtttatagttatgtcttgagtatgctgtcaggactgattttagatgggctgggatttgtgcgagtaagcgattttgtggtgacgattggctggacattagcgctgatggtgctcatcacggtgtatattattggcgccattcaggcatttgccacgcacttaattcgaacctttgtgagtttgcagctgtttgccccgttggctttgctgattggcctgaatataaccggaatcatgcctgacttcagtgctttccgcgattatattctatattacctgctgttgagcatcacgatttctgcggtaatgattgtgatggtgccgaattatcagttgcgggtgttgacgaattatattcctgcgattaatgcgacgagcacggtgatcatttttctgctggcggagtttggcaatacggcgatggcaggcattgcgcatcagattagtcaaggacttgatttatcgccgacactgacggctagtttgtttgggccgaaaatgattgcggcgattcgcgaattgctaacgctggtcagtattgtgtttctcatcagcggcaacgttatttccgcggtgatgacgcattatcgagtgaagagtgaaaatcaattgaagcaagtgctggctgacatcacgcttccgatttcgtcaacggattatcaaaggttgcgatcaattgtttatcacggcttagcttataatgcgttgttgattattggtcggcaggatctttatcaggctgtctgcacttatgaacggcaacatggtctggagccgcctgcagaggaagcaacccagtccaaacgtcgctggtttgaatggcccaaacggcattagccttggcagacaccttaagtaaagttacatccgttttttaaattagttttgccatttaagcggtataggcaaaaatggtctgctatacttagaaaaaatctttggattgctaagaaggtgagcccatgaaacaactggaaattgcacatttggataaggcgtttgatcagcaggttttgtttaaagatgctaactatacgtttaaacaaggaaaaatctatggcttgctagggcgcaacggttcgggaaagtcgactttatttaacatgattgtgcgtaacttgccgcatgatcatggcacgatcgcaattgatgccgatgatggtcaaggattgatcacggattatgcggacacatcggtgggcatggtttatacccaaccgcatttgccggcgtttatgaccggggtggagtttgtggattattttatggcgattaatcggcagcgtcttgagcaaacccacacgagcgttaaagcggcggatttcttttcattggcggggttgtcgcaggcggatgccaataagttgttgcgcgattattccgaggggatgcgcaataagttgcagattgtggtgtcactaatgcttaagccgcccgtattactgttagacgagccgctgacgacggtggatgtggtggcggctcatgaaatgcaacagatgattgtcgcgatgaaggtcgactcggtagttgttttctcgacccatattatgcagttagcacaggccatttgtgacgcggtggtgttgctgcatgataaaaagctgagcgaactggaaggtctggatattcacagtcaggaatttgaagaggctgtgattgcgcgtttaagtgatgaggtgcaggcagatgcgtgatgcttggcgatattactggtttcaggcgcaggtcaatgcaacgacgatggtgaatgggttcatctactttttgcggcgatttccgtttctaggtaaaaagatcccgacaaagtggtaccggccaagtgctttgaaaaccctcatggcaattgcggttaactttttcacgattttgctaaaaccggtgacaacgcttttgctaatcgggttagcgtttttggttggcagtgcgtatcacgattatgtgcatccactggcaaccgatctttcactgcgcgtcatgatcgcggtactggtttatctggtgggctttctcatgtttcgcggcttggtattccgcaatttgccgctgagcctcaagtcggttaaattaggtgattattttgccttggatcggccggcactggtgcgcgggttgatgctgatggatcaaatcagtggcgttgtacttggaccactattgcctatgtttgcgctcgccttgttgacgcagcatatgtggctgtttttggttggactgccgattgccattttcgggtggttatggccgagtttcattccgcggttgctttgggcacactggcggctgggattgctggtgcagattgggtactggctgagtttactgggactccccattggcttagtggtaaccggaaaattagccgcctttacggttggcgttttttcaccgctgggctttctgattggctgggctggcgtggtgctgattgggtggtatatttaccgttttccgaatgataattccttaatcatggcctccattcaggatgcggtgcggacgttaaatcttgttgcctcagccaaaaagcagcaacttctcgcggcaggaactgcaatgcaaaagaaactgacgctggataccaccgtggccctcaagtctgaaaaccgttccggcagtaattatctcaatgccttgttgtttgcccgttaccgccgccagctatggaaaaagttgcggacccgcctgttctgggttattggactcggcggagggcttttgatcgctttaaaacttttcgctgtccataacttaggcgatctgacaccgatctatggcggcattttcttcttgatgtatttaacctcgctgggtggccaaattgttcagttgttatttgttaattgtgacgcggcaatgttgtattatcctttttaccgccagcccaagaccattttagcgggattcttttatcggttttggcacattgttcagtacaatgcagtgactgggttcacggttttcctgttgatttttgcactgcagttaatcgcaccggtagcagatcaggttaacttttatctggtcttgttgctggaaatctgtgggctgatgttgttcttttcgtttcacgatctcttcatttactacctgctgcagccatttacggatgatatggacgttgtctcgccgctgtatcggttcttaagcttcggaatgtattgggtggcgtggctttttacgcagattcatttttacggctatggttatgcaattctcattggtacggtgacgctgctttatgtcgggatcggtaccgcggtgatttaccgagtggcacctaagactttccggattcggtattaatctggccgcgtttagggtggaatttaatgttagttcatgagcactgccagcagctggcagtgcttttttaatatcacccagcagatgccttgttgcaagcggttgcggcaacaggtagagttgaattaggaaacacttgttttgcaatgaatcataaccgatataagtgcggagctaataggcttggggcaatggagggtgaaggcatgcagacgaaggtactggcggtggatgatgatactgctattttggcaatgttgaagcgatactttgcgtggcggctaccggagtttcgattactcacagcagatgcagggcaagcagccttgagtcaattggcgcagcagcccgacttgattttgctggatgttaatttaccggatattgatggctttactttaaccagtcgaattcgtgcgatcacttctgtccccattatctttttaaccgcacgtattaccgatcaggataaggtgcaggggttaggcgcaggcggtgatgactatgtgaccaagccatttagtctgacggaattaggtgcacgcatcaaggcacatgtcagacgggcccatcagccggacaaacaggcgcagattgccgtttttgggcggatcatgattgattatcatgcgcatcaggtctcggtggatacgacttgcctaaaacttgaaaataagcaatatcaactgattgaatggctaagcctgaatccggggcaggtgtttagccgcgagcagttgtatgaaaagatttggggctacgatgcacaaggggatgagcgggtgatcaccgagcacattcgccgcattcgcaagctctttgatgcctgtcaggtaacatcgcccatcgtaacggtttggggagtgggatataaatggcaaaattaaaagcacactttatgaagctatcgattaaaaaagcacttttacagatgattctgctgggaacgattgtcgccggcatcatgatgttgctatttttacaagtctggcatctcctgatgtttcacttaacgacggctttagcgactcactggtttttaggcggtgtcggtttgtattttggcggagcaattattggtagcttcgccgttttatatgcggttatgaatgcgatggcgcggatggtttatcggcttaagtttgcaccgccgttagcccagttaaaggcgggggtggcacatattcaggctcaggatctggattttgaactgcatgccaagacaaccgacgaactggggcaattggtgggcgcatttgaagcgatgcgccaggcccttcgccaagcacttgaagaagcatggcagttggttgaggatcaaaaacaggtgaatgcggcttttgcccatgacctgcgaacgccattgacggttttgcaaggcaacctggaacttttgaccatggcggataaggatgagcagccggatcaggcactcttggctgagatgcaccagcagttggatcggatgacggcttttatccaaacgatgagtcatctttccgcgcttcaaaaccgtcagctaaccggtgaggcgatgacgccggccgccttggaacaacaacttaaagaagaagccagcaaacttgttccggctaccaaaacggttacttggaaggtcgagaaccagctgacaacaaacgagtcgcttgcaattgcaccggatgtggtacttgaagttttcgataatcaactgaccaatgcttgtcggtttgccgctgagcaggtggcgattcacttaaccgcaacggcaaacgggttgacgataaaagttgataatgatggtccgccgttgacgccgggtgaacaagctaaagccaagttgccgtatttttccaatgatcgtcaagcccaacatctcggagtcggtatgtacatctgtacgcaattatgcgcggcgcatcggggtcattttacaattgccaatcaaccagatacccaaggcgtcagcaccattgccgaatttggttttttaacgcctgcctccagctcgactgattgatctgattttaggtaaattggctgagttgtcagaaaattgtcatttacttgttacagtctgcttatcaacatgatgcgtctgccaatttagaaattgcaggtgagaaaaaacgggtgcctttactgcacgcggttctcacagcgcggttttgaacaaactggctcgcttcatgaataaggaggctttttttgatgacaacgattcagattgagcagttagtgaagcaatatcgtggccgacaacagccggctttggatcacgtttcgttgaatatccagtcaggaatgtatggattattggggaaaaacggtgccggtaaatccacgttgatgaagattttgacaacacttgagcaacctacttccggtaaggtgttggtggatggcacaccacttaaagatgcgcgcagtattcggcgcaaaattgggtatctgccgcaacagttcgggttttatccaaccatgaaagttattgacgcaatgacctatttggcaatcttagctgaggtgccggctcgcgagcagaagcggcgaattgagcggttactggcagctgttcatttgacagctcaggcgaaaacgaaagtcaaggcgttgtctggtggtatgttgcaacggttaggcattgcgcaggcgctcgtgaatgagccacgggttttgattgttgatgaacccactgcgggactggacccggaagaacggatacgatttcggaatttgttggcagattttgctaatgagcgtttggtactcttgtctactcatattgtttccgatgttgaggcaacgactaatcgtattggcatccttgatcatgggcgactggttttcaatgggaccactgacgagcttattgatgcggctgcggggcatgtttttgtcggtgacttaccggtggcgcagcttaaacagtttaagacgcagtaccagattagtgaacaaacagcgcacgggcagcatattcgggtacgctttttagctcgtactccgttggcaacttggcaatcggttgcgccaacgttggaggaggcgtatctgtatttacaaacctagcatcatcaagcgttggtgaagacggtaagcggtgtgtgaggaggggtcattgtgaagctgctttggatggaatttaagcggcagacgcgaagtttaacgtttgttatttacacatttttagtcgtggcatttatcgtgatgaatgtctggccattactttcacgaaacttaaccaccctgccgaaatcaccagcgagctacgaaaatattacggcgaccgattatcagacgctcaagacaaacagtctggatcagttgcactacgattatcggcataatttgtatacgacttatccgttggggtttgcaaaacaagtgacgttacgcgcggcagaccaggcaaaagttcggcagttgatgactgaggcggaggatgcagacacgcgcgcacccttggttaaaacattggcaaaggttgatcggctcttgggtggacagtctgcgtacagttcacaaaatattcagaattttgcttatcgccggatgacgaaagccgaagtcgtcgcggatcagcagctcattcggcaacgtgatcgggtcaccggagcgttcgcgagattgtttgcggatattgccggaatcatgatgggcattttaccgacaattgtggccattgctttttgtactgccgatcgccggcatcatgcgttggcggtgattcaagccaaggcgatgaccacgccgcgtttattattgacgcggtatgttgcgagtttaggaagtttatttgcgccagtgattgcgatcgctattgcgctaacgattcaggtcgccgttttataccaagggatgtcgttggattataccgcgattgtgaaaatggcctttatctgggtgttaccaacgctcatggtcagcagtgcggttggctatttaagtgcggcgatttttggcaattttattggttttggcattcaaattggctggtggttggcaacgatgatggcaggtgctcgccgcgtgagtggtaactacggatggttattgatcccgcggcataattcgctgcacaatggcgcgtattactatgcccagctaaaccagctgttgcaaaatcggctcggatacgctttgttggcgcttggactgatggcgttaactgcttggatcttggctgcacaacggggaggtaaactacatgcactcaagtttaggtcgcttcgtccgattagaaattaaaaccaacgtcttgaaaaccagcctcattgcggtactcggctggggactcattccaattgtttttacgctgacaccgcagagtctggcacaagctgcgatgccgactgagttgtggatgccgttgctagcgatcttttgttttggcagcttatttttaccggagcaaacaacaggggtagcagcagttatcaatagtaaatcgatccaattgtggacggtttacgcggtgcgatttgcttggtattttggcgtgttggcagtgctgaacgttacgctgcttggtctatatcagattcagggaacgacattggctgctggcgttctgttgggcaatgcgtcggttaagagtttatttatcgggagcatcacgcttggtagttactgttgctctcagtcacttgcggtggcgtatttaattccgaccgtctactttgcgctttgtattggtagcaatcaattaggggcgttaaacttgttgaccttaatgcgtcagcgaccgttaagcgataattggttacaactaggggttgcggcgtttttgatgatcattagctttcttttggcgcggcggcggttggtaaacagttgaaaatagttgctgcatgcaggcggcttgagcgtgtgactttctgctacaagcggtgggccacttggcgtataataagcgtgattaacgttatcatcacgcgtttgccggtgtaggggattaactgcttcggtgcgcgtttcatcataacgcgctccccggcgcagggacctgcatgtaaggaccttggtcgcaatggtcaaagtgcgaccatcacgcctaaggccgcttacactccggtccctaaccgcgccggctcgcgctcacacacaaggaggaattggtgcatgactgtagcaacgcatttttatcagttgtttcaaccggaacattataatctttacttggatattaaccgggagacgaagaagatttccgggaagacgacgattaccggtgatgccaagcaaaccgaaattgcggttcatcagaagtatttgacggtcagtgcggttcaggctgacggcaaggatgttccgtttacggtggatgatcctgccgaagcggtgcggattactttgccgcaagctggcaaggtgacgttgacactgacgtataccgcaccgttgacggacaccatgatgggtatttatccttcttattacgaagtggacggggttaagaagcagattatcgggacccagtttgaaacaacggctgcacgtcaggcattccctagtgtagacgagcctgaagccaaggcgacgtttgatttagcgattaaatttgatgaacatcccggtgaaacgattatcagtaacatgccggaagttcgtgaagaaaatggcgttcattattttgacaccacggttcggatgtcgacttacctgatcgcctttgcatttggtgaattgcaaaataagcagacaaccaccaaaagcggcgttaaaatcggggtctttgctaccaaagcacatcaacctaatgagcttgatttcgcattagacattgccaagcgctcgattgaattttacgaagacttttaccagaccccttatccacttccgcattcctggcagttggcgttgcctgacttttcggctggcgcgatggaaaactgggggcttgtcacttatcgggaagcgttgctgacgctggatccggacaatacctcgctggaaaccaagcagcgggttgctaccgttattgcgcatgaactggcgcatcaatggttcggtgatttggtgacgatgaagtggtgggacgatctgtggttgaatgaaagttttgccaacatgatggaatatgttgcggttgatgccttgcagccggactggcatatttgggaaacattccagacactggaagtaccaatggcgttgcaacgtgatgcaacggatggggttcagtcagttcatgttcaagtagaagatccggctgaaatcgattcgctttttgacagcgcgattgtgtatgcaaaaggggcgcggatgctggtcatggtacgttccttaatcggtgatgatgcgttgcgggccggtttgaaggcatactttgaggctcattattttggcaatgctgccggtgctgatttgtgggcagctttgggtaaagcggctaagttagatgtcggcaccattatgcagtcatggctggaacaaccaggctacccagtggtgacagcagcggtggttgatggcaaactgaccttgtcccagcaacaattcttcattggtgcaggcaaagatgcaggcaggcagtggcagattccgctcaatagcaattatgctgccgcaccgcagatttttgcggataagcaggtaactttgggcgattacacccagttgcgcgaagcaagcggtcaaccattccgcgtaaatgtgggcaataattcgcatttcatcgtgaaatacgacgccaccttactcgccgatattttggcgcatcttgaccaactcaatgcgattgatcagcggcaggtgcttcaagatctgcgattattggcggagggccggcaaaatgcttatgccgacattgtgccgttgctgtcgcggtttgcccagagtcacagtgccatcgtcatcaacgccttgtatcgggtggccaatgacttgaaacaattcgtcaacccggattcagccgaagaaacgcagctgaaaaccttcttcaaccaactcagcgccgaccagttcaagcgcctgggctggacaccaaaagccggcgaatccaatgatgatcaactaacccgtccttatgtcctaagcatggcgttgtatgctaagaataaagacgccattgcgcaaggtcacgatctatttacggcaaataaggatcacctgcttcagttaccggctgatgtgcggatgtttgtccttcaaaatgaagtgaaaaacttcggcagtgctaccttgttcgatcagttactgacggcgtataagcagacaaccgactcaagctacaaagccgacattcttgcagcggtaaccagcaccccggatgccgagttaatcgctaaaattgtggatcaatttgaaaatgccgacaccattaagccgcaagatttgcgctcatggttccgcggcgtcttgagtaatcacgccggtgaacaagcagcatgggattgggttcgcaacgaatgggcttggcttgaaaaaacggttggcggcgacatggaattcacaacctacatcaccgttatcgccggtattttccgcaccacgcaacgactcgatgaattcaagaaattcttcgagccaaaactaccgacccctggtctaacgcgggaaatcaccatggacaccagcgtcattgccagtcgcgtcgatttgattcaagcagagcaacaagctgtgcatgaagcagttgccaaagctgttaagtaaaatattagtcgtcttggctgatagctaaagagaaatgacaaaaggccgccactcagcgttacagtggcggtctttttatgccttcatacttccagttaatgagtatccatacggcatgaaataacgaaaccgcaaccgggcttttagaaaaatctaatccttatctatacaatttcacgggaaagagaggtggtcaaaccgttacactgaaaggcgagtaactgttcttaatcgagcaggataccgtttggagggatgtttgtggcagacacaaagaaacaactgcgctggtataacgtggccttaatcgcgttcgtatcggtatggggtcttggcaatgtgttcaataactatgcacagcaaggcctttccgttgtcactagctggattctgattatgctgatttattttgtgccctatgctttgattgtggggcagctaggatcaacgtttaaagatcaagccggtggcgttagttcctggatcaaggaaaccggcagtgtgcgattggcgtactatgcggcgtggacttattgggtcgtgcacatcccttatttagcccagaagccgcaagcgattttgattgccttgagctggctgtttaaaggcaacggtgattttgtcaacaccgtttcgtccatgaccgtttccttgatctgcctggcgttattcttacttttcctttggctgtcttcgcgcgggcttaccaccttgaatcgcattggcagcatggcgggcacggcgatgtttctgatgtcgattcttttcattattctagctgtgaccgcaccattgatggtaaaaggcgtccatgtggcgaccccgaacatgggcgacattcatacttatttgcctaaatttgacctcaactacttcacgacgatttccatgctagtctttgcagttggcggcgcggaaaagatatcgccatacgtcaacaataccaagcacgcctccaaggaatttccgttgggcatgttggtgctggcgggcatggttgccttttgcgcgttgctaggatcttttggcatggggatgttgtttaacagccacaacattccgaccgatctcatggcgaatggtccatacacagcgtttgcaatgttaggtaagtattatcacgtcggcggtttgtttgtcattttgtattcaatcgccaatgctttggcctcaatctccgcgttggcattttccattgatgcgccgctgaaaatcttgctgagtgacgccgatccgcattttattcctaaaaaattgcggcggatcaatcgcaaaggcacaccgattaatggttactggatgaccggtattctggtaagcttactgatcattattccggcatttggcattggcaacatgaacgagctttacaagtggctgcttaacttgaactctgtggtcatgccgttgcgctatctgtgggttttcctcgcgtattatttgctaaatcaacatctcgaaaagttccaggccgactatatgctggttaaaaataaacgcttgggcatgctcattggcggctggtgcttcttcttcaccgcctttgcctgcttgttgggaatgttaccgaaaatcagttatcttaatgaccccggcacatggtggttccagatgggcttgaatattattacgccggttattttgttggcattagggctgattttacctgttattgctcggcttcatgaaaatgatctggatgctcagtgagataaaaaagattcaacaactacctttagggaagtcgttgaatctttttttgtaagcgcgagccggcgcggttagaagtcggagtgtaagtggccttaagcgtgatggcccggtcttggccattgcgcttaaggtccttacacgcagaattctgcgccggggagcgcgatgctgggaaaatgcattggcatgtgagcgggcaaaacatcagcccatatcattggtggcgacttaagcctgatgcttttcaatcgcagctaacatctgcttttccggataaaagtgaatcaaaagcaacaacaggccatacaacagcaacggcagccagacataattcaggttaatcatgccaagcgttgcagcattttgactggtgttgggcacgtatccggtgaggtcgaagagtccggcagtgatgaggccgccgatgccgagtcccagattaacgccgaaatcgttgctggaggcaaataagccttccgcctgagcgccgagggtgacgccatagcgaatggtatcggctaacataatcgacactaaaccgacaatcatcccttggccgacgctgttaatcaaaatgcccggaaataaaatccacaagttccgcgcataaacgccacctgccatgaccagctggccgattaagccaatgatcatacccagacgcatcgtgtgcttattcccataccggcctgcaatgatcaggatcaataaaacgccgattagcgaagaaaaagtaaaactattggcccatgataccaagccttgatcgtgtaaagtgtacttaaaatagtaaaccgtggtctgatttttaatggcggtcaacagccagtacgtaaaaataatcaatgatagcagcagccacgggcgattatgcaccgcaattttagccacaacttttagcggttggtgagcgattttttcctgagtaaatcgttcacggatatgaataaacgtattcagaatcaggacgagcgagatgccggcaaaaagcgtcatggttaagagaaacccgcgctgatcattgccgcgaccgaagaaggcgactaatggcaaggtgaagacggcgacaatgatttgcaccgaactgccaaagaactggcggatgactcctagcagggttaattcctgtggctgctgagtcaacgtcggcaacaccgaggtaataggcagattcaccgccgtgtataagaagccaagcatgaggtaagtgacataggcccagacgagtttgccatttgccgaccaccctggcgtgacaaacgttagcacggcaaagattgcatacggcaaggcataccagaggaaaaacggccggcttttaccgaagcgcgaacgggtatggtcaatcatcaagcccacaatcggactctcaaaaacatcggcaatccgcgcgatgagaaagagtaaggcaaccgcgccggcttgtaagccataaatatcggtataaaaaaacaacagataagacgtcatcacctgaaacaccaaattatctgctgcatcgcttaaaccatagctaatgcgttccggccatttggtttgccaagaagtagagggttttgacacagacaccgctcctttcttagatgcgattgaacgccgaatcagcacgcgggaaaaattcaaagcgggatgataaaacgcgagtataaaacggtcctcaaacttttacccgagctggctcgcgctcatgatgatcaccgtttcagcatcggcaaaagactaggcgtgtttttcccgcaacatgtcgctgataacgatttggttgacggtattccacaccatgtgtcccacagcttcggacagatgttcttcagctggctgatcttttgcggctgggacgatctttagtgcaggcatcgcccataaatgcgcgccggcccaaacacccagtccccacatactgccatatcccagtttgaacagcggaacataatgcccggctaccgcataaagtgcccctaagcttgatgaaaagccaaaatgaaccagcagactaacccatggaatctggtggcctgaataggtgtaagttgcgtgtgtttctgccggtgtcaagccatgctgttgtagaaaagtttgcggtggattagtcgcatcgcgttccggtgtgcgtggtggcagaatattttcccaccctaatttgactaaaccggaaaccaaccccgcaaccgccccaactgcggctagtttaacgatggaaggtgaagtgtgcgtgcgcatattaaaaaacctccttaaaggtacttagaactacttacattttaaaacaacatgaactatttaacacccggaggcgcatgtttattttaataaggtggaattctccgggtttatatttttgaattatataggtatgaccactttttgtagcgcgggatatcacttacttatgaacggttaaagttggctagacgaagatcatttaaaaactaattattcgaaaagaagacgcgaataaaataaggtcaaaggttgctatcgatcttacatttagttagtatatagttactgaaagggagggtattaaaatatggcaaaccttattggtaacaagcgatgttggcgctatcagctttatcaggatatcctcctgatgtgttcgtgcaggtgagacatcggcagtattttgcttaacggtgtctgcaagcaatcgtttcaaaattttgccggttcatgcgagtcaattagccgggttgggaggtgaaccttgacagaagcaccacttaaaatcgggattctcaacgtgatgcacgacaaagccgataccaaaacgcggctgcaacacgttttgagccacaccgatatcccagttgagttgcatttttactatcccatgacccattacgctggtcgggaagtaccggaagcggtgagctcgattctggagccgctggatattcacgaagcggcaacgatggacgggttcatcatcaccggctccccgattgaaacgctggaatttgatcaggttcactatatcgccgaggtgcggacgctgctaaagacattaggtcagcatgtgcccaaccaaatgtacctgtgctggggcgggatggtggcgctaaattactttttcggcgtcagcaagttgattcttccgcacaagttattcggcgtttatccgcaaacaattcttgaaccgcacccatttttaaaaggtttaaaagaaggctttaagtccccacatgctcggtatgccgagatggatgtacgcgatattcgtaacgatccccgcttaacgatcaatgcgacaacaacgaaggggaaactcttcatggtgacggaaccgactgacacccaaacgtttatcttttcgcatattgaatatgaccggtggggcctggattcggaatacaagcgggaagtggccgcacaccctgagattagctataaacgggctaaacactattaccatcacaaaaacgattatgaccatccgaagtttaattggaagaaaacgcagcgaacgatttttgacaattgggttcgccacatcgcggatcatcgcaatgaaaaccgttcgccgattatttagggaggctttattatggtgacagcagcagataatattacaggtttaattggcaatacgccgctactcaagctcaatcgcgttgtacctgaaggcgccgcggatgtttatgtcaagctggaattctttaatcccggtggttcagtcaaggaccggattgccttagcgatgattgaagacgctgaatataaaggggtcttgaagccaggcggcaccattgttgagccaacgtccggcaacaccggcattggcctggcactggttgcggccgcaaaaggttaccacctcatcattaccatgccggaaacaatgagtgttgagcggcgagccttgatgcgtggttacggagccgaactcattttgacgccgggtgccgatggaatgccgggagcgatcaaaaaagctgaagcattgagcaaggaaaatggctacttcttgccaatgcaattccagaaccccgctaacccagacgtccacgaacgcacgaccggacaagagatcatccgttcatttgatggtggcaccccggatgcctttgtagccggtgtcggcacaggcggaacactcaccggggttggtcgggctttgcgtaagattaacccagatgtgaaaatctatgcgctggaagcggcggagtcaccaatgctaaaagaaggccatggcggcaagcacaagattcaagggatctcagccggctttattccagacgtcttagatacgaacctctatcaagacatcattgaagtcaccagcgaccaagctatcgacatggctcgccacgtcagtcatgaagaaggcttcctaccaggcatttccgctggcgccaacattttcggtgcgattgaaatcgcaaagaaactcggcaaaggcaagagtgtcgccacagtagcaccggataatggtgagcggtatttgtcgacagatttgtttaagtttgatgattagtaaaaccaatagttataagtaagcgaaaaacagaagcggcgatcaattgagtcagttgatcgtcgctttttgtcttgagaaaatgagcggcagggaagattgcgtgcgtcaacattgaacaagattgttataatggaatctgtaagtctccatggtgcaatggatagcataatggtcctcgaaaccacagatccgagttcgaatctcggtggaggcattatttagcgtttattagcgtactttagaaatgaaaatgcctttatatcagtgttctcattgatttagctcaccttagaaagtgtcaggattacgttaagggggacgaaaaggggacacaactggcaagcacgagatggagaaaccggaatttgttaattctcggtttcgataagattcgttagtcctagcccatgtcaacagtaacgtacaaaggagttgtggttagcatgcaaccagtcttactcgcaacggttcaccaccccaatgtgtctttgccgcagttaaaacgggttctggcagtagttagtgatagtttctcggctgcttatctgacagttagtacgattacagatcgtgaaattaccaaattattgcaaacttttcccagcgttcatgttcgcatcattgaacctcgtggcgcggctgatgcgcggcggcgggtgcttgattttggattgcgtcaggttcgttaccgcgcttcttttttttactgcgattttgataaagtagtgacagggatcgaggcaaatgtatctgagtttaagacctttattgcccagcttcgagttgatgatggttatcagattattggtcgaagttcagaaaacatgcggggttatccggcaacttggcgagaaaccgaggcaattacgaataaggcggcttctgaagtgtttgctttgcctgatctggatattactgctggttgctgtgcggtgagtcagatggctgccagatatattttggctaattcagatggtttgctgacggatacggaatggccgttgatttgtaaggcggcgggattaacgatcacagccaaacgcgttaactttttaccgtatgtgccggctttaaacgcaggtcgggatgacgataactggcacggttacacgagcaggttgcgacttgcattgcaggcgctgcaatcgcttgaaacagatggaacggctgatcttaaccaaccagtttcaattggatggccatataatgaagattagtatcgattgataagatatctaaacgaacgctaaaatgtgccctgtttatcaccgtcagtgtaacagtgatagacagagcacatttttacgtccgctgatatatttggccagatccgactgcaagtgaactaactagatgtttttgttgagtatggttgaatgttggcactcttcaaactttgaatggcttatgccaaattcgtttcaaaatatgtcaaagttgagaatgtcgttgttagttgattatgctatattctgcggaatggtaattaagaaaggacaacgcactatttcgtctctttgttggttgtaaagtatttagctatttttactgccaaccaagcaatcagaaaaatagcgatgagacgaatgtaggttgctgatggtcccacccaggtgcttatcatataagcaatcggactgagaatgataatcgtacagaaaatgatcaaccagtatttcaagcttaacgactgagcctgtttcactttgtcacctcgcgtctattagcaaaagtaatagatattctttttgctactatttttccgctgcaaccagtgcctgcgccagatcgtcaatcaagtcctgctgatcctccaagccaattgcaatccggacatgttgcggtgtcaaacctgaatcggcgcgtttgttttccgggagcttaaaccaaggtagtttgactagactggagatggtgccaagtgagtcggcaaagtcgaaaattttggtgctgttaacgaactttaagggatcaatgttgtcggctagtttgatcgtcaagagtccgctggcacccgtggtttctttttgggctaatgcgtaaccgggatcgtttttaagcccggggtagtaaacgtgggcaacgtctgggtgctgcgctagaaattcggcgatggcttgggcgtttgcagtttcacgatcaaggcgaacggagagggtggcaatgccgcgggtgacgaggctacagtcaagcgggcttaaaatggcgccgatcgtgttttgcaggaaagcgagcttctcgctgatgtcggggtgagcggagacaatgaggccggcgatgagatcaccgtggccaccgaggtatttggtggcgctgtgtagaacgatgtcggcaccgaggtcaagtggccgctggtaataaggggttaagaacgtgttgtcgacaatcgttagcagatcatgggcttgggcgagggcactgatagccttgacactgctgactttgagaagcggattggaaaaagtctcgaagaaaattgctttggtttcggggcggatggcggcttccaccgctgccagatcacgcgtatccactggcgtaaacgtcagaccatgttgagaaaaatactggttgatgaggcgatcggtgccactgtagagcgaatcaccaataatgaagtgactgtggtcgggaaaaatcgcaagcaccgttgcaatcgctgcaacgccgctggaaaacgcaaagccggcatcgccattttctagcgtagcaatctgacgttccaagtattcacgggtcgggttaccactgcgcgcatagtcccagtgggtttcctgaccatcaggagcaaagcggaacatggcactttgatatacaggtggcacgatagcaccggcttggtcgacatttagttgcggtccatgaacgagtttggtattgaattgggtcattaaaacccgacctcctttaatgaatagtgttcttttatgtatgcccgtcaatgaagcagattgacgggcaatgtttgctggctgaatggcatgattacttggtggttaaatcggtgccaaaatatttttgcgacagttttttcaacgtgccgtctttgcgtagttcctgaatgccttttgaaagtgcggcttgtagtttaggcgattttttgctgaccatgccagctacttcatcgggtttaacgacactatctttgagggtttgactctttaagcccgcggttgagttattcttggcaaaggcataccatgcagccgaggcgttgatggttccgtctgcccgcttttctttcacaaggctaagcgatacggtaaagtcgccagacggggtgatcttagcgccgtattttttggctaaagcggcattgggcgtgccggtgccttcaacaaatgttttgcctttaatatcggcaagcgatttgatggtggtattatcgctgcgggttattaaggcataacgcgagtacatgtacggggtggtgaagttgtagacctttttgcgtgcgggcgtttcactaatatcattcagtacgagatcaaatttctggctgcctaatcctgcaatcaacgaatcccattgggtgggcacgaattttgccttaaccccgattttcttggctaaggctttccccagttccacttcgaagccttcaagtttgccatctttgcgataagaaaatggcgcataagttccttcaaggccgatggtaagctcatttttgttgatgagttcggcggtgacgtcactgttttttgacgtgtcagatgatgcgctggtgcaagcagtgagcgtgaaggttaccaaggccacaagcggcaacaggaaccacaattttttctttaacatagcgttcttcctttcaaaatagcggattataattgcgtggtttgtgcattggcattgtagcgtgatgtgaatttttcgagatgccgctgaccccaagctaagaaagtgcagacaatggcatacagaagcgcaacgattgagtacatcagtaatggttggtaattttccgccgcgatttgttggctgacttgaaacatttcgacaatggtgatcgaggcagcaagggatgtgtctttgatcaggctgatgaaactatttgacagtggcgggatggccgttcgtagtgcttgaggaataatgatttcgcgcagtaccagtcgccgcggcaatccaattgcataagccgcttcccattgcccggaatcaatcgacaacagcgaggcgcggatcgtttcggcacaatacgcgcctgtgttaagtgagaacgttataattcccgcggccacgggatctaacttgatgccatgcgggaaaatacccgggatgatgaggctgggtaagccgaagaaaacaatgaataactgcactagcaaaggcgttgagcgaaagagccaaacgtaaaaaacggcgattccttttgcgattcgaatcaaaatgcctttacgaaccgatatgcgcgtcaatgcggttacaagcgcgatgatcaggccgatcgcaaatgacacgagtgcaattggaatggtgtatttaatgccggctgctatcatttgcggaactgcatcggtaataattttccacataacgttcctcccaaaataacaatatatgcagatgttgatactcaagcgaattctttagtcgggcaacccgatatagcattttgacttcaaacttcattgaggccgaggagggaacaaaaaatccgcccttgcctattaatagacaaggacggattctttccgcgttaccaccttgattagtcgaaatggtcgactcgctctaagtacgacacatcttgatgtgtgatactctaactcagtaacgggagtgcccgtcagttgcttgcggtcgccgtttgcaactgaatgctttaaaagaccatcttcaccagttcccgatcattgtcttgcaccaaaatgacaactcgctgaggatcttcgcctgggtactcatcttttcgcttctaagatattgacatcacattaggctaaaaaacaactgttgtcaatagccggtgacaaatcgtaagctgtacaaggttgatatacgatgagaactgctttgaccagggcttaggcaaaaatgcgcttttctcattaaacgatgcacattggagacggctacccactagtcagttgacggatgatcattcaaaaaggcgaacttggcagacggttgatccaaacttaagcataaagccgtggtacatttttaggtctaaagtccagtgactttgtttgtaagatgcggtatattaatgtcggagtagttaaagggatactaatattttagtgtttaagcggagggttaagatgaaaaaggcatgggcgttcggcttagctgccatgcttggcttgggtgtatcaacggtaatggctgatcaggcatcggcttttgctgcatcagcgccgccaacagcagcggacacaaccacacaaaagattgatactgaccaaaagaatacggacgatcaaacttgtgtacaagatgatatatcatcggaagctaatcaaacgccggtgattaccgtagcagagaccagcgaatcggttatcaatgacagctcggcatcaaattccggcagtcaacaagaggagcaggcatcggagagcagtcaagtgtctgagaattcctcagccacgagtagcagggatgcgaacgcaacaacagaagctgggtctaaaaagacagatgccaagagtgaagcatctagcagttcagtacctacaattaaaactgagcaggagagcaataaaggttccaaccaaccgaagacgaaacatactgctgaagaacaagctatggtggtagcagcgcaggcagcgacgcacgacaacattcatgtgaagatggatcagggagttcaggctgttacccagggaactgatgacttcacgatttctgataaaccgcataacacattggagcgactgtggcaggcgttaatcgaatccgttgcacaccggcaacaatgcccaatcagctttgaaaatcggttgatcatgaccacgccgacgactaatcttacttttataaaagcttcattgacgccggttaagaagtacattaaggcaaacttttctgatgatatgctgaaacggatgcttcaaaaagattttttgaaaccgcttcagataacgtttaaggacgttatcaagacgcttaaccaaataatgttagttctcgtcattatgccagatagttcagcttcgcaagaataaagaagctttgaaggattatgatagcggcataaaaggcaggtaccgaagacttagaagtgaagtcttcggtacctgcctttttatggatttggcatttgtaaacaatatccggtcatcagcttgaaattaagctggcttttgggttgatcagatatcgtgtactagcttagttttgttcagcttcgagatgagttgctgcgactgctctgcgaactttgactgcatgtgcgacgaggccaaggacgagacccacaccagccggcacgagccagccgagacccattgcggaaaatggtagaaaatgaagctggaagctatgcaatgccaagcctaacgaactttgactgacaacggcggggaaagctgcaaacatgtcgagcacagccggaacgatggtgaatgctacaacgattcggtaaactagtggatcgtgatggaacgctttgccaaagaccgatagtaagatgagaaccattgagaaaggatataggaacatcagcattggaacggaccatgcaatgatttgttcaagtccgaagttggcggttaagaatgacagaaaacttgtcaatccaagccagacctgatagctgactttagggaaatgccggtggaagtcctgcgcgaatgccgcgaccaaacctaccgcggtggtcaaacaggtcagcgttagcaaggttgccaagacagcgtggccagcagtaccaaagtagaacgtaaccacctgattaaaagcagttcccccttcagcactaagcttaaagtgggccagagacatacttcctaagacgatcaaggcaacgtagattaacgcgatccaactcgtagccatgaccccagccttagccgttgctttggagacatgatcatcgtttttcaagcctaaaccgcgaaccgccgttacgacagtcacaccaaaggctaaggcagcaagcgcgtccatggtattgtaaccctgcaggaagccgctcatgaaactgccgccatttttgtacgcagccgttactgtttgggcagccggattccccattggatgtaagaaaccgatgaagaagacgaagaataacaatagtaagaagacgggatttaagactttaccaacagctgtggtaattttgcgttccttgtatgacaggaaaaaagcagccccaaagaataaagccgaaaagacaagcaagccgccttgttgccaggcttttggtaacatcggtaagacgccggtggtgaaggaaacagtggcagtccgcggcgtgccgaacattggcccgatcgtggcatgaatgagcaccatgaacgctaaggcaaagaagcggccaagtggacggccaatatcataaacaccttcagcatgcgttgcggcgatggccaaaacgccaagtaatggtaatgcaacggcggtgaccaaaaatccgagcattgccgggaaccaattggccccagccagttgccctaaatgtaacgggaaaattaaattgccggcgccaaagaaaaggccaaacaaaagcgatgcaatgacgacataatcacgggttttgagttttttttcagataattccattgaactgcctccaataaaaatgttttaagttgcgtaacgtttaaagcggttgtcatcggtttaatatgactaatgtcagattccaattgcatcacttccttaattgagatacgtgaacggttcaagcatgctctcacaacggagatagacgaaaaaagtcgcccttagcatttgctaagggcgactttgcgcggtaccaccttaattcaccatagccaaaaacggcctggtcttcatcgcatacggtcaaatgacgatatgctagcactgtaatgggtgcccccatgacacgttactgaaggttcggtgtcctgcttgaaagggatattcgctatgtcctgaatgcttcctcacaccaaccgaagctcgctgaatccatgaacacaactacttgtctttcgcgttgcatttgtatttgcattttagtctagcatgatttgatttcatgtcaatcactaattgaaaattaattttgaaagcaaaattgaaaaaaaggcaaaagttgtgaaatatcaaagattttgaagccttgggtgggtagaaattttttggtgatcggaaaggcgcaagcaaaagatttacagagtcctaactgctactcgggttaatttctgccgaaagtccaaatgagtcgttttaaaacagatgagtaaaaccgactttttgattaaacgataacaagcgttagataatgccgagaatagtatatttcgcttattgagtcgcagtgaagctttattaggagcgagtatttgtaaaaaatgagtgatagattaagggatacaacgcgattgagaaccgagttaacaagtaaacgtattctttgattgctcaaacatcatcatgttatatttaaaccagtaagatagatagtaaactacaggaagaacaatacggagggaataagacaatgaagaaggttaattatattgcagcgggtatttccgcgttgacacttgctggtatgctactccctgttggacaggtttttgctgctgatcagactaaaacttctgtggctgaaattaacttaaaagggggagagctgacacttgatgcagttcccgatcttaactttggggagatcgccatcgccgatttggctgcgggccaagtatcaccagccttagtcgacaatgctgttggtaatggtccggtcaaaaatggaacagatgctatggatggaaataacacgggtaatctgagtgtaactgacttgcgagggagcaacgctggatggacactaactgctcagctcggccaaatgaaaaacactgctggaaaacttttggcagggaaattgaagctcgctagtacaaacgttcagacggacaacaccagtgttaacgctattaatcctggaggaactttgcctgaaatccctatcgccggttctgctgttacgatttggaaagctgaagcagcgactgctaccgataatggacaggggcaagggaaaaatacggcagcgatcactgagaacagtggaaccacgcttatactggacaaaaacccaaccgcaacagccggtcagtaccaagctgcgatcacctggaccttgtccgatgcacctaagtaattaagcaactatttctggggcagcggtcagtcgctgcccttttcataaccgtggggataagattatgagaaaaaaacttttactaggtctgctggcctgcttgagcttcctgtggtttggcacccatcagcaagtgcatgcagctgaaggcgcaggttttacaatcagccccgcattaccgcaaaatcagatcgatcaatcaacgtacttcaatctattggtaaagccgggtgaaacccagcggctgctcatttatgttaaaaatacgacgaagacagctaagaaacttaaagtcagtccggtgagtgcgtttacgcaaactaatggcacgattggctactaccccaatgaccacaaggatgattcggctgagtacacgttttcacaattagccggtgaacccaaaaccattgatctggctggggatgctcaggtgccggtgacgtttgatgtcaagattccggcaaaaggcttcacgggtcagattctcggcagtttgtatgttgaagatccaacggtccataaaagcggtggcggagggatggcgattaacaacaagttcgccatgctcatcggggtggtcttgcaaacttcaacgaccgaagtagcacccgatcttaacctcatggcggttaaaccagggtcacaggataatcgggccggggtgttggccactattcaaaataccaagccgcgtttatttggcgacatgacgctagatggcaaagtttatcgtcaaggttcagataagccttatctaagccggacggagaaaggctggtcatttgccccgaactcgcattttgattacgcacttccttccaaagaggcgctttcgccgggcacgtatacgctagatttaacagccaaagcggttggtaagacctggcactggcgccgcaactttaccattacgcgtcagcaatctgaagccattgagcagaaactaggaagggaaacaccacaaaaaccgtggttatggatcattattgcaatcgtcctggcgctggtgattctcgtcttgctgtggctggtttggcggcagcgacgcaaagggagggagactgatgaaacaaaagaaaactaacttcttgatgatgctacttttgctggcactgctcatgatggcgggtaccgcaactcagagcgtgcatgccgaggtttctgtggctcaagttgaactcaccggagaaatgccagcgcccaatcctgagcaacctgcagttcccgagcccggaaagccgggtcaacctgaagataaaggacagcagccacgacacctagcagccactacggaacgtttaccgcaaaccggtgatgacgtgcaggtatggtatgtcgtgattggggttgaaattctgatcatcgttttattgtccgcgctactcgtactcggccgttcacggcaaggaggtcaaaaatgaaaaagaaaatctttatcataacttgccttgccgtgatgatcagtatggtgcttgggccgctgcagatggtgatgtcggcaacatcaagatggccaagtccggggttgggtacgcaggaggcatatcctataccggacacaggaacgttcactagtttgaatggaatctttagcaaaattggaagtggtcaatctcaagttattgacgttaatactgatacagtaggccttgaaataaatccagataagccaaatagtatcggagctatttggagcaatcagtcatttgttaatctagataaagatttcacattggatatgcaagtttatcttggtaataagaatgataagggagctgacggacttgcgtttgtactgaccagtgcaaagccaggtacactgggtaacggtaaatcctcattaggcgtttgggggatttccgaaaaaaatgatgctaaaccagaccagattgctttgacggggattcccaaaagctttgcaattgtgattgacacaaagaaaagcgttaatcctttgacgagcggattggacaaacatgtccactatgcaaatagtatcgaacagtatattggatctggatatccgagtcatgctagcatgtataacattggagctcctttttggcaaactgaattagtttttgacaatgcaatcggtaaaccgacacgttacgctgatggtttaaatggtcgtgttacaaatgataaatggcataacttgatcgtatcatggcaaaaggcagatagtgggggaggaaccctaacttatcagttaaaaggaaaggccaatgcacgtagtattacttggactgaagccgaaattggtgcaatctttggcactaccagtaccggtacgagtaacaaagaactctttctaggtttcacaagtgccacgaacacaacgactgatacgtcagagccgcatcttgttgctatcaaaagcctggctgatttcaacgatttcaaaggtgcagtaacgcttaagcacggtgacgaggtagttaaacaagacacattactaagtattggtgataagctcacttatcattactcaattaatgttgaaaatctcaatggtttggagtggccggttagccagatcgagttacccaaaggcaagtattttgattatttgaaaccagatgggaagcctgctattgcgggcgacaaattgcctgtatcgattaaggtaaatggacaaacgatcccggctgaagcgactgtccaagccgatggaaactcagcggtaatgactagtctagggagccttcccaagaatacaaatagccagcttgaatttagtgtgccggcggttgttaagaatcatacactgactagtaatcttctagttgacgatgatgccactggcagtttaactggcgggacgcccacggctgaaacctataactttaccaacactgctgatcagatcggtaagactatcaagtatgttcttgcagcaaacccgggtgctgttactttgaagagtgttccaagctttgtttttgaaaaaatttttcaggaaggcagcgaagaagcaaccaacgtaaatccgacagttgctgattttattcaaggtattccaggccaaaaaccgttcccgacaacgctttccgaacttgatttgtccaagtggctaaatacgcttgattcaaagacaccttctcaaggagcaacaggcaaaatcctcagcgtcactgacacaagaccgaataaaccgggctggcatttgcaaatgagtttatcaccattcacattagcagacggcagttacgtcttaggtgacaacggcaacacaagcggaggcaaagcggaaatggttatcgctgagaacaaagataatgaagcaaaagtaactgaaattgcgcgggtaagagataatggcaacgctgtcacggtgaaaaacatggctcctggcggtagcaactggtcactcggaacagaggaaatgcaaacgcaagcgttcatgtcgattcaaaaaacgccatccgttcgtaccggacaatatcggtcaacggtaacttggacattatcagatgcccccatgccttaacaacttaaaatggcattgaaatgaattgcaaatgaggatatgatgtgcatatccaatgttgctgaaggttgtcatttaagttgaggggtttggttatgaaaaaaagttcaccgaaattttcactactagtcgtttccattgtcttagcaacacttgctgtcgtttctcaagcacccatccacgttttaattgcgagtgttagtcactttggttaagacgccttattctggatcaaacactgaagccgcgaagaaacgcaatgcgctatattttaattaaagaccgtgtgattaagagttcaacctcttagttgcacggtcctttttgattacgggaaatataagattgattcaatgtcacggcagcggcagtattttgaaaatgtcagttttgcgtgaatgggggaaaatcaaaatacggcacttttagttggtataaatataattgtgcaaaaatgaagggaagaatataatcgctgaaaattattaaataaatgcttttaatcaaacgatatcaatttttaggaatctaatctttgataaatgatattttaaaactttgaaataattaataatattgttattgactctataaggaagaaaaaactaaattatttaatttttacatcaagaacataaaaccagacgaacgcaagtatcataatgctgtctagtcaaggaagaaaatgacataaataacgtttaaatactaaactataacaataacaattgtaatgcttgaagaaaacgcttgcattacgattgttttgagaatactataatagacatagagaggaaaaacaaatcaaacaagaatatggaggataatataatgaaaagagttaactacatggcgatgggtcttactgcattatcgttggctggtatgatcttaccagtcaccaatgtattggctgcaggcgaggctgacacgccatcgaagaagacttccgttggtgaagttcgggtcggggtggatccgactaacccagatccgaaaaacccagataatccagatggttcgaaggatattttatcactggtaaaagttccggatctgaagtttaagagtgtcagtgttgaagctttagctactggcgatcaaactttaccgttactgaataatacggtcactgacaaaccggtgaagaatgaacctgctgggaatgcggcagatggtaataatcagggaatcttgaacattacagactatcgcggaactggtgcaggttggcgattggaagctcaggcaggcgaacttaagaatgaaacgggtcaaaccctgggcggcagcattgtattggcgggtgatatcaaagcggacgaaaccgataataatccggcagcgctcgcaacaaatcctgaattagttctggcaggtagctcggttccaatctggcaagcggctaaagatcaaggacaaggcagaaacacctcattgttcacctccccgcagaacctactgaaactgaccaaaaatgttaaggcctatgcaggtaagtatcaaactgcgattacctggaccctgacaaatgcgccgggtaactgattatcaaacgtcagaagagggacagtgatcttcgactggccctcttttgccaagtttaacgctgaataattggttttttagccaaggtttgcttgaaaaaggaggtgctaaccgatgggatttagtacgtggcgtttttggatcaagcttgttgttttaatgggcttcattggcttgagtagtgttgccgtgtatgaggtacaagcagcaacttccatcggcgaggtgatcgtgatagatgatcgaccacaacccgctaatcccattaacgcgcctggcagcgacattttaacaccaaagccacttaaaaatgatttatcgcgatcccataaaccgatgccgcgtcgcctaccgcaaactggtgaaaaccgtcagcagggtatgttaccggtgattggcatgatgctgttactcatcaacatcatgggcctgagcttctggcgcgggcgaaaagacaagggggatgaaaatgaaaaagcaaatccttagtcttaccaccttgttaatagcagctggaatctcaacagcctatccggtagctgcggcagatgacttagggccaaaatcatccgtggctcaattgacagttgatccaggcaatatcgttttacagcaagttcctgacttaaattttggcggaatttccgtttatgaaattgttagcggacagttcacaaagcatgcgttacgcagcaataaggttaatcaggggccggttaaaaatagtacgaatgctaatgacggtaacgcgtctgggttgttgcaggtgggtgattatcgtggcaccagcgcaggatggacgttaacagcaaagatggacgcgctaacggatggtaagggacattttttggaaggttatattgatctggtggggacgaatccgacgacgagtaatcctgatttgaatgccgttcacccagcaggggcccaagcgccgcggttgaagtttgccaaagatcaacaaacgcctgagacggtggtttggcaggcagatgctgcaagcgcgactagtaccgggcaagggcagggtaataatcaggtgactattggcgctggtacggagttgacgttggtttcaagcccgatcaatgttaccactcaagtaggcaggtatcaggcggcaattacttggacacttgccaatgcgccgcaaccttaaaccacatcaatgcgtttaccggtgcagaagtctgcgtgtaagaaccttggtcgcaatggtcaaagtgcgaccatcacgcccaaggccacttacactccggcttctaaccgcgctggttcacgctcatcataacgcgttcaccggtgcagaagtctgcatgtaaggaccttagacgcgatggccaagagcttgccatcacgtttaaggccacttacactccgacttctaaccgcaccggttcacgctcactttagaaaggagtgacgatcatgaagaagtgcggctacctggttacttggttgggcttgctggttagttttttgatggtggccccttccgtgtcggcacacgccgcggctgggtggccgtcatcgtcagggtaccccgcaccgccatcattttctgatgttaccgggctctttgaaccaactcaaaaagattcaagtttgattatcgattctgcgacgggcagtgcggtcggaatggaaattaataaagatgctcctaaccaatccggtgccatctggagtacggcgcctatgtttgacttggacaaagatgcgtcatacaccatgtattattatctgggtaataaaaccacaattggtgaagggatggcgtttgtgctggcagctagaccagctgcaccaaaacaaattgacccatcatcgcttggtatctggggtgtcgatcatttacctgcaggcagcacctcccagcaaatagctaatacagcattaccaaatagttttgccttatatgttgatactcggcgtaatggtggtgatgctgcaggtggttatgatcaatatagtgcttataccgattactattttggcgcgggctatccaggacaagccaatatgtatcgaatttctaatccttattggatgtcgtggctatattttaaaggcgatcctccttttaatggcgtccaaaccggaattggccgacagaatacccttgcatcaacggcggcaaacggcaaatggcatcaagtgaaaatagactggaagaaggataaccggggaggcggcacgctaacttatactgtcacggttcagaaaagcaatggcaaaccctatgtcttttcggagaaagtcacttggacaagtgctgatattcaaaaatactttgcccaaaatgcagacgatccggttccgcggcaactttatttaggtttcaccggtaccaccagtaattactatgaaccacatgtggttgctatcggtgctttaccggaagtggcgaaggttaagggaacggttgcgttaatgcgaggcgcggaaacagttgatgccaacacgcatttgaaggtagaagatgccattcattatgattatgtggtggacgtccaagcaactatgcaagcagcatggcctaccaatggcaccatcaccatggatgtacccaaaggacagtattttgattatctcaaagcagatggaacgccggcgcaaccaggcgaccagctgccgataacgcttacgattggcagtcgcacggttaccgttcaaggaaaagtgcagagcgacggcaatcggattgtcgttacgcaaatgccgtcagttgcggccggaaccgcagccaaattgcaattttcgctaccggcgcgggtaaagcatcacggcttgctgaaatcgacgctgtttcatgataaaccaatcggaacggtcagtggcgacgggcaaacttatgatttaaaaacgcctgccggtaaagatgtgttggagtatatccttgatccggaaaccggtgatttaaccctggaaaaagtgccgagttttatttttgaactcaaagatggcgcgggtggttatcgcaatccgaacgtcatggacatggtgaacggtattcctaatcccgatacggcatccccgaatcagttagaaacaggccagtggttgaccaatcagcatggactggagccagccaactcgacagggaaagtgttaagcatcaaggatacccgaccgaccaagcaaggctggcatttgatgatgcaactgacgccgtttacacttgtcgggcagccgtatgttttaggtgatcatggtagtcagcaaggtggcaaagcaacgctggtcttggcggatcgaaccgccaccggaacggacaaagtggctacaatcagagataacaacaatgcaaccctggtgaagaatatggcagcaggcggtactgattggacattaggcgcacagaccggcaatattgcggcttatctaggcattgagcaaactgctactgctaaagccggacaatatcaagccaccgcaacctggttattaagcaacgctcctcagtgagtcgagtaagcatcgctgattagaaaaaaggatcctgatctgcagtgataatcactgcagatcaggatccttttatatccaaggtcaaggtgcttttttggacgcggttaaagacttttctttcgcgaaagctgccggattaagcggcgctgcacatgttgcagcttattaaacggcagggcttgcaacaaggtgtttaacacgataagaaaaccacccagccactctgccggaccaaacgcaatgtgcaagcgggtgactgctagtgtggtggctgtcaatggctcaaacgcgctgagcatgcccgttgcgactggtgaaatgtaatgcaagctgcctaaaacgagcaggtaagcgaacatggtgccgaaaattacgacaaaggcaatggcaccaagattaggcaatgtcagcacaggattgcggcgtagtacatattggggcaaaaagggcaaactcccgagcagcatggaccagccggtgactgcccgcgcgtcatatttggcaagcaaggtgcgaggtaacaacgtgtacaaagcctgactcacgccggccataattccccagaagaccgcagccggtgccagactcagactggtgagccgtccgcgcgttaccaacaagtaagtgccgatcagcgcgagagtaatactcacgaaatcaatgcgccgcggcatttggcgggtagcaaatgcgacgtatagcaagataaaaactggccccaggaattgcaggatcgtggctgtggctgcattgccggcactaatggcgagaaaataagtcagttgggaaggcaccatacccagaaaggcgaagagaattagcaacatggcatcatgccgatttttccaaatagtgcccagttgccgtaagtctttgagcgaactccagataaccagcaataatccggcaaaaaataaccggatgccgactagccataacggtcgcaccccggcgttggtaaataacatttgggtgaatataccgctagcaccccaaaagatggcgccaacaacagcaaaaatgacgccttttagtttctgatcattttggttcacaaggtgggtttcagtgcgcgacatggcgggtttcctttccaaaataaactatccagaccattctacgcaaaaagctgctacttggctagttcgtgccttgttgatcaaactttcgaacaagccaaccgttaaatcaggccattaaaaaacctcgcaaacacgtcaagcgcatttgcgaggcaggtttgttagtcattttcagtattaattctgagctcatagcgtaagttggtccgatagaaatgtccgaggagtgccccgatagaagcgcctaaaataatgaggcatagcgggaagagccagctggccagaaagccgccgatgaaaatgacggccattgccgcaatcaggccaatggcgatgctgacacacccaaccgcaccaccgctaaagttggcattggcagaatagacactggcaaatggaaattggccgccaaccagtggccagcccatcatgagcgtgaagccataagtcaacacgatcacactaatgccggccaacaaggataaccaaccacccatgatggttgtgaccaaggtgattagcaacagtggcggcaggaagagtcgggcgaacatggctttaaccacgccgcgtagtaataagccgtgggttgtgaacggaacgtattggaaaaccgccatcgcttttggctgacttgagaagcgtaagttaaccagcgcaggagccaatgccacgatcacgcccataccggcatatgcaatatagtgctgggcagttgcaaacggcatatcgcgaatctcggtactgataaaaatcaacggcagaataatgccatacgccagctgcgggtaaacgcgtaacttgtaatcacgttcgctaccaagcacccgccagcctagtgtgaaataagttcgctcatccccgggccgggtcattaaagtactaatgccgcggaaccaccaaccaagtttccgggtacgtgcatcgccttgattcaatttttccagataggactcgaacgcgccagaataatgtaagaagacgagtgtgagaacgccgggaacgacgatacttaaaatggttaatacgatacttaataaattcacttgacccgcaaaaagcatcggcagtccggcaaaccatgctggcactgctagcaagtatacccaactgaattcaggagcgagtgacaggttgactgacgacattccccgcggtaataaattaggtaactgtccgccaacgtaaatcccgatcatcaatagaatctggactaagttgagcatgttgcgtaaccgttcgccatcgaaatagcgtaataccagtaaataaacaaataaggcgatcactaaactgaggataccgcttagtatcagtcccaacagcccacccacggctaccagtggtccaaagtgaagaccggtgatgacaattcccggaatccccattgctaataatgtgatgccaagatagaagcaaacattaaggatgcgcgcaaaactcaaagtgcgatcattgaccccgcgtgaagcaaaaacggttcgatcacgcggatcaagaattaaactcgaataagtggttaggatgttcagaaaacttgttagcagttgaacggagaaaaagattgtgaacagtgtcaaagccgaggccggtagaaacatcatcaggccaataatgaccccgaaaagcagattccagagaaaaccggttctcaggctggcatctttaccgcgcttacgctgactgaaaagactgcccatgccacttggctcgcgggcggccagtaaatttttggtggccaaaatgagccgcaactgatcaaattggataccgcgtttttccagcgccggggcaaagcgatttagccaagcaaacactttgggtaatggcatggcggctgtgttgaccggttcggcttgcgctttattcagccgtttcattagaatcaccgcctgtcacaatatccacgaatgtctgggctttttgaccatgctcggcaaatccggtcagatcgttaaacagctgttgcaggttggtatccgcttctttagcaagggtcttaaacggtccatctgcaaccaccatcccgtcattaagcaagatgatgcgatcggacaatttttggacaacatcgagaatatggctcgaataaaaaattgtcttgccgcggtcgcgcaggttttgtaaaacttcttcgatgacgagcaccgtattggcatccagaccattaagcggttcatcccaaaagagtatatccggatcatgcaatagactggcaatgatcagcaccaattgacgcatccctttagaataagaggaaattcgccgatcgaatgcatctttcaagttaaccagttctgctaaggcgaatgctttttgctcggcatcggcggcactgagaccatacagttgcccgatcaggctgagatattcacgggcagtgagcgcatcgaaaacatcggcactttccggtacatagccaatgcggcgtttgtaggctgtcgcattaggtttgagtggttgaccgaacaattcgatcgtaccggcatcaggctggagcaagccgagcatcattttaacggtggtacttttaccggcaccattaggaccaatgtaaccgacaatgttgccgggggtaatcgagaagctgagatccttgagaacctgtttagcgccaaaacttttcacgatatgattcaatgaaacaatgggttctgccatcataatggcctcctttagtcgggcgttgttatgtatgtatgtcatcggcgttagtcaatgatgtgatcgaaaatggtacggcaatgcttgcgctgattatgacagaaaaaattatgcgtgtataggcaaacgacttatttataacgtatttttcgggtataaaaagaacactgctgagatttagcagtgttagataaatgcttagacttctggactagtccacaataaaggctgattaaagaacataaacgagcttaactattaaaccgtttgaatagtggacgaagcataaagtacaggataggcacgataatcgctgtggcaatggaattgatgaccgttgcgggaagacttaaaaaggcaccaacaaccgcggtttttaagatggttccgaccatgagtgcttcgacgataccggttaagtaagaagtgacgattttggttagcccggcaacaatggcaatggtgataatatactgcggcttgtcctgatgcttgaaagccttaaccaacgcactgacaacaatggccatgacgattgcttccaaggcagttagccatgaggtggcagcataaccgttaagcaaatcaaagccaccaagaccaaccacagccgcaaatccgccaagccgcccaccaagaaataaaattgcgagcaccatgagcggattgccaaagtgaataaacggccgcccgaccatcgcagggatgggaatacgcaaaagggagatgccgatgtaaataatggcagcaaacaagccggtaaagataatgtttttcaaggaatgtcgtgaaacttgcatgggaaaacctccaaaaaaagtgagcgcgagccggcgcggttagaagtcggagtgtaagtggcctcaggcgtgatggccgggttttggccattgcgcctgaggtccttacacgcagacttctgcgccggggagcgcgttataggaaagtaagcgcgagccggcttctgcgctggcgaatgcgttatggtggaatctagtttataaaaaataatgccacaatagccgaaatctctacggcagttctttactaatagccgaaatgaccccagttaaattcaagccatatttgggattggtattcgtagccaaagtggctttaatggcaatttgcgcggcaatcatgccgatcgctgcagcttgacgtaaagtttgtccttttagcaaggcgcttgccaaagcagcggcgaaaagatcgcctgtgccgaaataatgcccgggttctttgggctgagcgagtgcaagtgggccaccttgtgcatccaccccgataacggccacttggttatggtacggcacgccggtgattaagacggcactgttgaattgggtgtaaagacgtctggccaaagcgctcaccgctttaggatcggttggtgcagttaaaggttcttccagcagtagttgtgcttcagtcacatttggggttaaaacagtggctcgctgcgctaatcgctgcatggtagcaacatactgtgaatcaaagcccttataacgtttgccatcatcgcccatcaccggatcgatgaggataaggtgagattggaacttaggcagccaacgttcccattgatcagcagcgccttggcccaagtagccgaggtagatcccgtcaggatttagttgcagttgttgccaatgtttgagaataccggacatttccgaactaagatccagataggtattcgcgccgagtccgccggtgtggctggaaagcaaggcagtgggtaagacatacggcgttaaacccaagccggccacaagtggtaaggcaacgcccatcgaaacctgaccgacaccgcaaagatcctgactgataatgatacttttagtcgacaaatgaatctcctttctttttaactagttgttaactttgagaatggcgaaattatggcaatttgtcaaatgaaatttaatcattctttctggtctcacatcattattcggctaactgggaatggcaaggtttggtcaaaaatcatttggactgtgcatcgatcctgagtcattttgaaatgaaggttgcttaaacgttttcccgcttgtgcacaaaacccgttttctttgcgtgggtttaactgaccacggcaaagaaaacgggttgcaaagtgtgtgctcttggaagattaagcattacgaatggtctgagtagcggctgcaatgcgtttaacgacagtcgggttgtccatcgtgtaaatgtgaataccatcaacgccatggaccagtagatcaatgatttgatcgatggcataggcgataccggcatcccgcatggcttccttgttaccggaaaaatgctgcatcatggcgacgaactttgggggtaagtgaacgcctgccattgttgccatgcgctcaatttggtgttcattaatcaccggcataatcccggcttcaatgggcacattaatgccggctaatgccgcacgctcacggaattgatagaaaacctgattatcgaagaaaagctgactaatcaactggcttgctccggcatcgactttttccttgagatggcgaatatcgctcacaacgtctggtgactcgggatgcttttccgggtaacaggcgccgacaacatcaaagtcgccaacttggtgaatgtgttcgattaaattgcaggcataagggaagtcttcactgacgcgtccggattttgggatgtcgccgcgtaaagccaagatgttgtcaatgccggcttcctgaaacccacgcagctcagcatcgacttgggcgcgcgtgagttgggcagcaggaagatgggcaacgggttcaaggttgaattcatccttgatcaacttagccacttccaaggttcccatgtgcggtttgttgccactagcaccaaatgtgacggaaacaaagtccggatcggcggctttaaccgcgtccaaagtgttgaggatggggcgcatggcgatgttcgtcgcatttttacgcgggggaaacacttcaaatgagatgacttgatgatctttaaagcactggctgattttcatgagtaagttccttacgcacttgtttagcagcggcaaccatgttgatgaggctggccttggtttcagggacatcgcgagtcttgagaccgcaatctggattgatccaaacgtggtcagcaggcagccgcttgagaatttcgtggataatatgcacaatttcgtctttagacgggattcgtggagagtggatgtcgtagacgccagggccaacatgagtctggaagtgggtggcttttagaatatccaaaaggctaaagtcggagcgggccgcttcaaaggagattacatcggcatcgagatcatcgattgctttaatgatgtcgccaaattgcgaatagcacatatgcgtgtgaatctgggtttccggtttcactttgctggcaactagccgaaatgccggaactgcccagtccagatatttcggataccagtcttttttacgcagcggcaagttttcgcgtaaggccggttcgtcaatctggataatcttaatgccgtgtttttcaagatcgagcacttcatcttccaaggctaaggcgatttgttccacactggttttttgacttaaatcttcacgcgggaaggaccagttgtaaatggtgactgggcccgtgagcatgcccttgacgagatgatcggtttgactttgggcaaagacggtttcggcaacggtaatcggtttggtgcggacgacatcgccccagataatcggtggtttaacgcccctggtgccatagctttgaacccaaccattatcggtaaagcggaacccgccaaagttttcgccaaaatattccaccatgtcgttgcgttcgaattcaccgtgcacgagaacatccaggccaatttcttcttggaatctgagccattcgatttcttctttgtggttgaaggcggtgtattcgtcttcggtaatttcgtggcggcggaacttggcccgattgcgccgaacttcagctgtttgggggaatgagccgatggtggtcgttggcagcagcgggagtttgaattcttttgcttggatagcaagtcgggttttgcgctcaggcgtgcgtttgtaatcttccggcgtcaaagcggcaattttggcattcaaggctttattttcctgataacgcggtttactgaaaagggcaacgttggcttgataagcagcatgatccgcgccggtgtggaaaatggcatctaactcatgcagttcgttgagtttttcttcggcaaaggccaaatattgcttttcttcaggtttcagatgggcttcattgcgaagtgtatatgggacatgcaagagtgaggtcgaggtgcttaataccagcttgtccgtaatggttgccagttgtttgatcgttgccaaggcatcggcataatgtgtccgccaaatgttcttaccattcacgattcctgcaaataaggtggcgtgcgctgggaagccgtgttgtttgagcagatcaagattggcatatccttcgacaaaatccagcccgaagccgtcaaatggcaacttttgaatacggtcaaacgaatcggttaaatcgccaaagtaagtctgaaccaggattttggtagcctttttttgggccaaaattggggtataaagccgttcgaataaagcaaggtcggcatcggtttggtcataaaccagcgccggttcgtcaagttgtacccagtcagctccagcttgatgcaagcgatcaatgatggtcgtgtacgcagaaatcaggtcggcaacaaagtcatcaggcacaacatcaatgaagcgagacaatttcagtaacgtatacgggccaatcaaagtcgggcgcctgttaatgcctagcgctttagcttcttcaaattgcgcgaaaagctgccaatccgttacttggatctgggtatcgtgatcgaattcaggtaccaagtaatgatagttggtgttgaaccactttttcatcgccagcgctttaacgtcgccggcctctccttgatagccacgcgcttgggcaaagtaggtgtcaagcggtgataagttcaggtcttggtagcgcttgggtacaatgtttaaaagatttgcaacgtccaaagtgttatcgaagaatgaaaagtcaccggttggaatctgatcaatcccagcagcttgaatggtttcccagtgagctttccgcagtgctttagctttttcctgcaagtcttgggcagaaatttgatgcttgaaatatttttgggttgcaaattttaattcccgatgttcgccaatgcgtgggtagccgataatcgttgttgtcataaaaatcctcctaggtaaatgagcgtgaaccggtttttgcaccggtgaacgcgttaaaagtcagtgctgtggaaacgaatactgatcagctgtgcaaattagccaaccatgtcagcttttatcaaaaaccttgccaaaagatgcggtcatttaggcgtacggcacatttgaaaataaaaaagccgtccttggcccagacatagcttgtctgggccaaggacggcttaccgtggtaccaccttggtttgaaagctgctcacacaactttcctcaatcagtccgacagtattcactgtgagacctaacgcaataatgggcgtccccatgtgtgctttgccattgctcggcacacctgcatcaccaagaccatattcgctggcatttttagatgtcctttcaccaaaatggacactctctaaacaaaaaatgaacagctactcatctttccgcatttcaatgttgcgactagcatactgacaattgtgatagttgtcaagttgtttattagttatatagttatcaatttggttgtcaattaagaactcccaacagcgatgtgattggttaccttgttcgaaaattatgatagaaagcaagagctggcggagcagtggcgggctcagtggtgaaattggtcttaagcggagtgggcttctccgctttagaccaaggccgagcttcgaaaccgcggtctttgcgggtttgaagtcgtgcccaccactctagctgcgcggtcgccagccatcaccaccgcggagccagctcggagtatcggaaatcacttaattagagtagaaccgagaaaaagttggcacttactaaccgggcatttaccctgacttgtcttccattttgcggtaagctattaggacaagtcatcggaggaaaaagaaatgaaggtactatttccatatatcaaaaaatatcgttgggacgcgatctggtcggttgttgcgatttttgtcgtggctttcgcgacgctttggcagccgcatttgttgcagattatcatgaacgccattatgaaaaatgataagcaaacggtctgggtcaatggcctgtatttgattgggctagctattgtcggcattgctggcggaattgtcaacacgatctattcggcacgtgtggcgttaggtgtggcgacggatttacgcgcagacgagtatgccaaaattcaaagcttggcttatgcggatgtggagaagttttcgccgtccaatctggttgtgcgcatgaccaatgatatcaatcaggttcagcagattatcatgggatttttccagcaggttacccggattccgattctctttatcggtgcggttattcttgcgattgtcactttgccgcaattgtggtgggtgattgccgtgatgatggtgctgttgtttggcgtcagcttcttttcatttagtcatatgggcaaatactttggccgcatgcagcaattaattgagcgggtcaataccttggcgcgggaaaacttaatgggcatgcgggtggtgaagtcatttgtacaaggggctaaccagacgaaaacatttgccgaatcaagtgacgaaatgcgcgatgtcagtgttaagatcggtaatctgtttgcgttgctgatgccagccttctttctggttgccaatttagccatggcgttgagtatctggctcattgggcaaaatattaccagtcagccgagcaatttagcggccattaccagttttatcaattacctgatgcagattttatttgccattatcaacggcggatttatgctgacgtttgcatcgcgggcgctggtttctttgcggcgcattcatgaggttatggatactaagccaagtatgacgtttgtcgacggaccgcaacgggatttagacgggtccgttgagtttgacgatgtgacttttacgtatccaggtgatgaaaagccgacaattcgtgatatcgattttgcggttaagccaggggaaatgattggcatcgtcggggcgaccggtagcggtaaaacgaccttggcacagctgattccgcggttgtttgatccggataccggaatcgttaaagtcggcgggcatgatgttcgtgccgtcaccgaagcggatttgcgcaagacggtcgggtatgtgttgcagcgctcgacgcttttttccggcacgattgccgaaaatctgcagcaaggcaatcctaatgctgatttggcggcgatgaagtgggcggctcgggtggcgcagtcggctgaatttatcgaacggctgccgcagacatacaacgcggaagttgaagaacggtcgtcgaatttttccggtggccagaagcaacgcctttcgattacgcgcggggtgatcggtcatccgaagattttgattttggatgatgcaacatcagctctggacgcgcggtccgagaagttggttcaagaggccttggcgcatgaattgaagcatacaacgacgattattattgccgaaaaaatcagttccattattaaagccgatcgtattctggtgcttgatgacgggcggttggttggcagtggcacccatcacgaactggtgcagcataatcgggtttatcgagaaatttatgccacccagaaggcattggaagagggggtgtagctcatgaaagacttgaaaaacgcaggtaaattttacgcgcattatttgcgaccgtactggttagaatttttgattacaacgattttaatcgcgatttctacctgggcgattgttgtcgcgccgacatatatggggcgggcgattgaagaactgaccgtgtatgtgcaacagtggatgaatccggcgacgcgcgctcaggcatcgtttgcggcgtttaaccacacgttggctattttcgtcttactgtatgtgattgatgcgacctctatcttaatttcgagcttactgttgtcaaaaatcagcggttattccactggaacgatgcgggttggattgtttcggaaaatgcaacggatgaaagtgcgctattttgacagtcatagtgatggcgacattctctcgcggtttacgagcgacctggataatattttcaatgcgatgaatcaggcgttgattgaaatctttctaagtggcgctcagtttatcgggattatttggatgatgttcacgcagaatgcgacccttgcgtggattacgatggcctcaacgccggtcgcaatcgggttatctgccttcgtgatgcatcaggcgagtgtgtcggttgatcgccaacaagacgatattggccgactgaatggctatatcaacgaacagattaccggccagaaaatgctgattacgaatgggctacagcaagaaagtgtggcgggcttccaaccctataacgcggcggtgcgtaagtcgaatttacgcggccagatctggagcggcattttgaatccgttgttgatgggtttgtcgttgttgaatacggcgattgtaattttcgccggatcctggctggcgctgaatggctccttgagtcaaggggctgcgttggcaatggttgtggtgtttgtcaattatgcccagcaatattatcagccaattgtccagttgaccagcttattcaatatgatccagttggccatcaccggcgcgcggcggattaccgaagttcgtgaacagccggatgaagtcgatccccaaaatggccgtacccttgatggtctgaaacatgaactgctgattgataacgtgcattttagttacattccgggcaaagaaatcctgcacggggtcacgatcaaagtcgaaaaaggcgagatggtggcgttagtcggtccgactggcagtgggaaaacgacggttatgaatttgttgaatcgattctacgatgtggattctggcgtgattacttttgatggcgtggatgtacgcgattttaaattggcatcactgcggcaaaacgtcgggattgtgttgcaggatccgcagctgttttccgggactattcgcgataatattcgcttcggtgatccgactgctgatcaagcccgggtagaagcagctgccaagcaagcgaatattcatgacttcattatgagtttgcctgatggttatgatacgtttgtgtcggatgagcaaagtgtcttttctgccgggcaaaagcaacttatgtcgattgcgcggactattttgactgatccgcggctattaattcttgatgaggctaccagtaatgttgacacggtgaccgaggctaagatccaagcggcgatggataatgtgattcagggtcgaacgagttttgtcattgcccatcgtttgaagacgattctaaatgcagacaaaatcgtcgtgttgcgggacggccggattattgaggaaggcaatcatgaacagttgttagcgcaaaatggcttttatgccgagttatatcacaatcagatggtctttgaataacacctttaagattccgaactttttcggagtcttttttattatcattcgtacataaaacggttacagtggctatcttaaattcgaatcttatgatacgcttgttatatcagaacgatggccgacattgaactgataaaaaagcatcgtggaggtaaccaatgagcaagcgtagatatttagtggcacttggcggtattttgttgcatttgatgatcggctcggtatatgcgtggagtgttttcaccggtccaattgctaaacaaacgggctgggcattatcagcagttacgattgcgtttagcattgccatcttttttctaggtatgagcgcggcgttcatgggccgactggttgagcgctttggaccacggttgacgggcaccgtggcagcgctcttgtatggctcggggattttgctaaccggtttagccgttcagattcactcgttaccgttgctttatatcggttatggtgtgattggcggtctgggcttaggtgctgggtatgtgacgccggtttcaacgattattgcctggtttccggataaacgcgggctggcaaccggcatggcgattatgggcttcggatttgcggcgatgctgacgggtccagttgcccagcagctgattgcaaatctgggagttgtcgcaacaatgtatgttttaggcgcggtttatatggtaattatgctgggatccgcacaggtaatccgcaagccgcatcctcatgaagtaccggcagccgatcttgccaaaagtgtgagtctgaccgggaaagccatgaaggcgaacgaagcagtcaaaacgcgatcttttcggtatctctggctgatgttttttatcaacatcacctgtggcattggcttagtggcggtcgcatcacccatggctcagcagcaaaccgggatgtcggcaaccacagcggcagtgatggtcggggttgtcggcttatttaacggtttcggccggctcgcatgggctacgttgtctgatttaatcgggcgcccactgacttacaccctgatctttatcgttgatgtcgcgatgctggcaggtatcttagtcttgcgttcaccactgctttttggcatcgcactttgcttgataatgtcgtgttatggcgcgggcttctcggttattccagcttatcttggcgatgttttcggtaccaaacaactcggcgccattcatggctacgtactgactgcctgggcagcggcaggggttgccggaccaacactgctgagctttagcgagcagtacttccacaactatagcgtcagtctgatgatctttattgtgcttgaactgattgccttgggattgtcgattcgtattcggcaccagtttgcggacgcccaagttaaggatgttacggaataaagtttggcagtcatgacgtacaggttaacttaaggcattaaaagatggttaatggaaaaggccttaagagcgttttcgacgatgatacttaccgtatatataaaatttcatgtatcgaaatgataagcaaaatttgatccacactcaaatgtgggtctttttttgacctaaaaacgttgccatatagggattgtgaagcttttctacatttaaatctaagcttttaagcgttttttgttgacatacctgtacgtacaagtagaataagcattgtaagtgaaaacggttactggaggaaaaacaatgcgcaagtacgatgctatctatcaggatctgaaggaaaagatcgaagcagaaatatatgctaccggctcattgctgccaagtgaaagtgcgctgcaagacatgtatcaggcatcacgcgacacggtacgtaaggcgttgcggctgcttaaggatgatggctttattcaatcgcaaaaaggcaaagggtcaacggttatcaaccggcaggaatacgtgtttccggtttccggcgtggtcagttatgccgaattagccgcgcaatttcacttacagacgcgaacggtggttttaaccaatcactttgcaacattgcccgccaagtcgttcaaagatgtggatccaacggtagaagtcaaacagatgcgcctactgaagcgggtgcggtatttggaaaatgagccagacatcattgatattgattacctcgatcctaaagtcgtgccgccgattccggagtcggtggctaaagactcactatatgcttatcttgaaggaccggtggggttgaccattgcctatgcaactaaggaaattacggttgaagcggcaacggaagaagatcaacggtatctgaaaataccaccatctgcagtcgtggtcgtggtacgcagttgcagcagtttgacggacaccacgaagtttcaatatacggaatcacgtcaccgggcagatcgttttaagtttcatgattttgctcgccggatccgaccgtaaacgctggcagttcttacttttgttaaaagcaaggacaaggaggttatgatggcgtttcataagaaagttatttatcagttatatcccaagtcgttttacgatagcgatggtgatggtgtcggcgacttacgcggcatcattgaaaagatcgattatctcaaggcactgcacatcgatatgatctggttcaacccattctttgtgtcgccgcaatatgacaacggctatgatgtggctgattatcggcaaatcgatccgcggtttggaacgatggctgattttgaagagttggcgcaaaaacttaaagctgccgggatcgacatcatgttggacatggtgctcaatcataccagcacacaacatgtctggttccaaaaagccttagctggcgacaagcactatcaggattattactacattcgaccaccaaagccggatggcagcttgccgactaactgggagagcaagtttggcggtccggcttgggccccgtttggcgacactggcaattattatttacatttatacgaacgtcgccaggctgatctcgattggcataatccagccgtccgtcaagaagcagccgctattattaatttttggcgcgccaaaggggttcacggtttccgctttgatgtgctcaacgtcattggcaaggcaaatcagctggttgatgcgccaccggaagtcgaaagcaaaacattatatacggatacaccgattgttcaggattatatcaaggaactagccgccaacagttttggccaggatctaaatagcgtcacggtaggcgaaatgagttcgaccaccattaagaactcaatcgcctataccaagccggaaaatcacgagttatcaatggttttccaatttcaccatctgaaaacggattataagaacggtgaaaagtggagcaaaatgccgtacgacttcaaggcactgcgcaacattttgcacacttggggtcaacagttagatcaaggcggcggctggcaagcgcttttctggaataatcacgatcagccgcgtgcgcttaatcggtttggtgatgttggccaatatcgcgttaaaagtgccgaaatgctagctgctgcgattcacctaagtcgcgggacgccatacatctacatgggcgaggaaatcggcatgaccgatccgcattatcattcgatggccgattatgtcgatgttgaagccaagaatgcttatcaggcacttttgaaagctggcaagtccgaaaaagaagcttttgccatcattttggccaaggctcgggacaatagccggacgccaatgcagtgggatgacacggccaacgccggatttaccacaggaacaccgtggttgcggccaaccaatcagcgcgaaattaatgtcaaagctgagctggcgcatggtgaaattttccgattctatcaaaaattgatcgcgttacgtaagcagtatcaagtgatcagcaatggcagttatgtgccttttgggactgaaattgatcgcttgtacgcttacgaacgggttgctggcgatgcccacttgctggtactgaataatttcagtgataaagccattacggtaccgctaccgccacgtttccagcatgcacgcgttttgataaccaatgaagcagatttaacaccaactgcaaccatgacgttgccaccatacgcaacgattgcattgttgcagtcagataagggggaataagcaatgacaaagaaattgcacttaatggcgccggtttccggattggcgatggccattaccgatgtttccgatccagttttttcacaaaaaatgatgggtgacggttttggcattgagccaaccgatggccaaattgcggcgccggtcgatggacggatcatgatgattgccgataccaagcacgcaatcgggatcaaagccgatgatggcgccgagttattgattcatttagggatcgatacggtcgaactcaaaggcgcgccgtttgaaattgatacggcgatggatgcacgggttaaagccggcgatgtgattgggtccatggacctggatgcaatcaaaaaagctggcaagaagaccaccgtcattgtggcgattaccaacacgaaggaagtcgttgatcagctggacgtgacgcccggcgaagtcaaacgcggcgaagaagttgcggtgatgacacctaaagcggccgcggttgaacaagcaccggcagcaccgaagaacgaaagcaagtatgcggccacagcgcggcaaatcattgcggatgtcggtggcgcccaaaacgtcaacagtttgattcactgtatcacgcgcttgcggttctatttaaaagatgaacaaaaaccggatgatgacaccgtgcgtaacattccgggcgttatcgatgttgcgcgggcgaatggtcagtatcaggttgtcattggccaagccgtgacggatgtttacgatgaagtgattaaacaactcggccccggttattcgaatgcagaaggaactgcgaaggccattcaagaaacccaagcggaagctaaagataccagtgcacttggcacgatcaaacgttgggcccaggcattgatcggcaccattaccggttccatgattcccgttatcggactcttagccgcaagcgggatgttaaaagggattttgaacattttaacaacatggggcggtctgaaaaccacaaatccaacttatgaaattattaatgcgatgggcgatgcagccttttacttcttacctgtcattgtcggcttcaccgctgcccagaaactcggatcggatccggttattgtcggaattatcggagcgttcctgatttatccgtcaattgctaaaatcgccactgctggcaaagtgaccggcacagtgttaggcatgggcatcaacgcgaacttcttcggcttgccggtgcacattgccaattacacgtattccatcttcccgatgatcttcgcagcgtggatggcggcaaaaatcgagccgtggattaagagttggatgccgctggtactgcgcatgattttcacaccattagtcgaaatcttcttggttggtatgacggttgtcttggcggttgggccactgatcacggttctgtctaatggcatcacagctggtattcaggcattgctcagcttaacgccgatggtttccgatgccattatcgccggcttctatcaagttctggttatcttcggattgcactgggccgtcattccggtcatcaccgcgcaattgtcatcggcacatcccgagtccgtgctgaatgggatcgtatctatttccatgattgcccaaggtgccggtgcattggcagtctgggttaagaccaagcacaatccggccttaaaaggtctgtcaatttccgcctttatcagtgcttgctgcgggattaccgaaccagctatgtacggggttaacctaaaatatggccgtgtcttcatcttttcaagtatcggcgccgcaattggtggtttggtcaacggcttattaaatgtcaacatgtatggttttaccggcagtttcctaggtgcaccttcattcgtagcaccaggctgggctcacaatccgaacaacatctggtttttctggattgcatcacttgtcactttggttgcagcgttcacattggtttacctttttggttacaaagatgcggatgcgaatgccgcaaaagcagtacctaagaagaagcgtttaggtaaaacggttgaataatatttgataaggttaagcatgtgttcacttgagtaatcattcgtttaatgacgaaaacatggtttaacttttgtcttaagtaaaagcaccgatgccattttgacgtcggtgtttttgtttggattggtgacagtcggactaacaaaagatttgcggtgctatcgataaaaataacttgcagttggtcaaagattcgtgcacactaagaagtgttctcattaaatattaatttttatatggaggaggggccagaaatgtataaacggtacaaagatgtgtcgctgattctgaaaattgtgatcggaatcgtggttggggcagtgttaggggtattggtgccctcctggtcctttatcgatgttttaggcaagctgtttgttggcgcgttgaaggcaatcgcaccgttacttgttttcctgttgattatgtccgcaatttccaaatatcgctcagggtcgaaaaaccattttggcactgtcattgtcctttacttaagtgccacattactttcttcggtggcagctgttgtcgtttcatatcttttccccatcaagctggtgttaccgggggcgatgaagattgccgaaagtgcgcctaaggatttaggaacggttgtgaccgggttattgactaatgctgtggcgaatccgatttcagcgttggttgaaggtaattatctcgctattttgttctggtcgttgttgatcggttctggcttgcgcttgacgagtgccacgaccaaaaaagtggtaaccgagctggcagagaccgtcagctcagtagcgcaaaatgtcatccagtttgcaccgtttgggattgttggcttattgcatgaatcattgagtaagaccggcgttagaggggtcatggcttatggacaactgctgatcttgctggtggccaccatggtgtttgtctatctggtcgtttatccgttcatggtttggttgctgacgcggcaaaatccttatccgctgacgttttggacgttaaaagtcagtgggattccggcctttttcacgcgtagtggcgccgtcaacattccgattaacctcaaagcttcggaagatttgggcttgaataaagatagttatgctatttcgattccactgggcggctcagccaactctggcggggcggccattaccgtgtcgattatgaccttggccaccgctaatacaatgggcgttcatgtcagcattttcctcgctttgttgctttgtttcctgtcagccatttcggcaaccggcgtatcgggtattgccggtgggtcactgcttctgattccaatggcggcttcgctttttggcatttcaaatgatattgccatgcaggtcgttgggattggttttatcatcggtgtcgtacaagactcggttgaaacggcggttaactctgcgtcggatttactgttcacggccacggctgaatacgcggatgatcggcgtgaaggtcacccggttaacatgcgtgctgctgttaaggcggcaggcaaacagaagcttaagtccgctgcgccagtggcagaagatgataaatgattagcagccacaaatgttcatgaatgcttactctgttgataagtgccatgcatcgttagtaggcaaatagaaactgtctaagtgagtacagaccacgcttaggcagtttttgtttgcttaaaaaagcttaagatttggcggctcatcattccgcaaacttggccggcgagcattcaatgttgtgataacaaatgtcattaaaaacacagcgctttccagtcttactgaaatgtgctaacctatttttcatgggttttttaccaaaatacgtaaaaagagcataaacaagtcaacggaggttccaatggggaaagtatggcaacgattgtttcgaaaagaagatccaagtgtgtatgaagacaaagactcgcatttgccgcgagtcttgcgcgtgcgtgattttctggcgctaggcgttggtaccattgtctccgcatcgatctttacattacctggggtcgttgcggctaaacatgccgggccagcggtgtcaatttcttttctgattgcggcgctggttgccggactggtggcatttgcctacgctgaaatgtcagctgccatgccatttgccgggtcggcttattcatggattaatgttgttttcggtgaattcttcgggtggattgccggctgggcgttgttagctgagtactttattgccgtggcctttgttgcgtctggcttatcggctaattttcgcggcttattggcgacgatcggggtgaattttcccgcggccttggcgcatccttttggtactaacggtggcattgttgatttggttgccgtggtggtgatgctgctggtcgggattttgttgtcgcgcggcgtgtccagtgctgcgcgagtcgaaaatattctcgttgtcatgaaagtgctggctatcctgctatttcttgtggtggggttaaccgcgattcacccagaaaacttccatccgttcttcccggcgtatcatcttaacgcggatggcacaccatttggaggctggcaaggtatttatgccggcgtctccatgattttcctggcttatatcgggtttgattcgattgcggctaattcggctgaagcgattgatccggagaaaacgatgccgcggggaattttggggtcactcttgattgccgttttcttattcgtttcggtgggactggttttgttggggatgttcccgtatcaggattacgccaacaatgcagaaccggtcggctgggcgttgcgccactcaggtcacgcggtggtcgcaacggttgtcgaaagcatcgcggttttaggtatgttcacggcgctcattggtatggcgatggcgggatctcggctgctttacagttttgggcgtgacgggatgttgccgcatggtttagggaaattgaatagccgcaagttgccgaatcgcgctttggcggtgctcatcactattggcgttattatcggtgcgttctttccatttgcgtttcttgcccagctgatttccgcggggactctgatcgcattcatgtttgtcacgcttggcatttaccggctgcgtccgcgtgaggggcaggacattgccaagccacgttttcggatgccattttacccagtgttgccagcggttgcttttctcggatcgctagtggtctttctcggattggacattcaggcaaagctgtattcaggcgtctggttcctaatcggttgtgcgatctacttcctttatggcatgcgacactcggcattaaccaaaggctccgaagttgaaaaggagacggaagcactggagcaagccaagtcggacgagtaaatggctgtttgagctgaatgctggattacgacgggcagaataagcgtgtatggccaaagaattgataagcaaatgaaaaaatcggccttacggagacaaatttgtctgtctgtaaggccgattttgattgttattaccaatacccattggaaaggtactaaatgctggttattgcctaggcttcctgtgccttctttaaattatctttcaaaatggcaccagagtcagccaggcgtttgtggtcttccggatttaaatccagttcgatgatgcgctctaaaccatttgcgccgaggataaccggcaccccaatggaaacgccggataaaccatattcaccgtcaagatggaccgacatcgcaaatgctgcccggtcgtcattcaaaaaggcactggttaggcgagtgagcgaagcggcgatcccgtagaaagtagcacctttcttttcaatgatgccatatgcagcagttttgacgcggtggctgatttcagccaaatcacttgcttggcgatttttgggaatccagtcgagaatcggtttgccgccaatattggtgtaatcccaaaccggaaattcggagtcgccatgttcgcccatgatgtagccgtggacaatgcgcgcatccacattgtaacgcaagccgatttccgaacgcagacgggctgaatccagcgcggtacctgatcctagcacttggttacgcggcagccccgattcttccagcactaattccgcgagcacgtcgaccgggtttgaggcaacgagaataaaaccattgaaaccactggccatgatgttgtgagtgatttctttcatgattttggcattgatcgacaacagttccagtcgggtttgcccgggcttttgcgcaatgccagccgtgatcacaatgatatcggcgtatttgcagtcttcgtaactcgctgcgtagatattcttttgagacgtatatggtagggcgtctgaaagatcttctacatcgccttgaacccgcttctcattgacgtcaataatgcccagactttgaccaacgccggtcgttaaacagttaaaagcaaagctcgaaccgatagcgccgtcaccaattaaaataatatttccgctatgttgcatcctaaacccctccttgacaggtagccgcttcacgcaacgattggacgatagctgtgtccaaatcaatcataataggtaacatgtatccgatttcattgtaacagaggtgtaggctttcagcttgataaagacttaatctggctgagggcacatggagaaaattcttatcaaactgccatttttctgttaaccttaaaacaacacttgttaccgtttttggaaaggtgggtatttatgacttcagcaacagcttatgtcgaatcggttctcgcaacgctcaaacaacgcgatccgcaccaaccggagtttttggaagcagcgacaactattttaaaaaccgttgttccggtttttgaaaaacatccggagtatatacaagccaacattcttggccgcttggttgaaccggaacgggccattcaatttgccgtgccgtggcaggatgaccaaggccaaatccaagtgaaccgcggctttcgggtgcaattcaattccgccatcggtccatacaaaggcggcttgcggttacatccatcagtcaatttaagtatcgtgaagtttttgggttttgaacagatcttcaagaatagcctgacgaccttgccaatcggtggggcaaaaggcggggctgattttaatccaaaaggtaaatcggatgcggaaatcatgcgtttttgtcaaagcttcatgaccgagctgagcaaatacatcgggccggacctggatgtgccagccggggatattggcgttggcgcacgggaaatcggctacctatatggtcaatacaagcgacttaaaggggcacaacgcggcgttttaaccggcaaaggtctcagttatggcggctcattggcacgcacggaggctaccggttacggcttgatctattacacagatgaattactcaaggctaatggcgaaacgcttgccggtaagcaggcagtgatttccggtgccgggaatgttgccatttatgccgctcaaaaggcaaaagcgctgggggttaaagtgctcacggtttccgattcaaatggctacgtggtggatgaaaatgggatcgatcttgccaccgtcaagcaaattaaagaagtagagcgtggtcgaatcaaaacttatgccgagcgagttgacggcgctaaatattatgaaggttcggtttgggatgcaacgattaagtttgatctggccttgccgtgtgccacccaaaatgaaattaatggagcgcaggccaagcgctttaaggctgcaggcgtgatcgccgtggcagaaggcgccaacatgcccagtgatccggatgccattgcggcttatcagcatgacgacattttatacggtccggccaaagcggccaatgctggcggcgtggcagtctccgcactcgaaatgagccaaaattcgcggcgtttaagtgatagcttcgacacggttgacggacagttgcacgagatcatgcagcatattttcaaagccagtgccgatgctgccgccgagtatggggttccaggtgattacgaggccggggccaacatcgccggcttcttgaaagttgccgatgcgatgtatgcacaaggcatgtagtcggccggatctaatttggtctacaccactcgtggcaattaaccgatcgcaaataaatttgccagaaattcgaaaataaattaggtgtttcttgctgaacgtgttatactctgttcatggtaatacttgaacgggaaacatcatgtaacatgaatttcctttttaggattacggttgtctgttgttgttagttttgaaaaggagattcactttcatgcaaaaaggtacagttaaatggttcaacgctgataagggttacggcttcatcactggtgaagacggccaagacgttttcgtacacttcagcgccatcaacggtgaaggttacaagagtcttgacgaaggtcaggctgtttcctacgatgtagaacaatctgatcgtggccctcaggctgctaacgttaccaagctttaattcttggttcgttgaaaaagatccactcaggaaactgagtgggtcttttttttgtgtgagcgtgagccggtgcggttagaagtcggagtgtaagcggccttaagcgtgatggcccggtcttggccattgcgcccagggtccttacacgcagacttctgcgccggggagcgcgttatagaacgcaaagtcaaaccaaacaatcgcctacaaaaaaaccaatctccgcgcgttatcgcttattctcaaacctttcacaggcagccgaagatccccgcaaaaccaaaaaataaatcctcaccccaacgtccaccgccaaacactaaccaaaacccaacaagcaaacggcattgccgcaagaaacaaaccaataaacacaacccccggcgcgtcacccgtatccgcccaaaaatatgaaagtggcaacgagatggccgcaatgatgatcgcaatgagcccaagaagccactgaagccggtgaacgttacggttaacgagcttaggattgcgcactagttgccataacaacaccgcgcctgtgatgatacagccgattacgaaccaaccacctaataaaaccagtatgagaactgtcgtgattttagatgtgaatagtaacaagatggttgcccaaataccgattgccaagaatgctaaactaccaagtcctaagcaaagtggcaaaccaaaccgataaatacttgactggttaaatgatttattcatcttaaacgccctccgtttacctttcactgtaaacttctaaacgggcgagtttcgctaagtcgtgaattcttgtaggaaaagtaaaaaaacgcgaaccagaaatcaacaattgctgatttctggttcacgctaaactgggatggcgcgattcaattcatgacacccgatgaaggaatgaaccaccttactgaaggcgttgcgcttattcacctaaagttggctcatcagtgaattcatcgacaatgcggaaggtgacattttcattttctttcaacagtttggcaaccggacactcgtctaaagcctgggtgacaatcttttgggcttcttcgcgagtgtggcttggcatgagaatctgggcatccacaatgaatttgtagccgattttgtcacggacgatatcgacacgggtgcgtaattgggaatcctctgcggtgccttcgcgatgctgaacgatacgaatggtggcattgaaacaagtagacagtgcaaaggcgataaactgctccggattggtacccggcgcatcaatgagcgagctggaaacgcccagtgctaatccttggttgccttcaacataactttcaccaaccaaaccattttcgttacggacataggtatgatataaagaacgctctgccatgctatccatcctttctttgagctttcatcgtgagtataccatggaaccgcttaacatggtgttattgtggctcgcgcgcgcatagctttggattttcgtttatagcaacgggtgtaggcgaatcatctttgtggcaacctgatcgataaaatgttcatcgtgttcgacaaagagcatcgttggttgatattggcagacggccgcaataatctgatcttgattgtaggtatccagataattaagtggctcgtcccagatgtaaagcgctgcaggcgttgccagggagcgggccacttccactttcttttgctggcccatactcaaatgttcaatcggcgtggcaaaatcagcgcgcggcataccaagcttgcgtaagttattgagcaatgcttcgcgactaagctggtgggtttcggcaaagtctggaagggtaccgcggttatcggcatactgctggcgtaccagactcaaagatacgggcgccaactttaacaggccgcgactgatcccgttaaactgacccagcaatgcgcggatcaaggttgatttaccgctgccgttttccccaacaatggcaatgcgatcgccacggtgtaaggtgaacgaaatcggctcgaataacggttgatcaaaaccgagttgcaccttttccgccacaatcaattggtgctggtgggtcggctgcggattcatcgttaaaggatcgactttttccagatttttgagcagctgttctttttcttcgatttctttgttcatccggtgttccaggtttttactttttttcatggttcttgctgcgcgggcgctgataaagccgcgacccctatgaccgctatttttaacgtgccgatcgccgtaaatactgcgctctttattttcggcccagagtttcttgtcataagccgtttgtttgagccgactgatttcggtttttaaatgggtattttgggcaatttcggtttgatcctggcgcgctttttcagttgcaaacgtcgtgtagttgccttgatatagcgtgattttctggcgttcaatggccaaggtgtgatcggtgacagcatctaaaaaatcgcgatcatgactcacaacgatgaagccgggtttttgctgcaaataagctgctacctgccggcgactgcgcagatcaaggtgattggttggttcgtcgatgagtgcaaagccatcagtctggatgaaaagcaaagccaagcgcactttggtttgttcaccaccggataaatcagcaaacggtcgccaaagaatcgcaggatcggcgtgcaataagttgagttcgcgctcaagctgccactgggcgacatggttaaacgcctgagcagcatccaatgtcacctgagattcatcgagtgcttggggaaaatattgcagcggcagtggtacggtgatcgtaccgcgataatcaagttgtttttgcaataggcgtaacaaagttgttttgccgcgaccattacggccaactaagccgagatgccagtttgtatcaagatcgaaaccggcatcagtaaagatcggtgcttggccatcgtaagcaaagtgtagatgtttgatttggatggtagacatacagccacgtcctttccgggatgtgcctgtggtatcaagacgggtggtgctcggtgctttttgaaatcgggttgtgatgagcgtgaaaatgctggccgataacgcgccggttcacgctcacgataacgcgttcaccggcgcaggaatctgcgtgtaaggaccttaagcgcaatggccaagaccgggccatcacgcccaaggccgcttacacaccgattcctaagcgcgccggttcacgctcagataaaaaaaggtcagcccccaaaattaaggctgaccaaaatagacggagtgtccgccattgatcgcgcccgattgtcaaaaagtccacacgaatcccgttgatgatgacaggacttggacatttcaacaattggcgttcttcaatggacgagacctcactttcgatttaacgttaaactaaaattaccacgtgttttgtgctgcgtcaactttttacggcttcttcaattggtgttgggccagtggcaattttaattgtctcgcggtgacgatcgctatctaatgcggcaaccaagacatcggcaacatcggcacgcggaatggttgatgggcgttgcggctgcagcgtaatggttccttgcgccggttcattcgtgagtgaggttggctggacaatgacataatccagatccgtattgtggattaaccactcatctgcataatacttggcaatgtagtaatcgtgcaattgtgcaggccagtgtgccggatcctcagcatcaagtgcactaagcatgatgaagcggccgacatccttggcttcggcggctttcatggttttgatggccccatctaagtcaaccccgagtagatcttttccccgcgatcctgcagcgaacacaactgcatcatgaccggcgaaaaggtttgctaatcgattgaccggccatgacagatcaagctcgactgctcgaaaatttttctccggatcgggtgtctgggtgagcgggtcacgatagccccctgtgaccgtatcgcctcgatccagtaatttatgcaccaatagctggccgatttgaccgtgggcgccgacaacaaaaattttcacaacaatgatcctttcttggaaaatgattgttattagtataacgtttttcgtgctgacgtgaaagcgctcgccgctgactgaacacagcagtaattggggtgaggcgttgttttgactaaatgatttccaggggtacgtgatgacgaggcatcgggaaggcttgatcaaatagatctaattcgtccggtgaaaatgtgacgtctgctgcggcaatgttttctgccatgtggctagcttcaccagtgcgggggatggatagcacgtcaccattgcgcaatacccaggcaagcaggagctggtgagtcgaaatgcccttgctttttgccaaatcggtgagttccggagttagcttgatggatttgccgctgccggaaccataaggcgagtaaccaatcgtagtgatccctgcctgcttctggcgtggaagtaggtcaaagtcaataccgcgtgattgtaggttatacaagacttcattggcaacgacttgctcgccacccggttccaaagtgagctgatccatatcgtcaacatcgaagtttgagaccccgtattggcgaatcagtccctcttttttcagctcttgtaagccttcaagggtttccgccagtggggtagccccgcgccagtgaagtaggtaaaggtcgagataatcggttttaagtcgcgacaagctatttgtcagcgccgttcgcatttgctttttgtcggcatgtgacggatagaatttagagatcagatagatattggcccgtgggtaatcacctaaaaagctgccgatcaaggtttccgccgcgccgttgccatacatttcggctgtatcaatcacccgcaagccgtgatctaacccgtactttaaagcttgggtttcgcgtgcgctttgttcagcattgccttcacctaaataccaggtgcccattccgacaattggaactgttacatcgccaatattgatcgttttcataaaagcaaacccctttcctttgcgagtgtttgccacttgttccggatgagcaaacacaggctgcttcatacaatttcattatacaaattagccgtgaaataaaaacactcatagaaaaatgtcagaaaagatgcaaggtgagggggtctggcaagtgaaagtttgaaaaatttgcattcagcgcaatcaggacatagctttaaaggtcattgtcttgatccattaccgcctttgttttgctgtttccatggcgataatagataaaataatgcaagctcaccaaacttaaaaagataatcccgactactaatgaaatacttgtttccggattcagcaacatgaaaaataaagtgaacacaaggaaaataagtgtgagataattactgtatggtgcgaatggcattttgaaaggatggtccgtcattttatcggcgtgaactttttgaaacttgatttcactaataagaatcacaaaccagggaaccattcctggcaagacgctggaactatagacgagaacgaaaacatttttcgctgctggtgccacgtaaggcaggatggcgtttaaaagcacaccgagtaaaatgccgccgccgaccgaaacaacgggataaaaagggacgccatggcgatttagttttgtgaagattcgcggtaactgtttggcatctgccaatgtgtaaagcatacgactagcagaataaatgccggaatttgaacctgataatgcggcggtgatcaccacaaagttgatgagtgatgccgcaaaggtaatgccgattttggcaaaggtttgaacaaaaggtgaccctaaggcgctaagttgattccaaggataaacggctacaatcacgaaaatcgcaccaacgtaaaagatgagaattcgtccgatggtgtctttgaccgctttaacaattgttggttgcgggttttccgcttccccagctgtgatgccgagtaactcaacgccttggtaagaaccaagcacaatggacaaggcaaagcaaaagccagtaaagccacccgtgaaaaatccgccgtgggtccacaagttactaatccccactggccgaccgccatttcctagtccaaataaaatgacgccgagaccagcgatgatcatcaacacaatggttacgactttgatcaaagcaaaccagaattccaattcaccaaacattcgcaccgaaatcagatttgccaaaacaaggaaggtgatcgcaaccaggccaggcagccatgccggcagcccaggccaccaaaatttgaagtattcaccaatggcaatcatctctgacatgcctaccacaacaaattggaagatattactccacgcagttaaataaccaaaaagcgggtgcatgtattcactggcaaatttggcaaatgaaccagttgccggatcaacgtacagcatttcgcccaacgcccgcatgatgagataaagaaaaagtccggcaatgatataggcaattaagacagaagggccggtccatttgatggtggcactagcgcccatgaaaaggccaacgccgatggtcccgccgagcgcaatcatctgcatatggcggccactgagttttcgttgcatgttaagttcgcttctttcattgttgtgacatacaagagaagactatacaagaaaagtctatttttcgcaaacaggtgaacccaaaacgtagacatgtcaaaaacgtaaatgcaagccgtcaatcaggttagaactcaggaaagtgggctgatttcggcgtttgattaaggcaatgttcgcgtatgactttttgcgttaaactagtaacggaacacttaaatttaagtaggatatgaggaaatattttggataataagctaaaaacatcattaaatgcttatatggcaaagcatggattgaataccaacgccgcttcaatcgcgattggtgtatccgtaccgaccctgcgaaaggcgctgcgtggtcataacgtcagtcgtaaaacgaccgcaaagattgaaagcatcatcgcatcgggaaaagtcccggaagcagcaaagaccacggtaaaacggaccccaaagaagacagctgcggcgaaaccagccgctaagactccagccgctaagacgcgcacacggcagacgactgccaaagcgccagcaacgaaaccaagcacaacgaagcaagccgcaacaaagacgccaactcgacaggcaaaagcgcaaacgcagccaacaagtattgctgccaccgatcagaacaaggcagctgtacattctcaggaaaattcagccagtccgcaatcaccgcgccggacaactaaacgagttgcccgcacaacaacgactggccgacaagcgaatcgcaatacccggcaatcaccgtcaaccagtggtgttaacactgcgagtgagtcaaagccgaccaccaaacggccgacaacgcgcaatcatcgtttcaccattcgccagcagcctgatgtcgcaacccagcaagcacaaagcgaggccaacaaacgtcaggcgcaggcagcaaacagtcagtctactgctaattcaatgagcacgtctgaaagcactgaccgccacgaaaacggtgtgcgccataccaagcaacatacgccaaccggaaaaacagatgcaacgcggtacaacagtacaagcgagcacgaaccggttcggcgtgatcggcgcaatgtgcggctcgatcgcaacaaacaaaacggtacgcggcgaccgggacggccaagacagaatcgcttcgctgccaatgctgatccgcaaaattggcaacccatgacgcaatcagcttctacaagcaattcacaatcgcttagcaatcaagatgccagtcaacaccggactcctgctgttgttaataaagtgacaacccacacgccaagcgtcatccgatccacgtcagctgatcggtctagcacaaacggtagcgctgcaaacagtactagcaatgccgccaatacacagtcagcggagaatcggtcagcgcgcgccaattacggaacgcatgatgaggtgccactggtaaccgggaagcaattacgtcttttcattgatgaaagttttgaagagcatcgaccggatccgcggatgatgcatatgggaattgccgccattttaccggaaggcgacgatgaaagcttagccggtttccggaacgcgctttatccttacggctgggagccaggggatgaagttaaagctcgcggcaaacaggttgatgcattgacgcaactgattaaagctgccaagcatgaaaacatgggcatgtatacggtcttttcacgtaaaacaacttacccggattttgcaccatcaatggaatatctttatccatatatcggggcaaccatccatgtcttgcgtgatgtccataccatatttgatgatattgtgatcatgatcgatcatcgaaatgagttggaaggcaatcagctcgtgatgggagccgatatcgttagtcgttacttgaccctgtcactggaacggccaattaaggttcggtttgaatttgcggactcgcgtgaacatcttgggttacaactatccgactttattgccaatgctgcgttgcggttaagcaaagatgagctcagtctgatcgggatcacgccgatgcctgaattaggcatttcgcagcacgatcagcttgttcgtcttactttattgggcctgcaacaggttgtcatgggggttcgcgcggaacgagccgcaaccccatccaagcattcccagccggatcggttcatgcagctgatctttgatgcaacctacgccgattcggatctggtgcgcggtgctttaccggttgtcaagaatgcggtggaacaactcattgatgtgttgccaaatgcccgtgtcggtcaaatttccggcatgccaaaccaaagctggtacgacatgactgcacgtatggccggcttgttacgctacatcaataaggatccaaagccatatggtaaggttctagccaagattgaaagtgttacaaagacggctgccgatgagcttgaaatggctttagactcaggctcaaagacaaaacggtaaaagagatcgttcgttgagttaattgcaaaataaaaaccggttgtagagaattttctctgcagccgatttttttattttgcaaggggcatattctgaaatgaaagaaaggcaaaatagtctagtcgataaaactgtcctgatttttcaaataggtgatttcgtcaaaggtgattcgggtttggaggcgctgcatgaggtcgcgacttagcttcccatccgtaaaagcctgttgaatgaactcgtattcggcatgaaaggctttaagaaacatcgcgtacaaagcatccccgtcaaatgactcggaatgaacccggcgatgacgatcgcggtagaaccgccgaatggtattaaccgcactgcgattttgaattgtttcgatccgttgcaaatatcgcatgaccgccgtatatccagcctgttcaatgggcaagagatcttcaccgtgagccgcaaattggcgtttccaatagatcggctctaggttgagcggggtggttaaaaaggcgttttgggcttcattaaacgctttatacatccggcccatgttgaacgaaaaacgaaaccggagccaaagatttttccagagtcgttgatccgctgtgaaatcattgagatcaatgaagcgattataataatgggcttcatcgcgagtaatcgtgccgttcatccgtaaggtttcaatggcacttttttccgcagtgatggtgccttcaaaaatcgttcgttgcagccgccgcgaaggattgtcatttaagatcatttcctgagctaaggcatcggcgacaatttgtgcttcactgtgatgttcggtctcatcgcgcatcgcatcaatgcccgccgccagcatccgccgtaaccagataaattggcgattgcgttttggcggtttagaaacgcaaaacggcagtacgatgaccggaacgatgagactgaggagaatctcaacagccgcaatgagaatgagtccttggcgcagggcaaaatggtgaccggcaactgtttgcggaatcgaaaaagccagcgataaagtgatggttccatttgcaccgccgagcatcatgatcaacgcattgcgccatcgatgtttcttgcccattttcaataacgtccgactccagatgaagcgaacaaaggatttggccacgtagatgaaagcaccgatgccaatgagcaagccgaataaccctgcctgcccgcgtaatgcctcaatcacaacatttggcagcgaaacgcctaacaaaacgaaaaccagcccagaaagaacggcagcaatcatttcccacacattggcactgataatttgcatgcgggcactggtcaaccgcaagcgatcacgctcaacgccttgggcaatccctgcagccacaactgctaaaataccggaaagtgccagttcttcagccagaaaataaaccagtaaaggcgtcagcaactgaattccgaccataattaatggctcatcatcaccaatgcggattagccaggctctgagattgacaataaaaatacctgccagtgcgccgaataaaataccgccaaagaaaacaaacaggaagtcgagtaaagcgtcagtggccgagaattgtccggaaatataggccgacagagcgagatcaaacgctacaatccccgccgcatcgttgaacaaactttcattatttaacaactgcatttgactagtgctcaacggattggcctgcgcaacggcactgacagcggaagcatcagttggggtcacaatggcaatcaaagcaaatgccagactcaatgggatgaccgggaaaagtgcatggacgccgaagcctaagatcacgaccgacacgatcaccaagccgactgcaagtgacacaatattcgtcagtgaccggccgatttgtcctcgtgaggcattttgaccttcattgaaaagcagcggcgcgatgatagcaaaggagaacgccgatggatcaatcgtaaaactacgcagggatggcataattgccaacgctgcaccaagaccaatcaagaagaatggcaaaggaatctgtgggacatggcgagcaagcaaattgccaacgataaccgtggccaacatgatgccaaaaataacgacttgattcacagcgactcacttcctagcttgaccgattcgatcattttattttagcaccaaaccggggaaaacactggttgcaggcttggagagcgtgaaccagcctggtttctggacaggtgaacgcgtttgtatcgcctagacggtgcgcaaacggacatactgattaaaaatcggattggattatttttcagcctgatgtgtcgatagtagcagtgggagcaaaaaaagtgtcgggaatatttcgacacttagtaggataagactattttccttgacgtttttttaacacgtggttcatctttctagctgtgatctgccaggaaagataaagcgccagccagatgaggacgtaaatgatcaaaaaggcgattagaaagttagggagtgccgatccgacgagaaattgccagcccatgagatagttggtgccgatgacaatggcgaaggtgccgataaaatgaaggctataggctacaggcaggctgagggattcattgtcaaaaataagggcgagcatcccgattaaagcgctcatcacaaacaagccagcgatggtgcgtggcgttggtggggtcagttggacctgtagcatgagcgcacctagataaacagtcgcaccgatcatcataccgataacgctatccgtgataagatctttgatgattttcatcgggcacctcacaatcctaacaagcgttttaacgcaggaagatatttacgactgaccgttaacttcatgttattcgccatgaaggctgtcatgttcccggaaaaagacgcttctagtgacgttaaataattaatattcaaaagactgcttttcgttacttggataaatgcttgcgggtcaagtttggccaagaccgttttgagttgaccgcgactttgatagacttcttgacgggtatggacggaaagctgatcgccgtagacttcgatagccacaatctcgttggtcggcaaaacaataacgcgttcgccaacgagtaggggtaaggttgcgtggctgtcggcgagttgctgaatttgttgcagtatctgcaaaacagctggtgacaattgcgcagccttgacgtaaacttgcaggtcgtctggctgcatcgttgcgtcttgcttaaacgaaactttcattgacacccctcccgtaaaaagtgcatgcatgatagtgaaacgaatcatggcggtgttgcgataatattggaaaaagcaaccatgataatcaaattaattatacgcggacaagcgctgtttttcgactgactttggctatcagaatgatgaccagtccgacaagcagcgtgaagctagttagaatcaggtaagtttggcttgatgaaagcaggccatgcagatcaattcggatgccgagcattttttcaaaggtctgacgcgccgttgtctggtgaacggaaaaagtggactctaggggttgctgtaggagtaactgccggtatattgcggcattgtagggaaaaggcgtcaatttcatcaaattttgcgcggcagttggaacagaaccaatgggaagatagacgccagcaaagaaaccagctgcggttccaatgatcgtcgaaatgccgctcattgtggtgacccgggacacgaaactaagaatcaaaaggttgaaagccgtccagactaagctgctaaacacggcaaggacgataatctggccggtcaattgccagaaaatggcgatgtggtctaaccataaaaaagcaccagacatagtaaagaacataagtaactgcatgatggtgccaatgatcacggcgctaatcagatagcccaactcgatacgtaaatacgaagcttgagttaataaataatcgctaagtcggccagtttcgcgatcaacaatcatccgcgcgagaccattttgtgtggtcgtgacagcggtgatggttaaggtgccgccaattaaccacggatccagcaatttttcgggatgtgtcagtggccaaagcgtgctcatacttttcttgagaaagactaaatacagtaaaaaggcaattaaagcgcccagtaccgagaagaagaccccggcgcggttgcgaaagaatagtaacaaattgcgtttgacaaatgcccacatgttaacgaatctcctttccggttaaagcaacaaaaatggtattcatatcagccgtacgaaactcaaagtcaatgagctgcggttgtatagttgtcagtaatgtgatggctgcttggggatggctaacctgcacccgcactgtgtcaccatcgatctgggcggggagattcgcttgggttgcggctatttgtacttgttgaggtgcatgcgtgcgaacaataagctgatgtccggcatactgttgctttagttggccaacagtgttcgcggcgataatcgtgccctgatcaatgacatagacaaaatctgcttgttcggtttcttctaagtaatgtgtcgtcaaaattacggttaactgtgattgcgcacgtaaggaagcgatggcggtccaaatggtttggcgggtttgaatgtcgaggcccgttgttggttcatctaaaaaaaggagatgaggatgattgagcaaggcgcgcgcaatatcaacacgccggcgctgaccaccagacaatgtgccgtaagcttggttaagaattggcgtcaaatcaaattggtcgaccaagtgatcaaaccaggccggatcagttttggtatacatttgcgaacggatttccaagttctcttttacagtcagctgccgatctaagcgactgtcttggaagacaacaccgatttgttgccgataagccgcttgattcggcgtggctgtgcccattgtgatcttgccgctgctgggttgaattaatcccgtcagcatgccgatggttgtcgacttgcctgcaccattaggccctaaaaaggcaaccagttggccagcttggatttttaggctgatatcattgacaacggttttggtaccgtatgtttttgtcagattcgttgtttcgagaaggatcatatctatcaccatttttgtttgatgattcaagcatagccagtgcgagcgaatccgtcccgctgatgccgataagtggtcaaaattgcaaggtgagtggtcagatgccgacggtgaatgacagcggatatttaacttcgtggacaaaaggaaagtgagcgtaactgcaattcgtcatgacaagaatttgaaataagttcaattaatgggcaccaaaaaaaacgatgccagtccgaaaacactagcatcgttttaaacattgtccagttgtttgaagtaaaaacagcacagcggctaactcgaaattcgcgtcaggtgaacagaaatgccaaaattcttgcatcaacgtaaggattctggtgcagactgctgtgataggcaccaagcggcgttccgtgatagatgtaaagcgtacttggaatatttgccgcgcgcaaggccttttcaaagcgcttgacgccagcgatgctcacggcccagtcgccacttgcaccaaagatttgaccgccgatgacgagggtttggactgatttagggaattgctgtaattgaggtgtggggtcacggtaaaactcgcttgccaatgaaacatacttcactacatgcggctgagcatcagcgtggtgggtcgtgaggtatctgaaactgaggttgctgcccatagaatgaccgacaagattgactttggtgacgttgtgcttggcacgtagccaatgtaacaaggcagtcagttgtcgggtttccttttccggggctttggcgtcttcaaaaattacattaactaacggattcttgccggtataccggttagcgccggttatcgtgcggttgccggtggcgctgatggtaatggtcgtcacttgattggaagcgcggtcctgcttgaagcgggtcaccatcgggccaaaagttaggccattactggcatagccgggaacaaacacggtcacaacagatgtttgtcggtaagtctgggcatgaatccgacgactgcctagctgccaccaaacccaataactccctgccaatagtagaaagagtatcaaaagtaagcgccatccccagcggtgctgacgtgattgtttgcgtgtcatgttgcgacttaccccttttaacaacggtatttagtcaaccaccggtgatagcaggcacggccagtaccgatttagtcagccaatttggtaaatgtgctgcgcaggaccggacgctgataacgcgcttgaagctgccgatggttatctgcaaaaagctgctgataacggtgtaattgctgcgtgccaatggtaaccgccgtttgatcgataacataccaagtaacaccttctgtcagcggcggcgtggttaaggagccgagatagcgatataccgtcccttgttgcggaatgagctgatccagactaagggcaatggattgggttgaatgggcggcaaaatgatcgagtatttgctcaagcacaacattgtcaggacccaacggcaagagaaccgcaacaacgcataaggcaccgattgctgactgatggacgaaatgcagttcggcagcgtgttgattggtgatttggtgttcggcaggtacatgaatatgggcctgcatcaattgccactgatcctgatcaattcgggtgcgaccggttccggtaagccggatcgtaacctggtcatcaatttcttgcgtcacccgccacggcgtttcaattttcaacgttgacgggtcagctggagttgccggtaaaagattgatgggcgattgaagttggccaaaaccattcggccatttttcctgatggtgataatctaaaaatgccatgttctttgattcctctcatcactaggggataacgttcttgttgattttaaaagccagattcaaccgcggctgaatctggcttttgtgtaaacgcgagccgacttttgcaccggggagcgcgttgtggtgagatggctagtcgagtagtttgactgccgttccgtatgcgacaacgctttgcatatcgccgccgattgatccggaatcaaagcgcatcatcaccacagcgtcgcctcctgctttgcgagcttcagtacgcaggcgatcaattgccttttctcgcgattcatgcagcatatcgctgtaggctttgatttcacctccaacaaggttcttcaagccagcgccgatgttactaatcacatttttggactgagtggttaaaccaaaaacttcaccaatgatttcgtaatgtttcccgggaatgttctcggtggtggtaatcaaaatttcctgagccatcatgggcctccttatgagttgcttgatcgttacttatgtacagcggaccatgtatcacagtctcaccgtgttttagcctaccaccggtgtttgccgacaacaagcgaaacgactttaacaacgggcggctgcggttggttattgatcaagctgattggcgcgaacaagcaggccccattaacctgtctgcttgctattggtcaggctgacttgatgaaacaagttggtggtttattgacgttgttttgtttgcagataggtacgatagacggctaaagcggcattatccggtgaatcaggaaacattttttcgggcgcaagcgatgccggtacccattcggcttcggaaatttcaggtgaagtgactaaagactgcttggaagtatgactgataaagccatgcatgagactgctagttttcttgtaccaatatgtgccagcgtagtcgagttgatccagatggatgccgagttcttctataacttcgcgcttggcactctcctcagcgctttcacccggctgcatataacctgagatgatagaggcatatttctcagacaaataaggcattttcaccaatgcaatctcatcaaattcattgacgaccagcacgaggacacaatcggcaaataatggaaaccaaaagcgttggcaagtttcacagtaaggcacattcccatcatcgcctgccaattttgggatgagcgcgtggccacagataggacagaatttaaaagtcatgaggggctccttggggttgaggaatcgcggcctgaaaagaagtcgcgacttagaagtggataagatagaaataacgacattataaccccttgtgatggttgtttctagttagtcctgtacggctgtatcaaccaataaaaatggaatcacttgcaattctctcaatatataaaagccctgaccttctatcttttcagtcagagctttaggagctgcacaattgttatagcgcgatttatctatccacgcgaatgacaattctaccttcatgctgcggatcatcaagcaactggtgccctttgacaaaaccttcgcgggtaaatggcaacacatagccgacctgaacgttgagcttgttttgtgccatcaaatcaatgagcagttgcaaagctttgcctacctcggatccgccaagtggccgggtatgaataaaacgaatgcctctgctgagtaaaggttctgtgtgactaacggaaacgatcagtccgttgtctttggtcatagcgacatcatcatcgccaccaagcccgttcatagcagcgttaatcacgacatcggcagtctggcgcagttgggtgacgggattaccctgatcgtaagcgacaaagtgttcaacgccaagccgctcaaccgcgacttcatgacggctgctggcaatgccgatgaccgaggccccgcgcgcaacggcgagttgaattgctgccgagcccaccccgccagaggcacctttaacaataacagtatcaccagctttaacattgcccagttccaccatgcggtaaccggtgacaccaggggtaatgaccgctacgcctttttccggagtaatcgaagctggtaacaagacgctcatgtcagctgcggcagtgacgatttctgcataggcactggttgttcgcgccaccacgcgatcgcccactttaaaccgagaaacattgctcccgatcgaactgacggtaccggcaacatcgtatcccggtactgtcaagccactgccgcctagttgccgcgccatgcgatcacggttattgagaccgattgcgctagtcttaatttgaatttcatgaggtcccggttgtggtgtcggcaagtcaatcgcatcaatcacttccggcccgcctgcatgactaaatccgtatccgatcatcatgattcccccatcatgccatgttaaactagcggcattgtaaccatgatgcgaggaaaaaacaattaaagtgacttggtgtgctaaatatcacccgttaccttcaaatcaaatcgccatcagtggctgatacgttattcagcggtcactgatcattttgatgtggtcggggatcaaagccatgtagctggcctttgaactcatccggaaacgagctaaccggcgtatgttgttcccagctggctgcgacttcttcgtcaaccggttcggcatgctcactgtagtctagtcccattttttcagcggctggcgatacgcggatggcaacaaactgggtaaggatactcgtaataatcgtgaccatggcagcgaccaaagcaatcacgataatggttccggctagctgaatcagcagcagatgccagccgccgccatatgcgagtccggcgtgggcaatgcctggagccaccgttttactggcaaaaacaccggtcaggacactaccgacgatcccggaaacaccatgacagccaaaagcgtctaatgtgtcatcaataccgagtcgtggcttgattttgctgatgaaccagtaactggctaacgttgatgccacaccgatgcaaaccgcaccaaaactggtcacgtagccggttgccggcgtgattccgaccagtccgcataaagcgccggtacaagtgcctattaaggttggatggcctgtttgccaaatatcaaggatcatccaggtgactaaggctgctgcggcgccaaccgatgtggtcaaagccgccgtcattgccgcctgattgacccccagcgccgacccggcattaaagccataccaaccgatccaaagaatggctgttcctagcaacacccacggccgattgtaaggcaccgtatgctcatccgcgcgccggccaagaaaggcagacaaggtcagtgccgtaatcccggcgttaatatgaatgacggttccaccggcaaaatcaagcacgccaagcccagccaacaagccatccggactccaaattaaatgtacaagcgggtaataaaccaatagggaccacaggacaataaaccaagtcaagaacttaaaatgcatgcggccaacaaccgcaccgacaaacagagccggcgtgatgatagcaaacatcatttgaaagagaatgtaaacgccggttggaatcctagccaccgttgccgtaccaagcgagacgccgctaagaaagagatgctgtacctggccaatcaccccgaaaagattaccattgaagctcaattcataacccacggccacccacagtaaaatcgcaatcccggtaatgtagaagactgacagcatggtattaatgacgttgcgcttagagacgaggcctccatagaaaaaagcaagtcccggggtcataaaccaaaccagaacgcttgcaatgatcacaaatcctgtatcggctaaattcatctgtgccacctcattcatcttgaatggcggtattgtagcacgggttttgccggctacggcgtaagtgctggctttattgatctagaccgaatgcgttatcgtggtgacaagacttgatttaaaaggatttatggcacggcaaaaaaatattttgaacgtcagcttatatgacatgaatgcttgacgatgatttggaatttgatgttttttactgattggtccacatgaaaaacagctagtcatgtcaacattaaaaaagcctcaacaacaaatttgtcgttaaggcagaggctgagcatccaatcgtcatcagcgtttaacctgatggcggtatcgtgctaaattatagttccccgtcagcaattttccccaatacggatttagacgggatgaagaagagttcgcctgttaacggggttgaaaagtccaatagccggtcggatttttcgaacatcccttgcaacatccgtttggtgacggtccaatggcgggcatagccgataaagtaggtgccgttgatcttttcagccgggttgctgaagggcacgttcatgcggacaattttatgttccacgccgccgtcattatcctgagaaaccacgttatgtgagttcgccagtttggcttcgtcgtctagttcaagatcgttaaatttcttacggccaatcgctttttcctgatcttcggttgacaggtcgttccatgcgtctagattatgctgatacttctgggcaaacgcataggagccattttcaaatgccgggtcttcatcgccaatgacggcatattccggcgtgtctaaggcgcttggattctcggtgccatcgacgaaaccgataatggcccgtccttcaaagtagcggaagccgtgggtctcatcgagggttaccgtattggcttcaataatggccataatctcgctcattagttcgaacggtacggccgagttttgcgagcggatatggaagaataaatcagccggtgttgcgacggctgtgtattttggcccaacgatagattgaaaattttccaattcctttggtcgtgcggcttcgggaaaaagatagtcccatgccttgcgcgacaacccgaaagcgactgctaattttgcctcggggtaacgaatattcatgctgttgataaaagctggcagatgctccgccaagtcggcaatcattgccttgtcactagcggggtcttctcgttttagatcaaacgtggcaaagataatgtctgagcctgcatccttgtaaacatcttgaacgtcccgtaaatcaatggtcatatttccgcctccaaactagaatcattctaacctagaaacagtttagcatagccgtgccggaatgcaatccttttcatcgccggttctgctaatatattagatgaaaaaacgcgttcgttgcatgcgactgttgagggcgcacgtgaggtgttagaaggggttgttatcagtgtggctggaaggcttcatgagccgcatgtgttttaattgtaagctgtccttttacgtaattttcatcaaatcgacatagctaggtggtaaagtaatcataaaggttgtgatttttaacgatgacagtactgaatcaggttgaattagtcgtccggttgttggtcgcggcattttgcggttttgccattggttatgaacgcaaaaaccgcttcaaaaacgccggcattcggacacatatgattgtggcgctaggttctgcgttgattatgatcgtatctaaatacggtttctttgatattttaaatttgaaaaatatggcactggatccatcccgggtggcagcgcaaattgtcagtggggtcagttttctgggtgccggtgcgattttagtgcggcacaataatgtcaatggcttaaccacggccgctggtgtctggacgacggctgcagtggggatggcaatcggcgccaagctttatattatcggcttgtccgcgactgttttggttctgtgtattcaggtgttgctgcatcatcattatcggtggttaccaggtggcgataatggcattttgaccattcgcattcgtaatgaagggttcgatatggaacacatgcgacaaacactgggtaagtatcacattaaggtcctaaacgtttcgattaaacatgaaggcgatgaagtcaagatgacgttgcatgttgaaagtaaagccaatgaggatatgcgacgtttgttgacgttttatgcagataatcccaacattatttcaattgagttttaagctgcttaattgatctgactggttccatcgctgtaattgagggtgacaccaggctggacattgaagatatacacattaaagcgaatcgtgttatcgccaatactttgcgcccgcatggccacaccgcgggctaggcgttcatcgccgcgaaaaatcggggtgacttcatagcggacaaagtgttgaggggattgtttgagataatgcgcaatgtcatcttcatgcgcctgcattaaaggtgagttgagttgacgtgtgcctgtcatcagatttttgggattgttattctcgccggataactgaaaaccgatcaaatgactgcggttatagagccattcaccatgaaccttcttgttatgccagccagtcggattccaagtcaaaggctcgcgttttactttgggcatgatgctttggtttaaaagggcattcgcggtaccgacacggtttaaagaatccaagtcgctaaaacgcgtccatggtccgttactggtcgtcaattcggattgcgtaaaaccgggatcattattgttgattgtgatttccggctgaccgttttcggtaagttgtgctaattgcttaaccggttgctgcgacgtgccggttttagcggttgatgtgctactactgctactactagttaaagctggcagccaattggtttgcgggtgttgttgcgtataagtgtagccgccactcgcaatgccaactaacaaaagggtgattgcaagtttacggttggcgcggcgttggcgtttggtgccattgcgtaataaaagcagcgttatgccagcaaggatcagcatcaatgtgactaagttgttcataggttcctccagatggcgactgtcgtggaaaagatatggtttgaggttaacacaagtctgactttgcggggcagggtgtttttcggtggatttggtaatttgttcattcgattattagattacgcaaaagaaaaggtaaaaagcgggtgacaccgtgtcaccgcttgaattcttaggttgtagatgttctggttcacactttaaaggtgtttataattgcaggtacctgcgtgtaaggaccttaagtgcgatggccaaagctctggtcgtcacgtctgaggccacttatgttctagtttatgcccataacgcgctcaccggcgcagggatctgcgtgtaaggacctcgaacgcgatggccaagagcgggtcatcacgtctgaggccgctaatgttctggtttacgcccataacgcgctcaccggcgcagggacctgcatgtaaggaccttgggcgcaatggccaaaaaccggccatcacgcccaaggccgcttacactccggtccctaagcgcgccggttcgcgctcacgttctaaaacgcgttcacagtcgcagaaatctacgtgtaaggacctccaggctaaatggccaaagaccagccatttagcctggaggccacttacactccgatttctaagcgctcctgttcacgctctacatttgtgaatcccctcaatatctgctaatatatgtagaaatcttttaagcgaggtatgaaattgctcacagtaaataatgtttcgatgacgttctcggataggaaactttacgaagacgttaatttgaaatttacccctggcaattgctatggcattattggtgccaatggggcggggaaatcgacttttctcaagattcttgaaggcgaattaacaccgacaaccgggaccgtgagtttgtcgccgaatgagcggatgagtagcctgaagcaggatcactttgcctttgatgatcaaacggtgatgaatacggttttgcaagggtgggaacgcttgtatcaagtgatgaccgaaaaagatgccttgtatgccaagccggacttttctgaagcggatggtaataaggcagccgaactggaaggcgagtttgcggaaatggacggttggaatgccgaaagtgatgcctcgcagcttttgcagtctttggggattagcgaaagtgaacaccagaagctcatggctgatttgcccgaaggtgagaaggtcaaggttttgctcgcccaagcgcttttcggtaagccggatgtgttgttgctggacgaaccgacaaacggacttgacccgcaggcgattagctggctggaagactttttggctgactatgaacacaccgttttagtggtttcccatgaccggcatttcctgaatgcggtttgtaccatgatgtgtgatgtcgattttggcaagattgaattgtatgtcggtaattatgacttctggaagcagagctcggaattggccttgcaactgcaaagtcaggccaatgccaaaaaagaagagcagattaaacagctgcaagaattcgttgcccgtttttcagcgaatgcgtctaaatccaagtaagccacatcgcgcaagaagcaacttgaaaaaattacattggacgatatccgtcccagctcgcgtaagtatccgtatatcaagtttgaacctgaacgcgccatcggtaacgacttattacgagtggaaaatgtttccaagacgattgatggccagccggtgttgcaaaatgtgagcttcattttgcgccccggtgacaaaaccggcattattagccgcaatgacgtgacggccaccgttttaatgcagttgctggctggcgaattggagccggacagcggaacgattaactggggtgtgacgaccagtcgagccgcaatgcctaaagacctgaatccggagtttgaccatccggaactcaacattttggattggttgcgtcagtttgccccgcaagaagaacaggacaacactttcctgcgcggttttctggggcggatgcttttctccggtgatgaagtactcaagcagcttaacgttttatctggcggcgaaaaggtacgatcatacctggccaaaatgatgttgagtaaagccaatgtgctcattatggacgatcccacgaatcatcttgatttggaaagtattacgagtctgaatgacgcgttgattgatttcaccggctccttgatctttaccagtcacgatcatcaatttattcaaacgatcgctgaccatattattgaagtcgggccgctgggtgtagttgaccgcgccgacacaagttacgacgaattcatgcaacacgaaactgcccaggcgcaggtggcggcgatttatccggcatctgagcattaagtgtaattgttaatgaaaagcattgttgctcccgggtggagagacaatgctttttgttttttctgcaatggtgagggataatgtaagcaactttatccggtaaacgtctggtatcgctgcatcaaagggcaaaaggaaggaattcaacatgacacaaccagtcatgattttattaggtgttgggggtttcgttgttgcagttgtgctgctcaaccttatcttaacggggcaacgacaactgaggcttaaacgcgatctgattgcgaattggggcaagctgccggttaaacgtggtggcagtgagcgctatttaaaagcggcgtaccttgatcatgaagcgcaggttaaccatgattgtcagattgatgatttaacctggcaggatctcgatatgtttgacgtgtttaaacaactgaatgcgactcagagcagtgtcggtgccgagcgggtttatgcacaattgcgagcctataatttaggcaagcccgatgtcaatgaagcgttgatcagctttttccagacccatgcagaagaacggctcaaagtgcagctggcatttgccggactgggggaagatgttgctaacaacagccagcattatttacgcaccacgactcagtctgctttgccgcatgcttggcggtttaaagtgttaggcagtttgccgctggtcggcttggtgctggcgctggtacttccggctgttggcgtgagcatcatcgtcttgagtttgatggtgaatcttttctattatgttttgaagcgtgaagccttggacgctgaagtaacggcgatgggctacttagtacgaacgattgttaccgcggaacatttggtcaaaattcagcagcccactcaggatgctttgcgtgctgccgttcgaccgatgcgggggattacccggttggcgtttgtgtttcgctcgcgggataacagctcaagcgacatgatcaccgagtattttagcagcatgtttatgttgggctttattgcttataataatgtgttgacgcggttatatcacaaccatgacgaggccttgactttgtggcaggcgttgggcgatttggagttagcgattgcgattgccaattttcggacggctcattcgcaaagcagccagccggcgtttgcagcaggcggcatgacggccacgaaaatcgtgcatccgctattgaaacacccagttgccaatccggtagcgtggaacaaaaatgccttgattaccggagccaacgcgtcagggaaatcgacatacgttaaaagcatagcggtgaatgccattttggcgcagacgattaatacggttttagctgaaaagttgacgatgcagccgggattggtgatgacagccatggcggttcgggatgatctcagtgaaggcgatagttattttgtcgcggaaattaaagcgattcaccggttgttaagggcagtggcgtcaaacaagcgggtttatgggtttattgacgagatcctaaaaggcaccaatacagtcgaacgtattgccgcctcagccagtgtcatcaactggttaagccattatccgagtttggtcgtggttgccacgcacgacaatgaactaaccgacatcatgggggatcagtgcatcaattggcattttcaggaaaaagtgacccaaaaagatggcgtcgtatttgattacttactgcatcaaggaccggccacttcccataatgcgattgcgttgttggcaacaatggcctatcctgagccgctgattaaagatgcgcgtcaactcgccgcggatttcgaacgcaacaaagcatggcccaaatatcggcaaggagggattcaagcgtgacaacggccgacaagatttttgaagcaattcggcaggatccggctaatgcaacctttacggctcaaggttgggatccgttatatcacatcgaacctgacgcaacgattttgatcgcaagccaggcgccgggacgcaaagcccagacaaccaaaacctattggaatgatccaagcggtgatcgtctgcggacatggatgggcgttaccaaagatcagttttatcacagcggtaaaattgccgttttaccattagacttttactacccgggaaaaggtaagtccggagatttaccgccgcgcaaagatttcgccgcaaaatggcatccgtccttgttagcgttaatgccccatattcagctgaccattgttattggtgcctatgcgcaaaaatattacttaggcaagcgccgggaaaaaacgttaacggcaacggttaaaaactttcgggcttacttaccgacgtattttccgattgtccatccctcgccacttaactatggttgggtcaatcgcaatccatggtttatggctgaagttgtgcctgctttacaggaacgagtggcacgactaatgaagtagggttcaaccataacgcgtttaccgatacttaatcgtgccagttcatgctcactttctataacgcgttccccagcgcagacttctaaccgcgccggctcacgctcaataaaaaaccgccattcgtttttattaacgaattggcggtttttacattgtgagtttttagagacaggttacggcaaaaccgtgaagatcaaggcaccaacaacgccgcctgccaggggtcctaatatcggtacccaagcataaggccagtcggaatcgcctttgtgtgcgattggcaaaatggcgtgggcgaggcgtggtcccaagtctcgtgccgggttaatggcataacccgtcgtcccgccaagcgataggccgatagcggtgattaggatgccgacaccgattggattcagtccatctgtccattttccctttgtaaaggccaaaagtccgaagatcaaaacagccgtgccgatgaattcggatatgaagttggccgcataattgcgaatcgcggggccggttgcaaaaacgcctaacgttgtcgcaggatcgttggtcgcttcccagtgcggatagtaatgcaaccacacaactgccgctcccagtaaagcgccgagcatttgcgcaccgacaaatggcatgacccaagcccatggaaattgaccgatggcagcaaacgcaagcgtcacggccgggttaaggtgggctggaccgagaaatgccgcggcataaacgcccatcgtcacggctaagccccacccgagtgtgatagcaatccagccagcaccattcgctttggatttattcagcgatacgccggcaacgacaccatcgccaagcagtaccaggatgaaggtaccgatgaattcacctaatgtttgtgtccacatatggctacctctttctacgcaggattggttgatgctggcgtcttcttcaagtctgctaattggctttcacggatagcctgattaagatcagccaattgttgggctttagtcgcgtcatcccaacccaataagcgtgccatttcatcaacgactggctgtttaagctcgttaagggtctcggcatggaagagaattgcattggtccgccgcaataggtaatccactggtgtcaaggtcatttcctcgttgatcgaatagcgcaggctcatggtttccttaaggctgagtccaggagccgcctgcccatctgtgtaggtgacaacccggctgacatttgaaccgaagcgattggccaagtcggcagcatctttttccggcaagccggcatcgatgccaatccgcgtgtaaaaagcaatcgtatcgtcaacgttggtcgggtcaaaatgcccacctgaaacctggagctttttggaatcaacggtccgtgtttcggttgcaaaatgttcagccaacaagcggcggatcaaagcaagcgcgcccgctgccatttttcgataatccgtgattttcccaccggacaaggtgatcatgccatcatcggcttggcgaagtgagctgccgcgtgaaacttgtgatgggctcaaagcagcttcggcgtgggctgtttctagtctggagatcgcatgttcaacgtcagcgcgggtagcctggttgtcttcgtaatcatcaacgacacggattaacgcttcaaaggaatcatccgaaactttaccggtgttcgcaccgccgccgttgtaatcggagctgccgttgttggcaatcagcggtcgcaatcctgcccagctcgcttcgatatcgtcaagcgtgatatggctttgcggatagcgcttgttgatgactttcaagagataatcgacatcggcttgttcgacttgcggatggttgaagtcgccgtggtaatcggtatcggtggtgccgaagtaagtcttgccttcccgtggcaccacgaagaacatccggccgtcgttcaagccagtatccatatacgttggctgtggtaccggcagtcgagaaccatcgacaaccaagtgaacccctttcgttggccgcaatgttggggtttgatcttcggcttgatccaacgccttgaacttgtcagaccaaggtccggtcgtattgatcacgagtttggcatgaatgtcgaaaacgctgccatccaaaagatccttaacctgtaagccattaacctgaccggcatcatcatgcaaaacgccaatggcttgaacccgactagccatcagtccgcctaattctgctgcttctttgatgttttcaataacaagccgggcatcgttgttgacaaagtcgaggtacacgccgccgccttggaggccatcagcggctaaatgcggttcgcgttgcagaatttcatctttggtgacggtgtagttggcgtactgggaaccttcaacgtttgccagacgatcatagagatccatggcgattttgatactgaacatatcaaaagtactgccggcttcctgataaactggcaacaacatcgggaatggacgcggaatgtgaggcgcaattccttgaactacggcacgttctttaacggtatcggcgacaacgccgacatcaaaagtcttgaggtaacgaatgccgccatgaaccagcttggtcgagcgggaactggttccttccgcgaaatcctgcatttcaatcaagccggttttcaaaccgcttgcggctgcctgaattgctacgccggcaccggtaataccaccgccaacaatgagtaagtcgagttcggtctgcttcaattgatcaatcgtctgggtgcgggtttcttttgaaaatgccattttgagtaggctcctttttaaataagataaatgatggcgcaataagatcgtgctttagaatgaattagtcttgcttggaggtgtgcttgtactgttgggtggcggcaacggcttgtttccagccttcgtaaagtgattcccggtctgatacgtccatggtcggttcaaagcgcttaccgaccttgacgatactttggagttcatcggtgctgttccagaatccggttgctagcccggcaaagaaggcggcacccatggcagtggtctcaaggttggcggcgcgttcaatcggaataccaaggatgtcagcctgaaactgcatgaggtaatcgttattagcagccccgccatcaacgcgcagagctggaatcggcatgccggtatccttgttcatcgtgtcgacaacatcacgggattgataagcaagcgattgtaacgttgccttgatgaagtcttcccgagttgttccacgggtaattccgaaaatagcgccacgtgcatccgaatcccagtaaggagcacctaagccagtaaaggcagggacgacatagacctcgttttgactcttggatgctcgtgcggcagcttcggagtcgcttgaacgctcaatcagtttcatggcatcacgtaaccattgaatggcgctgccagccacaaagaccgaaccttccaaggcataagtgatcttgccgttaagtccgtagccaatagtggttagcagattatgattcgacaaggttggcttatcgccggtattcatgacgataaaggcaccggtaccatacgtgtttttgaccattcccggttcgatagccagctgtccgaataatgctgcttgctgatccccgaccataccggcaatgggaacggtactgccgaagaaatgataggctgctgcatccccataaatttctgaattgctgcgaacttccggcagcatttgcttggggatgttgagaatccgtaagatctcatcatcccaatccaacttgtggatattgaagagcatggttcgtgaagcattggtgtagtcggtgacatgaatggcaccgccagaaagcttccatgatagccaagtgtcaatggtgccaaaaagcaattcaccattttcagcccgttcctgcgctcctggtacatgatccagaatccagcgaattttggtagcagagaagtaggaatcaattagcaaaccggtggcatcgtgaactagatcagcatagccatccgctttaagttgatcagcaatgtcgctggtttgacgggattgccaaacaatggcgttgtaaatgggcagcccagtttgcttatcccacacgaccgttgtttcccgctgattcgtaatgccgatcccaacaatttggcgcggctgaatatgcgattcgataaacgctgtggcaatcgtggataacgcagcattccagatttcatttgcgttatgttcaacccaaccaggatgtggaaaatactgtggaaattcgcgctgggcatcagcaactttttgcccattgtgatcgatgatgatggtacgcgtgctggttgttccttcatcaatcgccagaatatactgctgttcgtttgtcacggttaactacctccagtaaaatatgattgcgcacaatgaaaacgttttctaaaatagttatacatgactttgctgctgattgcaagtagtacacttatatagatcataagttattttaactataaggtgaatatttaaaagcgtgaatatatagacctagcccaaacccgcggaaatacgggctcaaaaccagtttctcacctcaactagtccggctgaattaatttttttaattcaagaatacgttcaaaaatttgaatttcctggcgccgatcagccggggaaaatcggtgcatcgtgctgtcgggacggttgactttggtgtagagaatggttgggttgtaggcatacatgccgggcgtatgggcaacgaagtcagcagtaaagtagtaatcttccgcaatttgtaatcgttcatcatatcgaatatgcccggcatttaagctggcacgagggaaagccttattccaaatataaccgccaatttcggtaccgtgatgcgagacctgttcaaacattgccgcttgtgatagcaattgaaattgatcagggccgccgcggttacgctgccaccagtcatagccgacagctgttgcgacaacgccgggggtaaatccgcgtagcaaggtcgcagcaaaagtcggtgcaatcagatcatcaccatcgacaaacgcaaggaaccgcccagtcgcatggtcaataccaaaattgcgtgcggcgccgataccttggtgatgggaaaaggcggttgcgtgataattggggatgccatttacaaacgcggcggcggtttcagcagtttcatcggttgaagcatcatcgattaaccaaagttccacgtcgatggtttgttgctggatgcgctttaaagtcgctggaagataccggcctaagttataggtggggacaataatggttaaatcaggaattgccatgatgacctccttgaaaaagatgtgctgttacggtcaatattttgtccggattgttaacagcttgctcattcgtctcgatcattatcgtctgatttaggaaggcgtcaattaaaatgcttggcgcggatggggggtacgattcagccacaaaaattgcgaggtgaaaacagcagttacagtattgttgttattttatctatgaatgtgcttgtctatatggcaagtgaacttttaaaacgattatgcaaaaacgtctgtgaaaattcagaaagtaaatcaaataaaacgtttacattttgtttatatatggtacaatttgtttgttgataggaatattcattgtggattgtgactattcaattaggcgagaccacaaatcatgacgctgagagtagcgcgtgatttgtggttttttctatgtctgggtgaggagatgatgagatgccgaaaatcgatcagatctttaacaataacgtggcgttggttgagctagacaaccatagtcaagcggttgttaagggacgggggatcgcgtttcaaaagaagcgtggcgatgtgattccggctaaacaaattgaaaaaattttctaccttgcaagtgaaacttcccgccagaatctgtactttttacttcgcaatattccgatcgacgtggtgacgaccacttatgaaattattgacgttgcgcaaaagcaatttcaccttaaggtacttgactatatttacattacgttaagcgatcatatttacgaagcctataaacgttatcagaatggaacgtatcaagagacgatggtgccggattttcatattcagtatcctgcagagtatgccgtagctaaccaagcgttgcagatcattgcagctaaccttggcgtagcatttccaccttccgaagtgaaaaatcttgccttgcatttcatcaatgccagcggtgaagacgacaacgagcaggcctttgataagaataatgaggcgtcattaagtcaactggtgcaacgcgttttgaagcggcatcgcattacgagatcgcaaactaacggcaattattatgatcgcttcatgattcacttacagtatctgattgaccgactgcagcgtgttaatacggatgctgttgccattgtgcccgaggtggccaatgaattagagcaaaattatccgcggtcttatcagattgcttcggaaatttttgatgagattaaggatcagctttatcgcaacatgagtgaagacgaacgcttatactttatcattcatattcagcggctaattaacgaagcgcctgcccacgatcaaaaacagggcaaaaaatcataacgcgtttgctggcttggagggcagcatacgctcacgggaggaaagtatcatgaataaggttttcgataagctaaagccgatttttgaagcgattgcggcgaataagtatgtgtccgcaatccgtgatggctttattgcctgtatgccgatcatcatcttctccagtatcttcatgatgatcgcttatgttcctaatgcttgggggttttactggcctaagaatgtgaccgataccctgatgattgcttacaactactcaatgggattgttggcattatttgttgccggtacgactgcaaagaatttaaccgacagcaagaatctggaattacccaagacaaaccagatcaatccggttgcggtcattgttgcttcggaaatcgcctttgtcattttatcgattttaccgcttaaaaccggggtcgatttaacctacatgggcactcagggcttgatctgcgcttatatcgtcggcttaattgtgcctaatatttactacgtttgtattaaaaacaacgtcacgattaagttgccgccacaggttccaggcaatatctcccagtcatttaaagatttaattccaatggggctatctgttagtgctttttggctctttggcgttgggtttaaagcagcaacgggaacgatcctgccgcgctggattattcaagtgttgtcgccactcttccaggccagtgattcttatctggggttagcgttgattgccggcgcgatggcattcttctggttctgtggggttcaggggccttcaattgtccagccggctgttgttccgatcatgattgccaatacagcggccaatctccagcaatatcaagccggacagcatgtttcacatgtgttggcgatgaacacgatggattatgttatgaattttggcggtacgggatcgactctggttgtcgcgttcgtgatgctgtttgcggcgcgttcggcacaattaaaagcagtcgggaaagcggcttttatcccgggaacattttctgttaacgagccggtacttttcgggatgccgattattatgaatccgatgtttttcattccgtttttggcaacgccgatcgtgaatgtttgcctgtttaagttctttgtcagtgtgttaggcatgaatagcatgatctacaccatgccgtggacggtaccggcacccatcgggatcttagtttcaaccggttttgctccactggcatttgtctttgtattgttgacacttgtgttagacgtccttatctacttcccgtttattcgcgtgtacgatcgaacgcttttagccgaagaaaaagctaaagaagatgtgattgaaggacaggatacggcggttttggctgccgatacggttgcaccacaaacggctgaggttcaggtcgaagcatccgaaatggctgatgaaaaaccagcggcagcgcatgatgagagtttcttcaaaaataatgaaattgacgttctggtgctttgtgccggtggtggaaccagtggcatcttagccaatgcgctaaacaagctgtctaaggagcgggggttgaagttgtccgccgcggctcgggcttatggacaggatatggacttgatcaaagatatgagtatggtcattctggcgccacaaatggaaagtatgaaggataatttgaaaaagattaccgataaatatggcgttaagttggttacaaccactggccgccagtacattgaactgacaaacaacggcgatatggcactggattttgttgagtccaatctttaggcgttcatcaacctagacagactcgtctgcatactttataggaggaagttaaaacatgcgtaaacaattacccaaggactttgtaatcggtggcgcaactgctgcttaccaagttgaaggggcaaccaaagaagacggaaaaggtcgagttctttgggatgattttctggaaaaacaagggcggtttagtcctgaccccgccgctgatttttatcatcgctatgatgaggatttggcgttagcagaagcatatggtcatcaagtaatacggctttcaattgcctggtcgcgaatttttccggatggtgccggggcggtggaacctcgtggcgttgctttctatcatcggctctttgctgcctgtgccaagcatcatcttatcccgtttgtaacgttgcatcattttgatacaccagaacggttacatgcgattggtgactggctgagtcaagaaatgctggaagattttgtcgagtacgcgcggttttgcttcgaagaatttccggaaatcaaatactggattacgatcaatgaaccaacgtccatggcagtgcaacaatatacgagcggtacttttccaccagcggaaaccggtcattttgataaaacatttcaggccgaacataatcaaatcgttgcccatgcgcgtattgttaatttgtacaagtcgatggggctagatggtgaaatcggtatcgtgcatgccttgcagacaccttatccatatagtgattcgtcggaagatcagcatgccgctgatttacaggatgcgttggaaaatcgcctgtatttagatggcacactggcaggagattacgcccctaagaccttggctttgatcaaagaaattctggcagccaatcaacaaccgatgtttaagtacactgatgaagagatggcggctattaagaaggcggcgcaccagcttgattttgttggcgttaataattacttcagcaaatggctgcgcgcttatcacggcaagtcggaaacgattcataatggtgatggctcaaagggatcgtcagttgcccgccttcacggtatcggcgaggagaagaagccagccgggattgagacaacggattgggactggtccatctatccgcgtggtatgtatgacatgttgatgcggattcaccaagattatccgttagtaccagccatctatgtcaccgaaaacggtattggattgaaagaatccttaccagcagaagtgacgccaaatacggtcatcgcggatcccaaacgcattgattatttgaaaaaatatttaagtgccgttgcagatgcaattcaggctggtgcgaatgtaaaaggctactttgtttggtcactgcaggatcagttttcctggacaaatggttatagcaaacggtacggattgtttttcgtcgactttccgacgcaaaaacgttatgtcaagcaaagtgccgaatggttaaaacaagttagccaaacgcatgtgattccggaataagcgcgccggctcgcgctcatattaacgcgctccccggcgcaggaatctgcgtgtaaggacctgggtcgcaatggccaaagagcgggccatttcgcccgaggccgcttacactccgacttctacccgcgccggctcgcgctcacattaacgcgctccccggcgcaggaatctgcgtgtaaggacctggatcgcaatggccaaagagcggccatcacgccccaggccgcttacactccgatccctaagcgcgccggctcgcgctcacttttttaaaatggaggttgaattatggcgacgagagaagagatttcgatggttgggtttgcacttgtggcttatgcaggggatgctcggactgcggctttgcgtgctttgaatgctgcagaagcgggtgactttgaaggagccgaggccaaacttgacgaagcgcaaaaagatattaatgaagcacataatcaacagacgcaattgttaagccaagaagcaggcggagcggaaatggatgtgacttttatcatggtgcatgggcaggatacgttaatgaccaccatgttgcttattgatcagtctcgttacatgattcgaatgcttaaacgtatcaagcaactcgaagacaagcaataaactaaaacccaacacccgcgctcttcttgtggtaaaactgaccaagtgatagcgtctgacctggtaaacatgttgccatatggattaaacagcaaaagcatcggattattggaggtgagataatctgatgctttttgtatatagtgatcatgtttctgaattttttactaaaacaccagcaaacaaatcagcggagttttggaagcttatttacggattgaaaaaatattcgacaatagcgcttccattttggagttaattttagtaaaataaaaacggttacaaaaatcgacaaataattgacgcgtttttaaatattaggaggtattggcagtgaacagtacagatgtcacgaaaggctttacggagcaatttggcaagcaggcagaacacacttttttcgcgcctgggcgaattaatttgattggtgagcacacggattacaatggcgggcacgttttcccttgtgcgatttcgcttgggacgtatgcagcggttggggcaaatgatgacaatgcgttccgtttgtattcggccaatttccctaaagtgggtattattgacattccgttccctgatcttttccaggacaagcgcggtttgtggacggattattttcagggaatggcgcgggtcatgaaaacagcaggtatcaattatacgcatggcctaaatgtttatatcaacggtaacttaccggatggtgccgggctatcaagttctgcttctctggaaatgctggtaggcacgattttgaacaacttattcgatggtggttttgcaccgctggacttggttaagttcggggttaaagtcgaaaatgattatattggcgtcaattccgggatcatggatcagtttgcgatcgaaatgggacgggcaaaccaggcaactttgctggataccaacaccatgaagtatgaatatttgccggtagaaatgggcgacaacgtgattgtcatcatgaataccaacaagcggcgtgaattaaccgattctaaatataacgaacggcgcagcgaatgtgagaaagctttggcgatgttgcaaaaaggcattgatgtcaagagtcttgggcagctaacggaagatgaatttgatgaaaatacttatttgatctacgacgagacattgattaagcgtgcccggcatgcggtatttgaaaatcaacgtacgttaacggctgctaaagcactgcagtcaggagatcttaaaacctttggcaaattagtttctgcgtcaggcgtctccttggcttttgattatgaagtgaccggaattgagttggacaccttggttaccaatgctttgaagcaacgtggtgtgttaggggcgcgcatgaccggagccggttttggcggttgtgccatcgctattgtcaacagtgcagacgttgaggactttatcagtaacgttgggaaagcttatactgaaaagatcgggtatgacgctcacttttacgtagcggacattgccgatggtgctaagcaattgaattgaggcaaaaaggccaaatgttcggcttaagtaaacgcatcacaaacattcaaaggagcgatttttaatatgacaattgcagttttaggcggcgcggggtacatcggttcacacacagttaagcagttactggcagatggagaagatgtcatcgtcttggataatctgattaccggtcatcgtaaggcggttgatccacgggcccggttttatcaaggggacattcgcgattaccattttttgagtcaggtttttagccaggaaaagattgacggaattgtgcactttgcggcattttcgattgtaccggagtcgatgaaagatccgctgaagtattttgataacaatacaggcggcatgattacgctgcttgaagccatgaatcagtttgggatcaagaagattgtcttctcgtcaactgctgccacatatggtgaacctaaacaagtgccgatcaaggaaaccgatccgcaagtgccgactaatccatatggtgaaagtaagctggccatggaaaagatcatgcattgggctgacgttgcttatggtttgaagtttgttgctttgcgttactttaatgtggctggggcaatgccagatggttccattggtgaagaccatcatccggaaacccacttgattccgattatcttgcaggtggctgcaggtacccgcacaggcttgcagatttacggtgatgattacccaaccaaagatggtaccaatgtgcgcgattatgtgcatgttgttgatttggccgacgcacatgttttggcactgaaatatttgaatgccggcaatccgtcatctgcatttaatattggctctgctcatggcttttcaaacatggaaattctcaatgctgcgcgtaaagttaccggtcaaaagattccggcaacggtgggtccgcggcgtgccggtgatcctagcactttggttgccagttcagagaaggctcgcgatattctgggatggaagccaaactacgatgacattgataaaattatcgaaacggcttggaactggcatgagaatcatccggaaggcttcggtgaccgtaattgaccgcaattagcaatcacattgagaccattatcaagctgaatcctgattacacgcagatggattcggtttatttaaccaataagttgcttaatttaatcggtgatgcggcgcttgaactgccaggtgatccggatccgctgaataatctggatttaatggtcaaagccgcgcaaacgaacggtaaaattgcggattcgcaggctgcacgccaaatccttgaagcccaattaatggattttgccacgccaacgccaagccggatcaatcagttattctgggataaatatcaggcaggaccgcgcgcagccacagattggttcttcgcgctaagtcgagcaaacaattatattcaaacgcgggccattgctaaaaacctggtctttcctgcaaaaaccgagtatggcgatcttgaaatcacgatcaacctatccaaaccggaaaaggatcctaaagatatcgctgccgctgcccatgcgcaatcgggttatccggcgtgtgcactttgcttgcagacagaagggtatgctggccgaagtaattttgctgcacgtactaaccaccggattatccgtttcttgttaggcggtaaaacctggggctttcaatattcgccttatgcgtattttaatgaacatgcgatctttttggacgctattcacgagcccatggtgattgaccaaagtacttttaccaacttgctcgacattgttgccatgtttccagactattttgtcggttcaaacgcggatctaccaattgtcggcggctcgatgcttgctcatgagcattatcaaggtggacggcacacatttccgatggcgaaagcgccgatcgaaacgcaaatcgagatcagtgggcatccgcatgtttttgccggcattgtgaaatggccgatgagtgtgattcggctggtcagtgccgatcgcgaagaattaaccaatgcggctgaacacatccggcaggtttggaatcagtatactgacgaagcggttaatgttcgtgcttttgtggagggtaagccgcatcatacggtgacgccaatcgctcggcgcgtgggatcggagtatcaactggatctggttttgcgggataatcaaacgagcgaacagtatccggatggtattttccacccgcatcaggatgtacaacatattaagaaagaaaacattggcttaattgaagtcatgggtcgggcgattttgccagcgcggcttaagtctgaattagcagaagttaagaagtatctcttaggcgaggctaatgagatgaagccaatgcataagacttgggcagatcagctgaaagtggcttacaattggacaccggaaaatgcggaaagtcagttgcaagaagcagtcggaaaagtcttcgcccgggtattggaagatgctggcgtctttaaacgtgacaagatcgggcaagaggcatttggccgcttctgtcactcgctatagttgctggttgttgttaatggtcagggaaacggagggaatcgatgaccacgattacggatattgcgaaggcggcgggggtgtcgatcgctacggtttcgcggattttgaattatgacgctacactggcagtgacgccggagacacgccaacgggttctaaaaacagccgagaagttggcgtataaaccacgtcgccgcaaacgcgttgctactcaaacaacggtggcactaattcagtggcggagtgaacaagaggagcttaatgacctctattatctgcagattcagtacgctattgaagccagggccgcatccattggttatcatgtgcaaaatctgcacctggagcaattaaacgcggaaagtgttgcaaatgttcagggtatcattgcacttggcaagtacgatgcaggtgaggttgccgaaattaaggcgttagggttgccgattgtgtttgttgatcagaatatgctggcgtttgattgcgattccgttaccggcgattatgctggcccaattgcccagatcattgatcattttcagaaggtcggcattgatgatattggttttcttggcggattggaaacgagccgcagtggacgcgaacagtttcaggatgttcggaccgcgacatttgatcgtgtgactaaagctgccggaatcgatcatgccgagtttcgattgatcggtgaattcaccccggattccggttatcggctaatgcgacaggccatcgaaaaattaggtgagcggttgccacacgcatttatcattgctaatgacactatggcggtgggtgctttgcgggcgctgaatgaagctaacatttcggtaccgcagcgtgtttcggtcatcagttttaatgatgttgccgtggctaagtttacaacgcccccgttatcgactgtgcatgcagcgaccgatcaaatgggtcaaactgcagttgagttgctacaggcgcgcttgaatgatgctaaacgggttccgcgacaggttaatttcaaaagcgagttgattatgcgcgccagcagtttgtaggtggcgtcagcagctgtcagatgatgccgcaagatggctgtgcgatccgtgaaccatgatataaggaggttatgatggacgtttcagttgagcaatatggtcagtatcagggacaaaatctttatgaattaaccctcactaacgaccaaggtatggtagttaagctgttaaattatggtgcaacgctggagaaggtgcttttaccggaagcagatgggctccacaacatggtgctgtcattaccaacacgcgaagattattcaaaagaacgtaattttcttggcggtacggttggccgcattgtcgggcgaattcgggggcacgtttggcaacacggtgacgttaaagtcgatttgccgatgaatgaaggcaagaaccatattcatggcggagatgatgggctcgatcgtcaagtttacaattttcgcaccgagcaaactgcaacgacggcgagtgcgagctttacttttgttgatccggccggacacaacggttatcccggcaatcttaaattacaggtgacttacacgctgacaaacgcgaatgctttgcagtatcgcgttgatgcattgagtgatgaggagacgctgtttaatccaaccaaccatacttattttgcactggatcaaccagctacgattgatgaaaccgtactgacaattccagcagatgcctataagcccttggacgccgaacatcttccggatcaaggctggcaaccggtggcgggtactgtattggattttcgcaacgggcaaaaactgggcgatgtcatccatacgcgtgccgatcaaattacatctgaacgtggcattaatcacccgttcctcctaaaaaacggcaaagcactagccgccaagctgcaaactaaaaatcacacgatgacacttgtcaccactgcaccaagcgtggttgtttatacagccaatcatttcgatggtacaggcgttgcgcataacatcaagcaatttgatggggtagcacttgaatgccaatatccgccagtaagcggttcggatttatccgcgatcacgttgctgccaggtgaaccatttaccttggcgaatacctggacgtttgaataatagttaacgacaaaaggctctttggggatgctcaaagggcttttttgtatgctggggtatcggtgctggctttctgcttgttgaggcatggcgtttgtggagttagggaatcgaaaagatcaagtttatgcaaaccgttatattttgcagcgggtttatcctgatatatacttttagaaaatgaaagcgattacgattacaaacatttaaattgaattattcacgtgaactaatatttaaccgctgtgattaaagatggagcatgaaagtgggggggttcgccatgaaaaccggcttcttgaaattgccactcagtgtacaggggatcgtcataatggttgtctggtcggtagttagcgcgatttatatttggtacaactggccggttaataagtttgattttgtgccagcttttttaccggtgtttcctgttttgatcagttccagaagcggtgtcgtcatcactaattggcaaccgtgtatggcaattattgttggattgacgagttggtatctcatcaggcaaacgcgaatgcaaaagacaaaatcgccgctatttattcgcttgatacgtcacctattaccggtttggctgtttatggggacttgctttttattattgaatcattgggttccacaaatggggttagcccgcttttcggatttcgaacaactggttttgattctagcgattttttcttggcaaattggactgtttgggtcagttccgcttctttgggcaattaatccgtataaacatggttggagcgcgaataaatggatgtggttgtacctgctgactgcgattgtcgcgctttatatgctaagtcacttgaaatttacttttggcgggcattttatgtcgcttgtagcatccagtgacggagcaatttgggcaactttccctttttggctaggttgggcggtaggaatgctcttaatcggtctaatctggttcctagcacgttatcagtatcacaacgagaataatacccaaggctaggcctgacaaagcaagtgcgctgctatagaatggcgcactattttttcggtcaaataggattattcctaggttaacctatgcagtctttttgatggcaaaagttttgaaaaattgatgttgaacaattttatcgccctctatttgtttaaaagtgtttctttgtgttgtctgatatatcagtaatattaactgcaatccgatgtttgccaaatgtacgagtgtagtcaaatacacgtggtaaaaggaacgacgaaacaacagaatagacaatgttattttgcaaagctgaaaaagtatttcttgactactgaaagcgcttgactataattaatagtgaacagaagcgaacaacaattaacagaggtgtagatgatggcagacacaatcgaacaggatctctttgattcaagcctagtgttcattgaagatggtacggatcaagacacaatttttaagcaggtttcggacaaactcgtggcattaggggcggtcaaaccggacttctatcaacacctcagcgaacgcgagaaagcgtatccgactggcattgatatgagtgtggtcaatcctgattatccgaatgttgcgatcccgcacacggaaggcgaatttgttaatgtcaggaaagttgttccgattcggctgaaacaaccggttgaattcgcgaatatgattgatcctaatcagaagttcaatgtgagttttctgttcatgattttgaataatgatccggaaggccaggcaaatgttctggcacagatcatggattttctaacaacgtcttccgaagaaacgctcaacagactgtttcatgctgaagacaccgcaacgattcacgatattttggcaacaagttttaaaaaataaggaggaagtttgttatgactgttaagattttggctgcttgtggtgcaggggttaactctagtcatcaaatcaaggatgcgattgaaaaggaatttaagaagcgtggctatgatgtgcaagcggatgcggtgatggtcaaagatgttaatgaagatatgatcaagaactatgacatttttacaccgattgcaaaaactgatcttggtttcaccccaaacattccagtcattaatgctggaccgattttgtaccggatgccggctatggctaaacccgtttatgacaagatcgagaatgtcatcaaaaaagaaaatttgaaataatcatgtcatccgatggcgagaaactgtcggatacatagtagggagtgaaaaagtttatgcaaacgattattgatctggccaacaagatttttgagccaatcatcaagttgggtgcggctccaattatgctaattgtgttgacggtcattgcgttcgcggttggcgttaatttcttccacgcgctggaaggcggcatcaaattagcgattgcgattaccgctattagcagtgtcatcggtttgttgacggatacttatcagccagcgctaaatgcctttgttaaatcgaccggcattaacctttcaattactgacttaggttgggcgccgttagcaacgattacttggggttcaccgtatacattattcttcttggcaattctggttattgttaatttgattttactgttcctgaatcgcaccaacacattagatgtcgatatttttgatatctggcatttgtcatttacaggtctattggctatttattttggtgctaacctttttgttgctaccgtgttggttatcttcattggcgttttaaaaattatcaattccgatttgatgaagccgactttcaatgacttgttggacgactgggagaacccgatgacgacaacgcatttaaactacatgatgaatcctgtgatcatggtgtttgataagttgtttgacaaattgttcccatggttggataaatatgacttcgatgcggccaagctaaatgaaaagatcggattctggggcagccgctttgccattgggatttatctggggatctttatcggtctgatttcccatcaagatattaagtccattacgacgctggcctttatggctgcgacctgcttggagctgtttagtattattggttcatggtttatcgcagcggttgaaccgctatctcaaggggttgcggattttgctaacaaacgtttaggcggtcggatgcttaatatcgggcttgactggccattcttggctggtcgtgctgaaatttgggctgcagctaacgttttagcaccaatcatgttgctggaggctttggtattgcctggtaacgggatcttgcctttaggtgggatcattgcaatgggtgttaccccagcgctgttggtggttacgcgtggtaagatcattcgaatgattgttattggtgctatcgaactgccactgttcttgtgggccggcacactttcagcaccattcattacccacacagcacgtgctttacatgcgagtggtattcctgccactgggttaatctcttcgtcaaccaaggaaggcccgattgaacagttcattgctgttttggttggtaaagcttctaagggcgaaatgatgatgattctgtatgctgcgttggcattaattgcttacactgcattgttcttctggtatcgtcatgaaatgatgaaacggaatcagaagtactctgatgagggtaaagaggttgctgatgatgttaaatttgtcgcaacccatgccgctgctaattcagcagattaatgatgaagcatttaaaccattctgttaggtatcattgatggtgattgtgctataaacagctctagacgatgcggtctagggctgttttgctataaaagttttaaaataatttggcatacaaatatccgtaaaccgggtgtatagtaaaaaccaaccaattcgaattttggagttctaaaatggtgagggcgtggagatacttgcagagactagcatttctcaaatcatggcttgtttttatttgtgtcggactagtgggcgctgagttgacggaacttgctactaagattgatcttaatgtggcagcctatatccgcctaatcggttacttactaacgcttaaggtcgctgatgtgataacaaagaaagttgagtccaataagaaaactaaacctcgccaaaattgagcaaggatggatgcatgctgaaatgataccagtaatggaatagcttgaaggtcaatactaacgcatggctggcggccggcttgagtgttcaagcaacagagagaaaaagacggacagatttcgagttgaaatctgtccgtctttttgacaggtggatgatagttcatagtggtataccattatcgacaagttttagttcgtggatttttgattcatccgctgtgcccgccgttttttacgatcaaaaacgttatcaattttgagtaactgataaagtgcatagcaagcagttaccatgaccgctacctgggtgaatgtattcttgaaaatgccgtttaaaatggtgacaagtgtgacgatgccgagccaaattaggtaactttttttacgatttgtcatcaaaaaggacctccattaatcttatcctagctccattatagcttaattgaagcgctaacactagagaaaatgaacgtattcaaacaaaaatgcacatccacgatcatgctttacgctgacatcacataaaatgaagggcgatagtagtttactaatcgagaccagtaaacggctttcgtccttcgcgtctaatatgaatcttccgtacattgtttaataaatcggaagttttaagttgactttagcagtcaaagtttaacggcagcagtgtaaattcgcttaaagaattgatccatagttgcttgaggcttaagcacattggtcaaaccgacaacagctttcttttgtgcttgattaatgcccagcaggccagtgtagcctagaacgctgccggtgttaccgagccatccgtctgccagcttgtaccagccatagccgtatccagcttcggcggccttaaagatcgtcttccaactggccgcggttagtagttgacctgtcaaaactgcttgggcaaatttttctaagtcggcgaccgttgtgacgagtccgcgatcggcttggttttcattacctttaccagccacattggggttgccggctatccaatgataactttctgcaaatgcgtgggccgtgccgagttttgtgttggttaagttcagcggatcatagatttgtgcttttaagatcgcctcaagtggccgttcattcgtcacgcgatctagaacttcgcccaacagcagtgcgttcgtgctgctgtacgcggttttactgccgggtttaaagttcagggggagatcatcaaccacagccagcaccttggctaaatccatgttttgaccggtatgttgattgatttgcagcgctaaccgttcggccggcagcgtgtcgggagcgttggctttaaatggtgcagccatcaaagttagatagtctggaattccgctttgcatggtggctagttgcgctaaggttatttgctcggcctgttgatactccggaatatacttagacaatctgtcagtcagcttgacggtgccggcttcaacaaactgcatgagtaaaacaccgaagaactgttgggtgacagttccggcaccgctcattgtatgggatgcaaacggtaccttcatgtcaatatgggaaaacccctgcgcgtctgctgttaattctttatcgggggaaacaactgctacggcgccgttatagtgttcggtttgtaaggaacgactcaacggtgattcatctttaagaacttctggtgttaccattttgatgcctccaagcaagattgacttggtcgaactttagctgtgttatctgaaacgtggcgttttcggccgttttggttgtgttttaatctaggtgattgacagtgactagcttgccagtaacgccgactttgatgccttgattgatcttgtcggtgcggctggcatgaacgacttggaacttgttttgcttaacaatcaatgggttgtcggtgtgatagccgactggtaacggttgattgctaccgcgaattaacatgacaataaatttaaatccgcttgcatgagcctcacagggactgtaatgcaaagtgtcgctgaagaattcaaccacagtgccagcagggacgaagaatagcttagcgtccttttccgcgttaaattgaccatcatgcatctgcccgcgtttaccgatcaccatcacgacatcggtgaagaaaacattcacctcgctgccttggtgaaattcgactgctgtcaaagcctcggcgtgtccggcacattcaccggcttcgattggcaggccggcaaaaacatcacgaccaatctgttggaccaccgggagcttttccatcgcggggttggaaggaatatagcgattggcagcagtcggagcggggatggggacttgctgatccatgaactgttggagttcgctgacgtcatactgtgtataggtgaccccgtaatcggaaaacgctgaatcggttaactgatagatcgtcttatccggattcagagcttgaatcttttcgagagttgacatttgattgcttctttcctagtttaataagtttcaatggtgactttagcaaaatactcggcaaatttggcggggtcgacaaaaccggtttctgcttccatggtgttgagcatgccggttgtcattgcggttttcataatgtcttcatcggacttgccatcatgaatgcccatcgccagaccggcaagtgttgagtcccctgagccaacgggattgacaacctgaatcttaggaatcgcggcgtggtagaacttatcttgatgtttaacaaaagcaccggctgaccctaatgaaacaacgatccagtctacgccgtcaaaaatcggatcagtgagagcttgtttcaaggttgcgtaatcagtcttatccaccggacgattgagcaggccggcgagttcctcttcattaggcttgattaacagcggcttgacgggtgcttcaagggctgatttcaaggttgcaccggatgtgtctagcagcaccttcacgtttttggcaccggcatgggcaatcatttgcgtgtagtaatcttcaggaagcccttgtggcattgagcctgaaatcgtcaacaaatcggtctgatcaagtagcttatcaaagtggtctaggaaggcacttgcatcttcaggcgcgatggttgggcctgcttcgagaatttcagtctgtttgccgccatcgtgcaataccgcaatcgaactgcgggtttcggcgtcaatgggaaagaagttatgggcaatgccatcgtgatccaactgattttccagccatttgccaaaataaccgccgatgaagccagtggccgtgatgtcatgatcaagcagatgaatgacgcgggaaacgtttaacccttttccaccagcagttttgcgaacggttttaacccgattgaccgtgtcgattttaagatgatcgagtggataggaaacgtcgattgagggatttaatgtaaccgttaagatcataatgagttttcctccaaaagtgaacgtgagcagattgcctgctaacgtcatattagtgattgtgttagtcggttttcggttaataaaagccgacccctcaaggaatcggcttttatggtcttacacgaactattcgtggctgaccttgtccgtccaaggagtagcagtatccgctagaaccttgttcaaacgatcgatgttagctttaccttccgtttccagccattgcttgccggcagcttcgccttcagcagcaaatggcttaacgcctggcttccaggttgcccggccgcaaagcacaccgttaaaggttgaaccggcttccttagcaaatttgagttcttcaaggaacaattcgttggaaacaccagcggacaggaagatgaatggcaaatcggttgcgtcggactgggctttgtaatatttggcagcttcttctttggtataaaccggggttacgccttcatcggtgaagccttcaacaaacttctgatcaaccgggacttcgacttttagaacggagacattgtactgcggtttgctgaattccttggtgatcttgatgaccttgtccggcttaaccttagcccatgcagcggtgccagtctcgttgagcgtaccatcataggaaaccagttccaggaatagtggcaaatcattagccttagcttcagcaccaacccgttcaacaaacgcatatttacgatcgttgatactatcaggttcgtcagggtcgatgtatagcaggaatttgactgcatcgccgccttcgttcttgatgcgcaaagcactttggttatcaatcaaatccgggaaacggccaggttcagtcgcatcgtagccggttttttcataggagagaagcaagccggcttgtggtgcacgaactttggcagctggcaggccatattccggatcaagcaaaattgaactggcgtatttggttagttcttcagaaaccgctttcttgaaatcgacaatggtggtttcatcagctggcttgttcgctgcagctgcaagcattttctttaaagaaccgcgttgatcaattgccagcgcggagataacgttattttcgtcggaaagtttttgcagatgcttgaattggcccgcagtaagggtgactgtcatgtaaaaatgcctcctaggattttaaagtttaattagtcgtgatagacgccttcagcccacttttcaagttcagcatcaaagaaatgcgggttgtctttttgatcaggatttggtttcgcgatgttgtcgatcttatcaatcaactttttattttcgggcgtttctttgtaggtggcatccagataagctttgacaatatcttgaatgaggtgaacgccgacaactgcgccaccgatacctaagacgttagcgtttagctgttcgcgagcatagacggctgaggtgacatcatcacacatggccgcgcggatgccttcgtttttatctgcggctgttgaaataccgatacccgtaccgcacatcacgatgccgagatctgcacgaccatcagcaacatcttcagcgaccttcttaccataaatcggatagtgggtacgatgcgtgtcataggtaccttcatcaataaccgtgtaacccatgtcttttaacatgtttgaaatttcaatcttttgcatcgtgacgatgtgatcgttaccaatagcaataatcataagtgtgaagcttcctttctatattgggtgaaagacggcgttaaatcattttttcaagcatgtcgagccggatttgatgacggccgccagcatattcggtatccagataacgttggatgatgaccagtgcgcgatcataacctgtaatgccggtaccgatagcaattgccttggcgccattatgttcagccgtcatgtgggcagtgttttcttcttcaacgaccgcggtaaccatgcctttgactttgttagaagccatggcagaaccgacaccgtaacgatcaaacatgatggctttgtgcgcatcactgtttagcagctttttggtaactgccagtgaagattcaacaaaatcttcggctggttcgggcgtcacatccgcgacccgatattgatgttcctccaaatatttcttaacttgttctttcattgcaaagccatctttgtctgcaccaataatgacatccatgatctattctcctttttttgttttgtctgtaataacatgcgtatatgtgttgtaatgttgccgatcgtcggcgctgattccgggatcagtgataagcccgtctgtttggtcaaggtcgtagaaactgtagaaatcttgccgattaagtttgaaatgatccgcagcaacaaatttcatccccgcattgttcaacgcaattcgctgcgtctgaccttcttcggggctggcgttactaatgtgattgtcagcgataccgttaacactgatgaatgctttggtcgttgtgaggtgagctaacatctcatttgccaagcttccgataaaggctcctgatcgttcgcggagctggccgccgatcagttttaacgagaagtaatcggcgcggtcctgaaagctttggaagacgggaagactattggtgatgatccggacgtcaggtttcttgaggtactgtgcaatcagttcattcgttgtgccgggcccgatataaatcgtatcgcctgaagtgatgatatcagcaatggtagcggcgattttacgcttttcgttgacgtgaatggaccgcttctcatttctggacaattcggttagcggtttaaaatgggtactctgtgcgccgccgtgaatacggactaactcatttctttcagcaagctcttccagatcccgtcgcacagtcatggttgaaacgcctaaactttcaccaatttcgttaacggtcacaatccctttatgatcaactaaattacggattgttagcaagcgctcgtcttttaacattgactcacctcacaaaaaaatgttcgttgttgtttgattttgtttcttattacagtccttaagttaccactggctacatgattcgtcaagaccatagtcgcggtgtttacgactatttttatcgcgcgtttttataaaaaaagaaataaaaagcgccatggaaatgtgcagatacagctgattattagtaatcgaataaacagaagacaacaggtacacacagcaatacggtgccacccaaatatcggttgatgttttcacggatcaaacgactgattcatttggcgtcaattgaccaagaacggaactcaagaagcgcaaaaaagccctaaacatttgcatgcttaggactgtggttacattgttatctggtagaattaattggtaataacttgactattagtggcagtgtcactgttaaaatgcgtaatatacagtagcagtcatacgttaattaagctttgaaagttttaataaatcagccgcttgctggaggacagcaatgcgtggcgtgacagcgggcgatggtggtgttgtccaccccgcgagtgcaaaggcaacttttgcatcggctgcggcttgggcgtcagtcggcgtatcaccgatgtaaaccgtcgtgtcaggttggccgcctaaccggttacgtgctaaggtaatcggatcgccaaagggtttgttgcgtttggcttcaccggcgacaaccactgtttcaaaatacggactaaagtgatacttcttatcttcttcgaggaattgcggtttgtcttttgaagtgacgagaccaagcttatagtggcggcttaattgcgttaggactttttgcatgttggggaaccaagtgacatggttgagaaaagctttcgagtcttcccgccattcttcatgcaccacgggaatttctgctggactgaagcctagctcttttaaactatcgacaccagcgcggccattggtccaagtcaagtcctcaatggcgatttcgcggccatggcggcgtaaagttttttgaagcccgtaaaggtaaccttcaacgttgtcaagcaaggtgccgtcaatatcaaagataaacgtattcatattcttcctcctataacgcttattattgtaacaagtaagcgataacaaagaaaggcgtaaacatgcgatttctacacacagccgattggcatattggcaaaaaactaaacgattttgacttattggaagatcagcaggcggtgtttgaacaattggtgaccgttgccaagcagcagcaagtcgatgccattgtcattgccggcgatttatatgaccgcgctttacccagtgaggccgcggtggcaacgcttgatcatatgctggtaacgctaaatcgtaagctgaattatccattgttggtgatttccggcaatcacgactcggccgtccgtctacgtactggccggtcatggttttccgcaactaagatgtacgtcaatacgcaattagccgaggcatttactcctgttgaacttggtgacactcaatttttcttgctaccttattttgaaccgtttgctgtccgtgattattttcaggatgcaacgattaccaatgtagcacaagccattcgcccgattgttgccaaaatgaaagcccagtttaaacccgatatgcggcatattttggtgagtcatttttttgctgccggtagtgatcatagcgcttcggaaacaaaggttaacgtcggcggattggatgcagtcccgattgatgacttggcagcgtttgactatgtggcgttaggtcatttgcataatcataatgcgctgcacgccgaacctaagattcagtatagtggtgccttattgaaatatgcggtcgctgaagccaagcaggagaagggcgtctacattgtcgatactgacacgatggcgcggacgtttattccgttgacgccacaacatgacttgattgagttgaaagctagctatgcggaattgactgatccggatttttatcgccagcaggaccgcgatgcttatattggcgttgatctaaccgacacgcaggtgattcctaatgtcatggcccagttgcggaagatttacccaaggattatcagtctgcgccgtgaaaatggggtcaccgccgtaaaaccgttaaaacaacggcagcgcgatctcgatccgctgagtttgttgaagaatttttatgctgagatgatgcaaacagatctgacagcggatcagctgaagtgggccaaagcgggacttggtgaagcagaaagcgggcagaaacagtgaaacttaaacaattacacatgcagtttttcggaccctatgcagatgaaacggttaattttgaagattttcgcacgagcccgctattcttaatcagcggaccgactggcagcgggaaaaccacgatttttgatgccttagtgtatgcgttatacggcgagacgtcaggggaacgcgatggcatgcagatgcggtccaactttgccagccaccatgatctgactaaaattacgttaacttttgatcatgacggtaaacattatcgggtagtgcgccagccgcaacagatacagcaaaaaaaacgtggtgatggactgactgaggtcaaagcaaaggccttattggcgattgcagatgctgataagcaagtggccgaatataccaaaaaaaatcaggtccaaagccagcttgatgcaattttacatcttgatgctaaacaatttcggcaaattgttttactgcctcaaggagactttcggcgttttctagatgccgacagtaatgccaaagaagatttactgcgggatttatttgggacccagttgattcaacgctggcaaacagctatgcaagcacaaaccaagcagcagggagccgcgattcaggatcaggaacggatgctgaatttgctgacgtcacagttcgaatttgacacgccgccatctgacaccgcaacgatggctgacaaattggccttgatgcatcaggatgtaacgcagcaagcaacaaccgtcaccaacctgcaaaccatggcagaccaacgccaccagcgctatcagacggcccagacagctcttcagaccggtaagcagttggcacaagcatttgaagaccgaaaacaaactgctgcggctttggcacaacttgctgaacaaaagcagacgcaggaagaccgcctcaagttaatggagcggttaacctgggttcaagaacacgaggcagctgagcaacgggtacaaaaagtagctcgcgatttaactctagccaagacgcaattagtacaaacccaaacggcaataaaaaccactcagcaggccatgaaccaggcccaaacgaaattaaatgatttgcagcaacaagattcagctattgaagcccaaaagacgcaacttgatcaactgcaatcggttaaacagcaactcgttgcaattgcggctcaagaaaaacaagtagcccaacaaaccgcagcagttgcacaggcagaagcagcgtctgtacaggcgcaaaaaaaattggcagatgatcagaaaaaacttgatcaatatcaaaccgagttgaaccaactagcggtgtcagatttggcagatcgagcagctgaccataaacaattagtggcagcgctgaaaccggtagccgctaattatcaagacgcacatgctgaagctgaacaacttgccagcaagctaacggacacaaagacgttactgattcaggcgacaaatgcgagtcaatctgccgagcaacagttgaatcaattacaacaaactcagatccggcaacaaattgcccaattggcggctaagttgacgcccgggaccccttgcccggtttgcggcagtgtcgagcatccacacccggctgtagccttggatgaaccgctggtgactgaggctgaggtgaaacgggctacccaagcgcgccagcaagcagcggcaaaagaaacgactatgcaagcccaggtatccaacctagaagaacagcacgctgccgctaccaaaaaggcagatatagcaaagaacagtttttgggcacaggtgagctcaagcatagatgcagtgagtccccaagttgaacagccagatattttgaaacagctggcaatacttgaagaaaaagcacagactgcagttcaagcgttatccgcggctcagatcaggcaggatgcattgagaaaagcaataacagttggtcaaactgttgtgagcgcagatgatcaggaaattcaagcaacccaaagtgcgcttaatacagcgaagattgaggcggcaaaagctaacagtgcactgacgaccatgaaagcaagtttacctgcaggcacgactgatcttaagacagtaaccgaacagtcgcatgtcttgactgaagcaatcaagactcaccaggaacaattaaaaacggcgcagcgtcaattaagtgagttcgatcgccagttagcaggcttacatgcagatgaacgccatgctactgaccagatcacgacactgaaaaaagagcaccaggaagcagaagatgactttttatctgcagtaactgattattttggttcggatggtgtcgcaaaatttgctgccatgcgcgagaaattagggcaattaccacttttgcagcaacaaacgcagcgttataaggatgacgttttaaagcagcagacattactggcagccgctaacaagacgattggcaatcaaccgcaacctgcccttgatcagcttgaggctcaagcaagtgcagctgaagtagaggcaacaaaagcacaaactgccttcattgaagcaaagcagaaacatgatacggcccaaaaattgctcaaacaggccgcagatattttagcggccaatcagactgctttggccgcctatgccgacttgcagacactgaccgccgttatgaacggcaatggtcccaagaagcttagtttggagcgctacgttttacaagcctatcttcaggaagttttggatgttgccaacacccgcttgcaagtgctttccaatcagcgctaccaatttgtgttgcacacggatttgggaactcaaaagatccattcgggtttggaaatcgatgtttacgatgatcaggtgggtgaacgccgcgcagttcaaacactatctggcggtgaaagctttattgctgcgttgagccttgcattggcactgggcgaggtgattcagcaagaaagtggcggcatcaatatcgatgctttgtttgttgatgaaggcttcgggagtttggatactaatagccttgatgtggcaatgaacgcgcttgaatcgctagaaggcgagtcgcgattgatcgggattatttcgcacgtgacggaattaagggataatattcctgatcagttgcaggtgcagccagcagggacaggacggagtcggattagggtgatgcatatggcgtcggcgtaagatggctgatgcccacttacactccggtttctaagcggccctgttcgcgctctgaaacgcgttcgccaacccagaaacctgcacataaggacctcagaccccaatggcaaagcccggccattgggatctgaggccacttatgctccggtttctaaccgggttggctcacgctctgcaaaattctctgtgtcatttttgtgtttaagtggtataacagaagttgtaagggttataccttctaactcacaccaaaaagaggcgagatcacatggcatcattgagcaaagaacaaaagaaagctttgatcgctaaggtcgaaaaggagcgccaagaacatcctgagaagaagccaaagaagtctggcttcgagacgattgacgaagaagcagaacgccttgaaaatgaaaactaatatctattaagttatgagccgcaaacatatacttgtttgtggttcttttttgtaagcgcgagccagcgcggttagaagtcggagtgtaagtgtccttgggcgtgatggccggtctttggccattacgctcaaggtccttacacgcagacttctgcgctggggagcgcgttatagaaagtgagcgtgagtcagcccggtcagaagccggagtgtaagtggccttaagcgtgatggccggtctttgaccattgcgcccaaggtccttacatgcaggcttctgggctggcgaacgcgttatgctggaggctgcctgattacttacaactctctggaatggcgaagttcgtaaatgacgatagctatgaagattcgaggtattgcaggaccattttgacatcatcggtatagctgctattgacaagaaaaataaagtgaaccattgccgcgtttcctgttttaaaaactttttttgaaaaaatttagcacttggcgttcacaagtgctaatttgtggtataactataggtggagcgagggagaaggaacaagagctccggagctaagatcgttctcctgaatcccagaagtctctgtttgaaaggaagttatctgttatggctaatgaagttatgaatcgtcgtaataatgagttgatgaatgatgtaaatgatccgttctttgacaacttggcacgtcggttcttcggcccggtatctgactggatggattgggcaacaccttccattgccagcacggccgtcaacggattgctgactgacgttaaggagaccaaggacgcttacgaagttcatgttgatgtacctgggatcaataaggacaacatcaagctgaactaccatgatggtgtcttgagcattaatgttcacaaggacgacatcacagatcacgccgacaagaacggcaacgtcatgatgtccgaacgcaactatggcacgatgagtcggagctatcagttgccaaacgttgatgacagcaacattaaggcaagctacaaagatggtgttctgaacatcacattgccaaagttaactgaatctaaggagtctggtcacaacattgacattcagtaatgtttatcataaggcggctcaagattcacgaactgcattgcaagcatgatcagaagcggcaccactgtcgttgatgggcaaaacccagtagtaagcaaaaatcagtcgatgagaattgcagcagttgcagtgatcattgaaccgtaagaaatcagtcccatgatgcgtacgatcgtggggctgatttttttgctctttttgcaccgagtgagattggcctttaaccgattcgatttacttttccaaattatgaaactccatggtaagctattttctatgatgacaaataacaaattaatggattggccgcctgaaaaaattgcggcatttcagcatgcactcttggattggtacgatcaccatgcacgggcattgccgtggcgtcaagaccatgacccttatcacgtcatggtcagcgagttgatgttgcagcaaacccaggtgcaaaccgtcattccatactataaacggtttatggcgcagtttccgacagttgaagcgttggcagcagcaccggaagcgacggtgctaaaagcttgggaagggttgggctattactcacgcgcccgccgcttgcaacaggcagctaaacaaatcgtgaatgactatgacggtaagtggccgaaaacggctgcggagttacagacactggctggcattgggccgtatacagctggggccatcgcttccatcagttttggagaagtcgttccggccattgatgggaacgcatttcgtgtctttgcccgactgtttaaagtggatgccgatattgcgcgcccgcaaacccgaaaagtgttcgatgacttgattcggccactgatgcccaagaagcggccgggtgattttaaccaggccgtgatggatctgggttcaagttatatgtctgccagtcatcctgatcccgcccattcaccggtgcgcgcgtttgatgccagctttcgcgatggcgttgtgcaggactacccagttaaaaccaaaaagccgcggccggtcattcatcgttattttgcgttggtgattcgatcaaaggccggttacttgcttgaacagcgtccaggtaaggggatgttggctgatttgtggatgttcccgttaattgatattgccgaccttgaagccactatggaaagcgaacagttggatgaaatcagtgctcggtttgcagacttgtcgggaatgactttaacttttgctgatctcggtcgtcctcaggtgcaacataccttcacccatcaacgctggcaattgactttaatcggagcggatgcagccgctgccgaattaaaatttatgccagcacggtgggtaccggttgaagattttggtaaaatggcacttccgaccgttcaaaagaagcttaatcgggcattgggattaactgagccgggataatcatctggtgtagcagtgcaagacaattgttaactggtttggaaaaagcggcggtatactgtggtcatcaatgaaagcggaggtggtcagattgacagttaaggtaactaaagacgtcacttatggcgatgcaccgttacaaaagctcgacttctatgaaccggataagccaaatggagcagccgttcttgatattcatggtggcggctggtttcgtggtgaaaagcaaaaagaaagcgatatggctaaacggttcgccgcattgggttatcacgtggcggttcctaattatcggttggcaccggcagacttttttccagccgcacgtgatgacgttttagcggctttttcatggttgcgcacccatgctcaagttgagaatctgggtgtcttcgggtcgagtgccggtggatcactagccgttgatgtcgggctggctgaaggtgtaccaactgtttcttggtcgggtattttcgacattcaacagtggtttgcggatcatccagcagttgtggctcaacccgatacgaaaacggattttgttaagacggccagcgccgagattgatcaaggcgggcgcaatgatccattttacaagtggttcattttgaattatgtcgatgcagatgaaacaaaattttcccgggttgagccgtttgaccggttgacggctgatgcagggccgctgtacttggctaattcacaggcggaaattattcctgttagtgggatttatcgactggctcaagcagcggcaaaagtcggtgtgccggtgactttgcaggtaattcccggtggtcagcatgcagaagggtacttgtcggcagcgtggccggggacagtggcgtttttggcacagcatttagtgaagggatcaatttgaaaacattagtgattgtcagtcatccagacattgaaaaaagtaacacccagcagtttttaaaagccagtgcggcaaccttgtcgcaggtagcgtggcatcatttggatgttaatctgccttttgatgtgcccgctgaacaacatgccattcaagctgctgatcgaatcgtcttccagtttccgttgtactggtatatggcgcctgccagtttgcatcaatggctgacagaagtgtggctgaagcagtttgtctatgatgcgcatggtgggttgctgaggggaaagtcactgggattagtggtaagtttcagccagccagaagccgcatatcagctgggtggtaaggtgggctttagcctcagtcaatttttaactccgtatgcggcgcttgcagaaaaaacgggcctggatttgctggctcctttgacgatttcacagtttgccaatcaaacggatatggctcaccaacagttgcttgtgcggtaccagcaatatctgaccctagttcaccctgatgatcctgacgaacaggcgcaatggtatattgatcgcctgcaagccaacccggaaacgagcatgctggcggatcaacttgccgcccaaaccgatgaaattgaccggttgcggctgactttacatgaattaaaggcaggtgagtcagagtgacgaccgatgaacaatggcttatcgagacggccgcccagcatcaaaaagacgcggcatcgtatgaaaatgcagcgttttttgcggctttacagacgtttgtcgccaagcaagctgagcgccgtgaacaatatgaagccgaaattgatgggcgcagttggaatcatgagcagtggtaaagttcagtctgacgacggagggacattgcaaaacgatatgctatgctttaattagcataaagtgttggaacaacgtgggatttaagcgcgcggttcacgctcacattaacgcgtttgccggcgcagcaatctgcgtgtaaggacctgagtcgcaatggccaaagagcggccatcacgcctcaggccgcttacactccgattgctaagcgcgccggctcacgctcatattaacgcgttcgccggctcacgctcggaaaaaagggagtatcaaaaatgcaagcaatgtttgatcgtcttcaacgttggtcgtggttgcgcggcctgcttatgattttgattggtggctggattttaattgatccgcatcaggtctaccgaagctttctgtggattgttgccgctgttctgattattgccgctattcctaaattgattgatggattttctgcgcacaaaagttctggaacttatgggacatcgctttttgccggaggattttacctcttgctggcgttgctgattccggcaatcgtcaagccgctcatgagtctgggaccgttgattatcgggattatcttgatgatctacggggttaataagattatcggcgcccgccagcaacagcaatatgtgaatgtttcaccatggtcgacgattatttatggtgtggccttgcttattatcgggtttatcatggcgattaacccatttaagacggtgatgatggtcttcgccttgttcggcggcgtgcttgtggtaatgggcattctgcaacttttcactaaaaaaagcgattaagctgaccaaacaaaaagccacggacgaatttatccatggctttttatattcgcatcacaacttatggctaactcacaatataaaaaagcaggacccatgtatgcgcgatatcgtcgcagcattggtcctgctttttttacgcaatggtgacaaggctactcaacgagctgttctgcggttagtcatcggtttattgttgtggatacacaatttgattagcccaatgattgatgggaccgtatttgtgtccaaccggaattggatggccaattgcctgattagtgaagcgcttggcaatccgaatggcgtcttcaacatcgttacctttgccgatttcggcggtaatcactgccgaaagtgtatcgccggtgccgttaacgcggtccgtatcgtgataaggttcgctcagccaaaaagatttgccactttccagcaacacaaaatcccgaacttctttttgagttggatcatcatgggcaccttttaatacaacgttttttgctcctgatgcctgtagctgatgggctgcagcttctgtatcagcatcagtgtcgagtttcatgccggtaagatgttctgcttcatagtgattcggagttaccacggttgctaagggaatcagttcatttttgacggcatcgtaggcatcttgttccagcagcatcgcgccgtgcttcgtgataatgaccgggtcgaccaccagcgcaccgaagtcatactgttgccagtttttgataatcgcttgtaccaatgccttatcagccagcattccggttttagctgctttgattttcaggtcagcagccaaggatttgaactgcgcgtcgatgaacggcagcggcatcaccatgctgtcttggataccataggaattaccggcaaccgccgcggtcaaaacggtcgcaccgtaaacgccacgcatgaagaaactgtgcagatctgcttgaacgccggcactgccatcactgtcagtaccaccaattgtcatcacttgtggaaattcgttagccatcatgatcatctcctgataaaaaagtctgagctctcatcagcatgtccattcattggaaggtttgcgctaatgccaatcgttcctctgtacggttagttaaaggctcgtttttgaggtaaaactgctttgagccattcgccaataaatgggtattgccgatttaattcaattacctgagtttccggatctgggtatttcaggtaaatcatattattgtccggattaaccattacagtaaagagtttttgattgggcagcggtaattcatatacaccttggtgactgccttgccgcatcaaaatcgcattactggaagcaatgacaaacagttcgtctaacgcaggggagttcgtcccggcagaaacccgcacgaccagcttgaggtgatggttgaccagttcttccggaattgtggtcgaggcccattcaaatcggtcacctttaacctcttcagaacctaaatctttccaatcatggccgtcttcatccagaacctggtagtcgagaactttgctgtcccgatcaaggttagtctgaatgctgaattcgccggctttaacaaccgtttttttggcgactaatggtttgagattatcaaagcgggttttaaagtgtaagccgttgattggctgcaaaaccgtttcgtcaatggttgcaaattgatagccgccttgattaagggccttggttaaagcagacagtgctttgatttcatcggcatcgtaaggcagcgcgttgctgtcgcttgccgtaatttgtaacaaggttggcaaattgaaggctttcagggtggcgcttgggcttagcggatcaacaatggttagcaggggctgattgtcttcttcagttgcctgaataagcgtgatttcactgtggtggggatcgctagtcgtgtctttaaaccacaatgtctgtaaaaaattagttggaatggcagcaatattttgcaacgtttgataaagtttgtcacgcatcaagcccgtgtaacttgctagtaacgcggttaacgcatcatcatttgaaccccataaaggcgaatcggctagtcggtcagcttcggtttgatacgcggtgctgatttgttgacgtagctgtgagacatttaacggttttgcaattagggcagccaaatgtgtgtcattaagattaagcatgtgtgcgccctccttcaagctttaatgactgcatgaaatcatctttcaagttggcaagaacattttcaaattccgcaacggaactgtaggtgctcaagacagcttggtattcataacgggtaatggctgcagaaacttccaattcgcgtttacgtttatcgaaggcgtcatcagccgccagcttttctttatcaaagcgggctttaagttgcgaggcatcggttttggatgcatgggctgccggtgcatcggattcatcacttggatcgatgaaatttttcaaaagtccgcggaagccaccgttaccttgggcggattgatcgcgttcaggtgctgcttcagcttcaagattatcaatttgtgtatgcagtgaatcaacatcgtggtaaacttccttgcgcatggcgtccaactggcgatccagatagtgatcaggatcatcggaaaaggcttccagttgcggcaggatcttgcgttgctcatcggttgactgggtaatcgcgcgcaaaatgacgttaatatgaccaaaatcgcggcggtgataccagttaccaaaataaatcgtcccttgatcattgacttcaaaaaacggaatatgctgccgcaagaaatcaataaacccgatttgcaaaaaatcatgcagttcggcttgggcgcttttgtcgtaagctaagatgtagccaggcgcttcttcaatatcgaggcgcaaattctctgctgtggcatcgattccctgataaaggcggtaacgtgattttttatgccaagcatcggtaaaatcactaaagaatttcttttggtaagtaagactcgtttcgattgacatataatatcctctcacattctgtccaattattttaagtgtaccgcataaacgggcatataaggaagttttcttctcatttagagctaagaaggtcaaatcaaccgttttaaatggatgcatgctaaaatgagctcgtgtagggtgttcgggtttacgaaatgaggtaagaaaatgaaaattgcagttttgggtgcgactggacgtgccggaagtgccattgttgccgaagcgagaaaacgcggtcatgatgtgttggctgtcgtgcgcgatccgcaaaaagctgcgcgccggctgggccaaaccgttccgacgctggtgaaggcaccactagatttaagcgaagcagatctagatggcgttgatgccgttgttgatgcgctgagtgttccgtggggctcaggccgcggctatttacatttggattttgccacgcatttgattagtttgttgcgtaatgcggatacgttagccgtttttattctgggaagtgctagcttggcaatgccgggtgccgatcatccgatgattcttgattttccggaaagtgctgcgagtcagccgtggtatgacggtgcgaagtttcagtatgatgaatatcgattcttgcagatgaccgataacgttaaatggattggtatatccgccagcgaggcttttccaagcggaccggcaacgggttatattgcaggaaaagataccttactagttggcgaagatggtcagagtcacatcacaacaggtaatatggccttggcaatcttggatcagctagagcagccaaccgctttgcaagatcggataaccgttcgcgatgtggatgaatgagcggtaatagcaaccaaaaaaacacggtttacgcaggggcaaagccttgtgtgaatcgtgttttttggtgatttttgagatgaatgagtttggaaaacgatgggtggttagccgcggtatggtgggttggtagcggtggttatgcgcttatcaactgataaaagtttggtgatatagtttgggtactagactaatttttgtggtgttggaggtaaggatttttagtttaagcagttaagggaacttacattgcgttctataacgcgctcacagtcgcagcaatctgcgtgtaaggacctcagacgcaatggccaaagcccggccatcacgtctgaggccgcttacactccgacttctaaccgcgccggctcgcgctcaacaaaaaaacaccgcgtattgggggtacgcggtgttcccgtgtcagcgccattgggggtggagctgacttatttttactttggaggagtaaaaatgaaaaaagttgggttggggtagtagtaagaagggggtaaacttccttgctacagttaacagaataatcgctaaatgtgaactttttatgacgttctggcataaaattttagaacggacgtttttttcgtcatcagcgcactttttcggccgaatgactagttattaaaaagaagctgtgagatgtcagtttcttgcaataataatcaatcaaaatgataaacactgtcagattaaaggattaatcatttcttttctacaaaattagagccgttaacaggaaatcgccacaaaaaaacgttatattaagggtggaaatggttctaatagaaatttgaaaatggggtaatttgatggacaactcagcatcaaacatcaatgttgatcaactgaccactgaagagaaaatgaaactgacttctggtaaggacttctgggcctccgaagcacttcctgatcataagattccgagtatccgaatgagtgatggaccccacggcttacgttaccaagccgctgctgctgaccatttagggattaatgacagtgtcccaagcacaagttttccaaccgcgagtgccagtgcggctacttgggatccggaattgattgccgcaatgggggcagcgattgggcttgaggctcagagtctgggagttgatgtcgtgttgggccctggggtaaacatgaaacgcaatccgttatgcgggcggaacttcgaatattttagcgaggatccatacttggccggtaagcttggtgcggcctggattcaaggcatgcagaagcaaggaatcgctgcctgtctcaaacattttgctgcaaataatcaggaaaatggtcgcttgtcgtccgattcgatgattgatccggtggcacttcatgaaatttatttggaggctttccgcattgccgttactgaaggccatccagaatccgtcatgtgctcttataacaaagtaaacggtacttatacgagtgacaatcgctatttaatgacaaacgtgttgcgcgatcaatttgggtttgatggtgcggtcatcaccgattggggcgcgttgaacgacaaagtggctgcgcttaatgccggaacggatttagaaatgccaggtgatgatcatttatttgacgatgaggcattgaaggcgttgcagtccggtgaattgcagtcggccagtttggatcgtgcagcagctaatattatcaaaatggcgcgtaaacatcggcctagcttccatggtacgcgtgaagccttattacaccaaaatgctcagttagcgcagaaaattgcggaaaatgccattgtgttactaaaaaatgatgaccacattttgccattgaagaccagtgaatcattagcggttgttggtgagatggccaaggaaacccgctttcaaggtgcaggttcttcccatattcaagcagctgaacaagtgtcgattttgaccggaatcaaacaggccgggctcacttatgatttcgcagccgggtatcgacttgatgatgaagttgatcaagagaaaactgcccaagcgttggaattagcgcggacgcacgacaaggttatttttgttgccgggttacccgataactatgaatcagaagggtttgaccggaagaacatggccctgccaaaagtacaaaacgacttgcttcaggccgttgcagcgattaatccgcatgtcattgttttattggtcgccggagcaccggttgagatgccatggttagatcaggtacaggcgatcttgaatttatatttaggcggggagcatattggaacggcaaccgcacgggtactgactggtcaagtcaaccccagtggcaagttagccgaaacctatcctaagcgctatcaagacgttgtgtcagctgagatttatgacaaacacacgcgcgcggttccttatgtagaaagttcctatatcgggtatcgttacttcgataaggcaaaagtaccggtggcgtttccgtttggttttggtcttagttacaccacttttgcgatcaagcatgtacggcttgtcaatgacgaagtaaccgatgcacagccggtgacggttcaattagatgtgaccaatacaggggatatggacggggcagaagtgattcaggcttacgtcaaagaacagcagccgcgtccattacggccggaaaaagcgctaaaggcattcaagaaagtctttattaaagctggtgaaacagtcgcagttcagttggaattacccgcgcaagcatttaaagaatggcaggaaaagacccagacctgggtgcttcctgccgctgccaagtcggtagcaattggcacaagcgctgctgatattgtggcaacgttgcctgttcacttaaacggcaccaacgtcaccaatttcaaaaatattcctgattggtataccacactatcaggcaaaccgactgtccatgattttgaacagttaaccggtcaaaaggtgccaccgcatcatgagtttgtcccgggagaattcacgcgactcaatacaccgcgtgaaatgcaaaaacactcatggattgtccgtacggtaactcggatcacggtccgaatgcgaacaaaagactatcttgacaaagaaggcccggaagctaagtttcagcaagcaattgtgctagatacaccattaattcgactggcccagcaagcaagtggcattttaaagttaagcatggttgatcggttagtcgctgcagccaaccatcaatatctcaagatgatttttggataacaagtgtattgtaaaataattagaatttttccttgacgcggacaaatgctttccagtatgcttaatcccatacaaaaccgagggagtgttcaccgtgatgaattatcggcaaacacaactgaataacttttttggcagcttttttggatagcggtttgcactcggatgcaaaccgcgcaagcaacggtttgcatccatgaggctgtcacattgaatgtgccaacaaagccgtgtggatgaacaatcatccatgcggcttttcgataccgaaaactcgggccagtcgcatggataaaatccaacggctggcccattttttgtgagcgtgagctggcgcggttaaggatcggagtgtaagcggccttggacgtgatggccgggctttggccattgcgtccaaggtccttacacgcagatccttgcgccagcgagcgcgttatgatcaagcgtgaaccggcgcggttaggagccggagtgtaagtggccttggacgtgatggccgggggctttgaccattgcgtccaaggtccttacacgcagatcgcagatccttgcgccagcgagcgcgttatgatcaagcgtgcggaggggctaacccgtctgataataccggttaatcagacgcgttcacctaaaaagcaaccaaaaaaggtactcggttttggcttttgttaattaaaaaataacttggacgaatatgtgatctaattgtctaacggcgctggatcgcgcaaattgggaggaattttaatgaaaaagcatctcgtactcacgttggcagcaactgtcttgattggattaaccttaattggctgcggcaagaaatcaagtgccgccagcagtcgaacggttaaagtcggtattttacagttaatggaccaaactgctttgaccgaagcgcgtaaagggtttgaatcagaacttgccaaggctggctacagtggcaagcggatcaaacttgattatgtgaacgcacaaggcgatcaagctaatctcaaaaccatgagtgaccggctggcgcgcgataagaatgatgttaatttggccattgccacaccagctgctcaagccttgcaaaaagccgataagaagacaccgttgcttttcacggcgattactgatcctaaatctgcaggactggtgacgaatttagaaaagcctgacaagaatgcgaccggggttacagatttagtcgcggtggcagatcagattaatttgctgcatcagactttcccgcaagctaaaacgattgggttaatgtacaacgccagcgaacccaattcggtttatcaaatcaaacatgctaaggcacggctcaaacagttggggttgcgctatcagattcgaaccgcagcaaccaccaatgatgtgcagcaggcagccgaaagtttagccaaggatgtcgacgccttgtatctaccggccgataacgtgatggctgctgcaatgccgacgatcggtaaagttgccaaagctcaccagattccggtcgtcccagccgcatcaaccatggttaaagatggaggcaccatcaccaagggcatcgattaccgtgatcttggcaaacaaactgcgaagatggcgatcaaactgcttaagggaacagcagtcaaaaaactaagcgttgaaaaaccggccaaagttgaaaccgtaaaaaatgaaacaatgctgaaaaatattaagcaaacggtgcacctgccaaaatagccatgatatcaacattctttgacatttttcgatattctgaaatccgattagccaacctaccggcgaaaacttgtgttgacaaactgagattatgagtatacgctttgaaacaagccagaagggttaacttctgagcaaaggagtgttgatcatgagacaaagaaaaacaacacaacttattcacgcgtactattacggctatttcggataatggtttgtatctcatggatacaagccaatcaggtttgtatccatgatggccgtgagtatttcacttgcaattaaccgccacatggacgaattcatccatgtggctttttctttcccgggaaaaaagtaaaaggccagtcacatggatgagaaaatccagtggctggccttttttggcgagtgagttctgtagtgcgagtgccagtgtgagtagaaggtgactcgcgctcaccataacgcgttcacagggccagaaacctgcgtgtaagcaccttggtcgcaatggccaagagcgggccatcacgattaaggccgcttacactccgacttctaaccgcgctggttcacgctcactttattttaggaggaagaaaatgatgattaaaaaaatggctgccgttgtagcagcggcgttgacggttgtggctttggctggttgtggtaaatccacgagtgctgcggctgataagagtcaggtgaaggttggggttttgcaattgattgatcagcaagccttaaccgcagcacgaaaaggttttaccgaagagcttgctaaagccggttacaagggtaagaagatcaaacttgattatgtgaatgcccaaggcgatcagtcgaatctgcagacgatgagtcaacgcctgaagcgggataagaacgatgttaacctagcgattgccactccggcagctcaggctttgcataaggaagatgctacaacgccaatgctgtttacagcggtgacggatcctaaggcggccgggctggtaagtaacccttctaagccagacaaaaatgcaacgggggtaacggataaagtcgatgttgcagggcaaatcagctttattcacaaagttttccctaaagccaagaaaatagggttgctcttcaatgccgctgaagaaaattcccaggttcaagttaagcttgccaaggcagcaattaagaagttagggttgacgtcagttgagaagaccgcggcaacgaccaatgatgttgaacaaagtgccacggccttgatgaagcaaagtgatgtcatctacattccaaccgacaacacgatggccgcatctatggccaccattggtaaggtcagcaccaaggaaaaagttccggttgtgccagccgatgccacgatggttaagttagccggagttgcaacggtcggcatcaattacgaggacctcggcaaacaaaccggtaagttggcagttaagcttttgaagggtaaacaggtcaaagatttggcagttgaaacacctgccaaaacccggttagtcaccaatcccaaacggatgcagcaatttgggctgactgaagcgatgttgaaacaagcagaataagcgagcatttttaaaaaggggtttcgttatggatattgtgacatcaagtattgcccaaggattattgtggtcggtcatggccattggcgtgtatctgacatttcgtattttagacattgccgatatgacggcagaaggtagctttccactaggcgcggcaataactgctcaggcaattgtatcaggagttggcccgattgcagcaacgttgctgggttttgccggcggggctgctgcaggtgcggtgtcgggttttctgacgaccaaattgcacattccggatctgctcactggtattttgaccatgaccggtttatattccgtcaatcttttcatcatgggaaaagccaatgtcagcttgattggcgcggtcaagactgtgttcaatttgacagatagcggggatgcgacaacgactggcatcatcgtgggcgctattgtggtggcaattgtcatcggagctctggttttcttcttccataccgaaatgggattggctgcagccgcagttggtaacaatcagaatatggcggctgctaacgggattaataatgatgcgatgaagatcattatttacatgttgagcaatggtttgattgcattgtctggcagtctcatggcacagactaatggctatgcagatctgtccatgggtattggcacaattgtaattgccttggccgctatcatcatttccgaaatcctggtgcgcggggtgccgttgtgggcgcgtttgctaatgatcattgtgggtgccgtgatttaccggctcattattgcggtggtcttggatatgggcgtggatccgaactacttgcgcttcttctacgcactcatgttgacaattttcttatcactgccgttgttgaaaaagaaactcttccaagtaaaagtacgacacagcaatcggcaacaggtcaagtctgaccaacgcatggttgccaaaacatcggatcatatgacgattgcaccggcagagcaacaaaaggaggttcattaacatggcagttctggacgtacgcgggttgcaccaatattttgagcaaggtaccgtcaatgagaatcacgcgttaaaaggaattgatttgagcctggaacgtggtgaatttgtcgctattattggtggtaatggtgcaggtaaatcaaccttgttaaacagcatcgccggaacattgccggttaatcaaggccaaatcctgatcaatggcaaagatgtcacttaccaaaatgttgcgaaacgggccaagctcattgcgcgggttttccaagacccgcgttctggcactgcctctttattgacgattgaacaaaaccttgccttagcagaaaagcgtggcgaatggcgtaacttctgggcaggcggcgtcaagcgtcgtgatcggcagcattttcaggagaaactggcgacattgggtttaggactagagaaacgtcttggcgcagaaatgggcttgctttcaggaggccaacgccaggcagtgactttgttaatggcaaccttgaagaagccggcgttgttgctgctggatgaacatacggcggcgcttgatcctcaaacgagtgcgactgttatggccttgacagatcaaatggtgcgcgctcaacagattaccactttgatgattacgcacaacatggcaagcgcgttgaaatacggtgaccgcttaatcatgttggatcacggggagatcgctgttgatgtacgcggcgaggaaaagcgacatttgacagttgaagatttgttaacactgtttaaagaacgcagcgggcaggaatttgccgatgatgcggtcttgctgagctagttttgaaaacttaaataaccggcatgcgatcatgattaaatgagcgcatgccggttatctttttgcctataaaatcgatttacttgcaatctagctgattttcacaaccgtccgcagtgcgtgatgggtaaagtgtttgttcaaaacgtgcggcaagtcagagagattgaccgtttgataaggcactggggctagcttggctaacgcggtccaagcagcttgacgtaaggctgttggcgcactcacagaatcaatcccgatcaagctgatgttgcgcaaaatgaacggaaataccgtgagcggtagggaagcgcctgcagcattgccacatagcgcaaccgctccaccgtaacgcatactcggtaacaggctggtggtgaaactaccaccaagcggatcgatggcaaagtcaaattgttgacgtgccaatgccttgccttttggtaactcgtcaagggctagtgtggcggttgctccgagcgcgcgaacctgttgttgctgatcaggcgtgcggacaagggccacgcggtttgaaaagccggcatttgccaataatcgcaaggcaatactgccaaccccgccagttgcaccaccaaccaaaatcaacggctgtcgttcaggtgtcattccggcatgcatcaacgctgtgacacacaacgctgccgtcaaaccggctgttccaaacgccatcgcagtttccagtgtgagatttttaggtaatggtagcgcccattgtgccggaacgcgggcatattcagcgtaaccgccaccttgactgacgcctaagccatgaccggtcacaataatttgatcgccttttttaaactgcgcgtcgtgactagcgacaacggttccacttaagtcgatgcctaggatctgcggaaattgccgcacaacttggttttgtggttgataggccaatgcatctttgtaattaacgtctgaataagcaaccttgatcaaaagttcgccggcaggtaagtcatctgtcgtcatagtttgtaaggtagcttgttggccgtcgtggagcaatgcctgaaacggttgcactttatgacctcctagtgagcatgagcaggtgaacgcgttatagcgcaattcgactcctaatctgacaaacggggcacgcaccatagcttgctcaaatattaactaaagcatagcagattcatcaataaatacaaaacaaccgttattccgcatcgccaatcaattccgatggttgccatgcggctaattcattgcgatgctggcggcgtttgtaaccttccacaaccagcatcggcaaccagatgaccgccaaaacaatgagccattgtccgagatttaacggtgccagccgaaagacctgttgaagcggggccacagtggctaacaacaagatcaaggtaatggtaccaagtaagctgccggttaatatcggattgaccgtgaaggcagcgcgattaagtcgtccacgggttttgatcgggaaaatatccaacattgagccaatcgccagcgtcaaaaagagcatggtcatgccgacaattggttgattggcgctcaagccaaagcgaccgagtgcgtaaacgccgaggattaggccaacgtaagtcgttgtccgcaccgctactctttttccaagtccactggtaaaaatgctggcttttttaggaatcggtttaagccgcatgatgccaggttcggctagttcacggctcaagaagaagccgggaataccgtcagcgagcacgttgacgattaatagctgttccggcgtcataattgccccccagccgatcagaaccgcgatcagcatggtgaaaatctgcgcgaaattgacggaaatcagaaattcaacggccttgaggatattttgataaacagttcgtccttgtgccaccgcatcgataattgtcgcaaagttgtcatcggtgagcaccatatcggcggcgtttttggccacgtccgttccggtgatgcccattgcaatgccaacatcggcggcttttagcgcgggggcatcgtttacgccatcgccggtcatggccacaacggcttgttgctgctgccatgctttgacgattctgattttatcggtcggagtggttcgggcgaaaacgcgaatttgctgaatatcagcggccaatgcttcatcactcatttgactcagatcgtgcccggtgatggcgcgttgaccgtggtcgaggatgccgatgtcttttgcgatggcagtggcagtgtcaagatggtcgccggtgatcatcacggtaataatgcctgcatcttttgcggcttgaatcgcagccggtacttctggacgcggtggatcaattaagccaatcagtcctaaaggttgcacggcggttaattgggtttcccagttggcaccggggtcgttttcgaattgctggtaacctgctgccaagactcgcaatgcctgcgcagtcatctgatcatgaatcgctgtagcttcctcgtgccaatgatcattggaaaaggcaatccgatcagcagcgcccttgatgatagccagaaaatggccatcgggagttttgtgcaaggtcgccatggtctttttatcggatgaaaatggtgactcggcaattcgtggatagcaggtttcaagatcatcccggtttaagtcgtagtgggccagcagccgaacaattgccagctcggtggcatcaccgatatccggttcgccttgtttggtgagccgggcgttggttgccagtcccagataagtcaaaaattgctgctgattcgttgataagggttgatcggtaactttttggagtgtttcaccaaacggccaaaaatgggtcacggtcatttggttttgcgtcaatgtgccggttttgtcggaagctataacgttgatgttcccgatggtttcaaccgcggtcacttgtcgaataatggcgtggcgtttggccattttctggacgccgtgcgccaagctgagcgtgacgatgaccggcaatgtttccggaaccgccgcaatggcaagactcacaccgagcatgagactttcggttaaggtttcttggtggtaaagcatggacaacaacatcgtcagcgcaccgcctaagatggccactaacgatagacgtttgcccagtgcgtttaggcgtttggctaatggtgtcgcttgtttttgcgtttgattcaataatgatgcaatttttcccaactcggtcttcatacctgtggcggtgacaatagcgctggcttttccactggtaattgccgtaccggaaaaaaggcgattgacggcatcaccaagatcatccggcacttcagtcagtggcgcggcagatttggcaacggcggaactttctcctgtcaaaactgcttcatcggtttcgagatcctgactgtgaattagtcgcgcatctgccgctactgcatcacctgctttgaggagcatcaaatcaccgcggactaaatctgctgcggcaatggtttgggtcttaccttcacgaacaacggtgactgtttgaaccgtcatggcttttaaagctgccaatgctttttcggcactgtgttcttggtataaggcaatggcgacgttaaggatcacaatgctgccgattacaattgttttggtccagtcactgtcagtcgtcagggctagataagcagatagggcaacggcaaatagtaaaattaacgaggtaatgtcgctaaggtggtgcccgatttgccgccataaactgggctttttggcagcagtcagttggttggggccatcttcttggcggcgtttggcagctgcgtttgttgttaaaccggttgtgaggtcggtgtcaaaatcagcggccaaatcgctcggcgtcaaaagcgtcaggtctttggtcgttggtgttggcatatgctcaatcctttctggggtcgagttgtctttgtacttacttttaataaccgtaacataatgatgcggtggctgtaaaatcttgtgctgaagtgcgtagttgttcgacctcaccataacgcgttttccggcgcagaaatctgcgtgtaaggacccttggcgcaatggtcaaagtgcgattatcacgtttaaagagtggttgattttaagaaggtagacgggagggcggaaaagctttctattctaggcatttaggggaataacattgcgttctataacgcgctcacagtcgcagcaatctgcgtataaggacctctagcctaaatggcaaagaccggccatttaggctagaggccacttatactccgattgctaggcgctcctgttcgcgctcacaaaaaatggactgctttgtgttattagcagtccattttggtacagatatcaaatcttagttaccgttaattttgcaaggcgtggtagcggtaattttgttgttgggtcgtttgcgttttaaagccataagtgtcagccacaatgtaaagcggtcggtgtcggctttgggcaaacattcggccgatgtagttgccaagtagaccgatgctgaaggtgatgccggcaccaacaagtaacgttgtcgcgatcacccaagttaataagctgagatgacctaaaaagaaactgatgccgacaatagccacggccagtagtagaaagaagccgctaagccagttggcaattgttaaaggaacggtggagaagctggtaatgccgttcatggcaaggtgtagcattttctttaatggataatgggtttctccggcggttcgtttttgccgatcatattctacggcaatttgcctatacccaacccaggccaccatgccgcgcacgtacggatcatgttcattcatttgtttcaaaacgttcacgacgctgcgatccattaagcgaaaatcacctgtatcgacggggatgtcaacacttgtgagcgcctttagcacgcgataaaaagtttcggcagttaccttcttgaaccaagtctcgccgctgcgtttgcgtcgtttgccatagacaacatcatagccttcttgccagcgggcgatcatggctgggatgacgcttggcggatcttgtaaatcagcgtccatgacgacaacggcatcaccgcttgcgtaacgaatgcccgcggtaatggcaagttggtgcccaaagttgcgcgagaagtctacgaggcgaatggttgggtttttagccatcgcggctttaatctgggtggcactgtcatcggttgagccatcattgacgaagataagttcataccgttctggtcgcgcccggacataattggcaagttcggttaacgtttcgccaatgcctgcgctttcgttgtaaacgggtaagacaacggaaatgaagggatttgttttttgtcgcatcacgcttgctcctttctgaattaatgaaaattacttcaccatgctggcatcaagttcatacagcgtgccgctgcccatgccgcccattgccatacgaccaccatgattattttgggcgttggtggttgtcttgctgccgtatttgcttgcggccacttttttgccgactttttcgacccacgcttcaatctttgaattgccggcgcgacccgatgacaggtaatatttcatgtcgccacttttgaccagtgctttgaattgcttcaaagtaattgccgggtcagtgccgttaaatccaccgattgccataaccgctttaccggatttgataatatacggggcagcagtgctagcgttactggtagcaaaaaggtatttggcattgccttgatgagcttcaacgtacttcaataaaccgctattgacactgccactaccgataccaccgctattaccgcctgacgttagcaaagtagggccagcggttggaatgcccgatgacgagccggcaagtgtcggtgtcaacgaccagaaacccggtgcggctaagatagcggcaatcgccacgcccagcgccgatttccgccaggttttggttcgggcgatgaagagcagtgccaaaccgattacaccggcaatgaccacaagaatcggttgccactgatagtaaagactgacataccaagtctgaagtgcagtcgttgcggcaagtgcaagcgggagcagccaactctgccagtgcttgaagcttaatttgaactggttaaacatggtgactgtgccgataccgaataatgccgcgagtggtggcgcaagcataatcgtgtaataaggatggaaaaagctggcgattgaaaagaagccggcgactggcacaagccaaccaagccagaaaagcaagtgattttgctgacttgtggtttggtaccatttgcgctttcgatcaagataataagcaaaggcactgataaagccaatgatagccatcggtgcaagccagcttatttgtggaccaagatcagattgcagcaggcgcagtggcccggcattcccaattgaaaaggcaccaccgccgcgaccgccagctgcaccaccaccagtaccacggccgcctttaaagttgccctctgcaaagtttgcaggtgcgttgtttgtagatgtgccggatttggttttcacagtaggttgtttgccgttggttccagctggcggcgtgccgccctgaccttgaccattacctgggcgaccaccaccatttccgccaggtggcgtaccggttgtgccctttgtgccggttggtggatttcctttagtgccagtcggtgccgtgccggttttgctattattgcctttggtcgccccagatgtcgggttcatttcaccagtcgctttggtcttgctgttgcccataccggggaaggccgcaccggtaccggttgtttggcccaataatcgttcagtaccgttatagccaaaagccagctccatttctgaattcgtttgggaactgccgacatagggccgctggctggcggcggttgagtccacctgtagtggccaggcaagtgtcatgacagccatcgcagctaatgcaatccccagtgtagccaatcggcgccataactgctgctttgatgcaagccagaaaaagagtaataaggctggcaaaatcatgaacgcttggagcattttaatgttgaacgagaccccgatcaaagcaaaactcatgacaaccagccagggcttacggttggtgattgctttcatcaggcaccagctggcgagcagcagaaagaactgtagtgtggcgtccatgttatttgttcgggaatccgcgacaacgatgggcgttaaggtgagtgccaatgcagctaagcgggcggcccaaacattaaagcggggtttgatcatgttatagattagcgccacgctgccgatgccaaacaaaattgagggtaaaacaactgaccagccgtgaacgccgaaaattttggcggaaatggccatgaaccaaagcgctaccggtggtttgtcaacggtgataaagccagcgggatcaaatgcgccgtaccagaaattgtgccaactttggatcatactggtgatagcagccgtgtaataatcattagcgtttcctgcttcccagatattccagctgtaaagaaacgcagccagaacgagaatgccaatgagccaccaatcaagggtccactgtttaatttttttcatgtgccgtaactcccttttctcgaaatacccagaacttacttaaaaggaagttcgttgggacggtaatcataagtgcaaacatcggtgctaatggttttggtaaattcaatgcatcattccagaagcttgtgagtatcaggctcatgataaaggtgagaccatacgaaaaatagtatcgtggtgccacacttttaaggtcgcggtgatctttaaccttaaagacccaggtatcattgaggaaaagtcctaaaactgacgttaatccatagccgacacccatcgcagcggttggattgatcaattggtataatgtcaggtaaagcaagtatgtcaaaatagtattgataccaccgactaaaccgaagccaatgaattgtttcagcttttggcgcatcgaatcgctcccttcttgatgaatgggattagtatgcgagatgcagcataaattaaccttaaagccagcaatttttttcttaagctgagtttatgattttcatgttaagctgacgctgtaattgataagactgaaacattggctttggtggggatggtggttggtggttaggcccctaaccgcgccggctcacgctcaccataacgcgttcgcagtcgcagcaatctgcgtgtaaggaccttggtcgcaatggccaaagcccggccattacgcccaaggccacttacactccgattgctaaacgctcctgctcacgctcagctcaccataacgcgctccccggcgcagaaacctgcgtgtaaggacctcagtcgcaatggccaagagcgggccatcacgcctgaggccgcttacactccggcttctaaccgcgccggctcacgctcaccataacgcgttcgcagtcgcaggggcctacgtgtaaggaccttgatcgcaatggtcaaagcccggccattacgcccaaggccacttacactccgattgctaaacgttcctgctcacgctcagctcaccataacgcgttcgccggcgcagaagtctgcgtgtaaggacctcagtcgcaatggccaagagcgggccatcacgcctgaggccgcttacactccggtttctaaccgcgccggctcacgctcacgctcacttttagaggagaatttatgatagttaaacctaaaattctggtaattgaagacgatcctgatctgaatgagagtattgttgattttgttcgggacttttctcagcctgaagctgctttgacgggtgctgatggtttgtatttggcagaagaggggatttttgatgccattgtgctggatattatgctgccagagctgaatgggtttgatttgcttaagcagctgcgagctaagcaagtgaagaccccggttcttattttgacggctaaagatgctctgacagataaggtgcgtggttttgagttgggtggtgacgattaccttaccaagccattccaccgtgaagagctcattatgcggttaaaagcattgttaaagcggacaggacatttttttgatgaggatgggttaacagccggcccgtttgaagtccacctaaaccggcatgaagtcttaattcacgacaaaccagtagcgttaaatggaaaagaattcgacttgttagtgtacttattacagaatcaaaaaaccattattacgaaggatcagatttttgatcggttgtggggatttgattcggatacggccgtcagtgtcgtcgaagtttatatgtcgaacctgcgcaaaaagttaaaaccgatgcaagccgacgtatggatcaaaacaattcgcaatgtcggttacatctttcaggaaccggaggaccgtgcatgaatgcagataaaggcattaagcgacaacagcgacgtttatttatcggtcaactactgagctttgccggactttttctagtgctgggggtcattgtttttttcctttatgaacgttcgatttatcaagatatcgatcattcgctggaacaacaaaaaataatgcttaccaagccggcacaaaccatgagcggtgcaggtggtcccggacgcccggtgacttcacgaccagtaccttttcggatgaacatggtggtttttaataaaaaaggaaaaatcatcaatcaggcgatgttaggtgaacggttttatgcctatttcaaaacgttaaaactagatcgtcaggcagttaataagttgcaaaatttgccgacttcaaatggcacctttagaactttactggtgaaggttccggtgacggccgcagatcctcaatatgccgggcattatgtgttgatcttgcaaaatacggacgctcaagaagctgccattcgttcttttcgtcaggttctgattttgacgattatcctattttgggcgttggcactgggcttgtcatattggttatcaacccgttcaatgcgcccgattgttcggtcatggcagcggcagcaagattttgtggcagacgcagcgcatgaactacgagcaccactggctgtgattcaaagtaaacaggaagccttgctaaccaagccgcaagccaccattattgacgaaagcgaggccatcgcaacgtcactgggcgagaccaagcgtttgcggcaactcacggatgatttactgacaattgccaaggccgatagcaacacgattgaaatcgaattgaccgatctgcggtttgatcaaacactggccccgcaactggcttcttatcacgacattgcgattagtcaggataaatcgtttaccaccacgattccgccaaaaagccatgcctggtttgacgctgcacggattaaacagttactggttatcttactggacaatgcatttaaatatacccaggcaggcgattccatctgggtgaaggtcacccaaacctcaaaagagtggcaactggtagtaggcaactccggaccaagcattgctgacgcggataaatcacgtatctttgagcgtttctatcgcgaagatgcatcccgtagccgaaaaaccggtggcagcggtctgggactagccattgcccgctggattgtgaccatccatcatggccatatcgaagtaaaagatgttcatccgcatggtgccgcttttgtggtgaccttgccaaacaaaccgcgtggcatttaaaaattaaatacgaaaaatagccgttctccaaactcataggcttggaggcggctattttcatggtggaaaaattaagggtgaagcagcagtgtgaagctttggttggggatcgtcagaatagtcaagttacccgttttagcttttaacgggccggattattgcggacaccattggcttgtgtgaaatcaatgaagcccatgttggtatcaatgtcgccaccatcaccacttaaaaccaaagtatttaaggtcgagttgaaatggacatgcatattggcatttaagtcttcctgcgaataacccttgatcaaaattggcccaagattactgctgatctcagtgtcatagtcggttgctgggtcactagccttgacgacattaagtgaaaattgaacttgcatatgaatcatcgcgtgctgcgaatacggcccaacaccatcttcaaacgtcaaaagcaacttcttgtccgaacccaaatgcggttggatcttgttcacagcgccttcgtcaaaatggatttgcatcagatcaacccctttcgacgtcaatgtaggctgattaagcagtaaaagcaacttttttgacttagtggtaattttacaactgctgctgctcatttgcggctgagggagcgtcaacggtgatccaaataacggcggtcttaaaaattgacgccaatcagaatgaacttttttatttttaaaatcgattttttgtaatgatgtatgataattccatttgtgaagccctatactatctgaatgaaaacggttaacatattaattaagaaatgaggtaatttaaaatgacagaaacagtagcgccaaacaaattaactaataacgatttagcaaaggtgatgttcgatcggcattcggttcgcaagttcgatccaacggtaaaaatcagccgcgatgagctgcaagatatgattcgggaggcaacaaccgcgccgtccgcatgcaatttgcagtcgtggcattttgtcatcattgacacctctgaaggcaaagagaagttgaaaaaagcggccatgaaattcaactatccgcaaattgataccagttccgccattattttcgttgccggcgatacccaatcacatgaggtctatcgcgatgtgtggacgaaggtttacgaggcaggcaaaatcagtaaagagaagctggaccaaatcttcaacaccttcctaccactgtacgaacatgcctcacctgaatttctgactttagatgcgaccattgacggcgctatggttgccatgcaattgttgcttctagcccgagcatacggatatgacgccaatccatggtccgggtatgactttaaaacgatcatcccaacactaggcctggatcctaaacgctttgtaccggttatggcggttgccatcggaaaagccgctgaacagccattgcaaacagagcgctatgacgtcaagcaactgattgattacctagattaaccgagtcacattgactgcgaagaagaaaggaaacaaatcatggtagatgcagtgaaagctgatccattcggcaaagttaatgcaattgatgtgttagatttagcaagtttagaagcgcgcgctgaaaaagtccttggtcgcggtgaattcgggtacatcagtgagggctctgacgatggctacaccatgcaccgcaatacaacggcatttcaagatgtgcacatgctgccacgtgtgttacaaggcgttgaaaatccggatcagtcaacaacgtttatgggcgcaaaacttgcttcaccgctgctaaccgctcccattgccagcaacactttggcccacccaagcggtgaactcggtttagcaaaaggcgccaaagaagccggtatcatgatgtcccaaagcacctttgcttccaaaaccatcgcggaaaccgcagcggtcagcgatggtgcgccatacatgtttcagttgtatatgcctaaagactgggaatattgtcaatacttgctagacgaagcgaaacaggccggtgcactggccatcattttgacagcagattcaacattaggcggttatcgtgaaaaagacgtgatgaatcattaccatctcaaaggccgacttgccaacctcgaaggctataacacagggcaatccggggttggtgcaggcggtttgtttaaagaatccatgcaaaagctggatcttggcctgatcagtaaattagccagttattcaggcttgccgattattatcaaaggcatccaacaccctgccgatgccgttgctgccattacagcaggtgctgcgggaatttacgtctccaatcatggtggccgccaactcgacggggcaccaggcgccattgaacagttacccgccatcgccgccgctgtggatcatcgcgttcccatcatctttgacggcggtgttcagcgcggcacccatgtattcaaagcgctggcactaggcgctgatctcgttggcattggccgaccatttagttatgggttagcacttggcggctggcaaggcgtcaaggatgttgccgaccatctgaaaatggaaatcaacatcgccatgcagctgaccggctgccagacgatggtggatgtgaagcagatgaaggttaaaacgacatttgcttaagaaattaaaaagcgttgggcaattttgaaatgattgctcaacgctttttgaatataacgtttaaagatacttgttgatacgaaatcaaaaatgggggaggcgagaaagacctttgtatctacatttcatttcttaatctgacaaaattatcaaagatccgccgtggcattgcaaccacgatctgcccttggtggagaagagccgacttctttagtctagcggataattgacgttgactagtaaattaatcaaagccaaacaatcatttcagcttaacgttgatgacgatatttacgatgagattcaaagccaagcatacttaatgccgtcatagcaaaaccaagcaacatcatccaaacggttatcacttgattttcacctgtttgtgggaaactgtgccggccatttgagttaaccgaggccttggcggctagtggtttggtcactggtgcggcagtcttagtgcctggagttgtttgtgtttgagcgattttgatgatattaccgtatggatcaaccatttgaccattcacaactgaccatccggatacgggatgaccgttttgatcaagcacttgttggccattaatatgatagccatgttttaatgcgtctgctttagattcaagctgatgttgttgacgagtaacattatcagccaaagtttcagcatcttgggcagcttttagaactgatttagctgttttgagttgttgttgcgcagcggttaagcttgcggttgcctcagccaatttattcttagctgtcgcggctttagcctttgcatctgctaaaacagcttgtttttcactaagattcttttctgccgcaacgacagcagctttggcttttgcaaccccagcgtcagctttggcctgtgcttccttagctttgattaaacgatcctgtgcatgattcagttgatcgagtttggcttttgcgtctgttacggcttgttccgccttcgctaatttagcttttgcatcagcggttgcgtcttgatcttttttaagctggttctgagctgcttcgagacttgcttcagcagtagcctgcgctgactttgcgagtgacagctgtttttccgcctcagcttgtgcggttttggcagcattgagcgctgcaatctttgctggttgatcttgcagacttgcttcgtagatcttttgagcagttgctaatgctgtttccgcgtttgtcacagcaactttgttaacggccactttattatcagcactagtctttttgacgctggctgctttttgatcttgaacggcatcattatagttagcttgcgcctttgtttgttcaccattagcctgatcaaaagccgattgtgcggcagcttgggtggcgtttgccgttgcaaggtccgcttgcgagctagcaagttgagtttgagcattctttagggcagttgaaagtgcttttgtatccgttgatgtattgaaggttgcatcatcgttaacggttgcaacattgacagttaggaaaaggagttgaccagaacgggcgattgtaacagtgtcggctaacgttttgctggattcgcctactctattgaacccaagtaagggttgtagatttgaggcagccaaagtaccgtctgaggtgtcacctgatttacttaagaaacttgataagacactattgttaaacacattatcttttaaaatagccatattgtactgagttaatgggtttgtaggcgggtcatcaagccaagcaactgtaccatcactcttttttgtgggataaaaggcacgactgtaaaggaaggaaccaccagcaatgtcagatggtcctataacagcaacctttgtagtgccattaacgctattgctattaataatgggcggcatacctaattgcgttcggatgcgattaaaaattgcgagatagaggtcttctatatgtgatttctgcgcagaagtgagtgaatcataggcgcctgatggggcggcaaagttaattgacgatataccgatcgttctgcctttgtaatctgtgccagtgttcgtgtaaggaagttcttcactccagtcagcatccgtaggtttatacgagatactaatacctttagcaatggtggctaaatgtgaatgtatatagttaccatctcgtgacttgcttgccaccagttccttggcagtcgctttggcattgtcggagacggtgacagtaatgccttctgctgctaaatcaatatttgtcttggcttgggccgcatcaagagcagcttgtgcatccgtaacagctttttgtgcctccgcgacttttgctttagctgcagtactcttagcagttgcctgtgcgagtgcatctttggcactactcgttgttgtggcttgatggtccaaactagacttggctgcagagaccaattgatcagtggccgcttgggcagtctgtgcttgatcggcttctgcttgggccttgcttaaagcacttttggcagcggcaaggctagtgcttgcttgatcgactgcagtcttggccgccgttgtatcaagggccttggcagcatcactggtggcttgcttggtgacgttaaccttggattgttcttgagcggtagcatttgcggcggattgggcggcagaactagcagcggattgagcagcttgatctttggcctgctgactcgttgctaaattaacagtagattgggccgcttcttgttccgccttagcatcactcacagctgtcgcagcagactgcttggcttccggtgttgccgcatcagctgcagattgtgctgcggaggtctgagttgcagcagactcggcggcagcagcagaactggctgctacactttgggccgcttcctttgctgcttgggccgcgtcaaccttttgttgcgcagcgctttgtttttccgtagtgtcggcggcattttttgatgcatcatccttagctttttgggccgcatcgacattgccttgcgcatcttttacgccttgttgcgcagattcgaccggtgttttagccgaagtatcagccgcggactgagctgtcttgcttgtcgcactgctggttggcgtttggtcatcggcgtgtacggtcgtcacaccgccagcaacggtcaatacggcggctgttgccacagtggtggtgagtaacgaattatgcttattcatttttaagcccctccaaatgtaaaatctaaaccccatttacttagatgttattgataacaacatctacactaggaatattaaaattattttggttaaagtgaagctttgttgcatattcgcaattttagttgtgtacaacattgtttgtgcatggtactttaataaaaagttcgtatagccttcgttatcctttgagcaagcacaattaaatttcgggtgcgaccaagtaaattgggcaaagatagggtcgtgtgcaataatactgttttgaagatgacacaaaagaaccaagtcgcttttaaaatgagataaagtgattcggttctttttaaattacatgattggaaatttagattcgtaagctcgtgatcattcataaaaacacgctaacacggaagatacctgttatgctaagtttgtcagttggatggggtaccggttagaaagggtgttgaatgtggatgaaaattttgaacttaaaagactgggtaaattttttaaggatttccgaacagggagagatttaactttaaaggaagctgcaggcgaagattggtccgcaaccactttgtcgcgttttgagaatggcgttagtgacattagcaatgagaaggctacggggttaattcgtcggatcggaatacagccccaagatttcttactgtatcctgaagctccgggagcttttcccatgcacttacaaacgcttattcaaataaacgacatcaatgctttgacaaaacgacgcgcagagttctttttagagaataagaaaacaactagtatgaccaagttagcctcagtcctttttgatgctggtattcattggcctgaagcaaagtatcattttgatgctgaagcagaacaaattatcgcggatcggttgactattcccgaaaatctgaccccgttcgaatgggagatacaggaagccatcatgggacccgcaagtcatgagctattgatgttactttggtatcgaacagatcgaatgaaacataatttgcgcaaagaagagcgtggaacaattcttgcaaaattgtggcttggtgccttgatggatcgtgatgttgaatttcttgatacttttagatctgatttgaccgaagaaatggataagtacggcgagttagaatcatacacggagtggcaagaagtatggcatttcaccaaattgttagaacaatgggtcgtttctcaaaacgtcgctcatgaaaaacaaattgatgatatgattaccgacacacagttgatgggtgatattagccaagctaaatattttacgttgatatttgctcgtacaaggcagggacatccgtatcacaactatgaactgaaaaatcccgatcctatgccgattgtagtccgtaagacggctggcggtgtgatacttggccgtagacgctatttgggccttcatctagacgacattgtcttgggtcgcaacaaatcgacacttcgccgttttgaaaaagctgagtcacaactttcttttggcggcttggttcagctaagtggacaaatggctgttttagtacctactttacttggaagtatgaatgtcacattgcaaggccaaaatcgcaatatcacattgtggttttcctggtatgacatggtgtcacttaaagcgcgcggcaaggacgttgcaagtgcccaagatgtgataaatcgaaccatgaaattcatgaaagatgttccagcaaagatccggcaaggacagctctttgtcttgcaacgtgcggccatggaggttggatttaaccattttgatgaaagtgaacaacggacagtcgcctctaaacttttgaagcaactgctaaagtcaaatcattggggattatttgaatacttaatcctacgctatatttgtcctttattagcattcgatgacttatcgttgttatttcaacatgttcagcgtattttaagcaagcaaccgggattttttggtcgctcatatgcatacggtgccatgtcccttgcatttgtctgtgcagtgaaaacaaagtcgtctgatgaagtcgtaaattttattcagggtctgggctggatcaatgatatcgatgaagctgatggttcgcggtggatggcaatgggtagcagagagatagcgcttgacttaattcagaagactgaaacaagcaaaaacgcggttaaacaatttattgttcgttgtcagaacacggggcatcataaagtcttggctgatttaaaggattattggcgtgaactagtaccgaatgactattttaagatctaacaagtaatcactgataaacaaataaacaaacactgaaagcgtgtgaatgacggactagaagcttgaaatctaaaaatttttggtgctctttttatgaagtgcgtcttgttagtataaaaataaccgcaactcctttgaaagagttacggccactgcctgccaagcaaggaatgtcggacattcctttggacattctttttttgattttctttgcaattaaatgacagtttttaagctgaaactatcatttaaatccttaatatgacaatgattgacagccgtttatataacaactatggatcttaacggacttgaaccgtcgacctcctgcatgccatgcaggcgctctcccagctgagctaaagacccgctatttcaatgcgtataaacaaagttgtgcctaaactattttcgaaaacgattataccaaggttgacggctgcttttcaactaggatgctggccaaaatggaaaacttggcacacttagaatttgggttaaatcgcgaagtctggggactaacgaaaatattgtgcaaagtcacgtttagtctctagtgattatgctgctcagacgtttacttaacacatttacaggcaaagaagtctgtgtacgaaccttaagtgcaattgccgagcccgagtgatcacgtttatggcacttacgcttcgacttctagccgcgccggtttaccacgcttgcacagaaaaaagcgaggccccaaccccgcttttttcaatactcctccactgaggttacccacttctactacctcaacctgtcataaattatggcgcctttattgagtggctcccagcaaatttgcatatatgcatgttaaagtatcttagtttttgtaattttaatctttgtaggatgagacaaacttatcaataaagcctttcggtaaatgcttgatattgaaacttttcaaatttgtaattgcattaggatggcctatacgcaaggattcatggacgtagagttcaacttgatccgcattagctttacttggatcgaggagataacgcccaagataccaagaacccaaagcttcccagcgctcgggacttggatcagtggatgtcaatagccatctaaagctttgcaaaaatgcgctcagctcttttgatgaatagtggagaataacccgaataatagcttgattcagtccactaaaaacgtaattaattcctaccgttagtgggtgcttaacaacgacatgattccctttttggaacagcattgtcagttgttcaggatttagccaattgacgagttcttgactagtgtgggtttctaaggcgccccagtgattattctgtaataatcttgacagaagtatgggtgcttgccgaagcattgtgggatcatttgctgacactaatcctgatgctgatttcaatacaaatagttgcatgttgagtgtgtttgctggtatatcagaaaattgagtcgtgaattgatgaatgagattggcgactaaatgtttgtcttcgtttagagcagtagcttgctgtacttgtttgaaagtttgttttagtgagatctttcctagaacattgtctgatgtcggatcaagtgagctaagaatctgcgaaggtaataaagctaactcaccacaaagttgaaataaacaagatgcggctagttgcgtctgaccgttttcaaagcgtcttaatgttgtgggggagacatttaaattaatgtccgtgattttgagaccgagatacagacgttggcgtttaacaacttcctgagctgtgtgtgcttccgttagtttacgcggatggtcaattaattgcgtgttgtgatacacacttccagattgagttcgcactaacatcatttcaaaccaccgagcatcagtcataacatcgtattttttcaggatactaatgattgcttggatcttggctttattttgattcgttggtgtgcgcagccagtttgcaacactgcgaccgtattgccagtttggcatgaattcaatgatgcggtcgcgaactgaatcagcgacgtaccattctgccaattcagactccatatcgttaacgagttccatatcttgatccatcaaggcaccgagccataacaatagttcgatcatttcccgaggttggcgccagttgtcaggaattcgttgagcacgatgccaaagcaaagacagcagttcatggctggccggaccagcgattgccttgtaaagttctaactctaagatggtaaaacgttcaggggtagccaagcggtctgccaaaagctgctcatcttcactgctaaatcgaaactggggattaggccaattttcagctgccgcgaacataaggcgggctaactcagtcatgctattgatatgtggatgtgcagcaaagaatccacgcttgcgtgcctccaaaatggcaatgtcatttaactgcgtgaggtcttgtaattgtaaaggaaaattggccggaatcgattcataaaactccaaaaaatctaattcatcgatgccaattttggtcataagtgacagcattttgtcggtactaatatcgatttcaccgcgttcgaatcttgataaagtggcagcagaccagttactgctgacttcctgcagagttaagccacgtgcgatgcgttgactgcgaaagaagctccccaaagcctctaatacggaaccgcttttattcgttttcaaatataccccctccaaagatgttttaattcaggtggcatccatgatacgtatatcggtgagtgtcatggagcatgtagacgatataagccaattatgagagaacgacggtgcagaaaaaagattttttgcatatatgcaactttattgtacacaccagcggcaaaactacgattatcatgatcgcacggattgaacaaaaaagactctaggattaagaacttcaaaaattctcaatgctagagtcttatttaaaaaatcccaacgcttgttacctatatacctgctaccaagcctgcgctgctttatataattacttggcgactttcaattatggatccaaacggacttgaaccgtcgacctcctacatgcgaagcaggcgctctcccaactgagctatggacccaaaacacaaacctaattgtactgaacttcgacgttggtgtaaaggggattgaccgtaattgggcaaggatgtctgccgttaagcaaggaaaataatagtggaaagcacgattattttggaaagcacatacgaggcacttgcagaaaaggcggccatatgattgatttcggaatgacagcgcctgactcaaagttttatcaagcttatcttgattcagctcgccgggtgataagggcaatgaagacgttttggagcacacctccgataacgaagatgagccaagaatagctccaggtatcgaaaagggttgaggccaagaagtaggtgacaagaatcagtggccaataaacttgccggaaaagtgcaatgtcttgacgtgcgcgctggttatggtggtgttttgctgcggaccaactgcttgtgtgttcgtcatggggttccggagctgaatttgggactgttgtggcgtaggtgtaacgtttcagttgcgaataattaatggaaacataaagaataagataagtacctaatcctgcgataatgagaaacagcgcgccacctgcgtcatcgctgataaaatggctaatgtattcagagaggatggcagggatgagagagcagatgcaaatcatgatgccaacgatcaggcccgcagcgaattgccgactataggccgccgtttcttgttgggcaaggtgcttggcgcttttggtgattggtcggtcattgagtaactttttttgctggctgtacgtggtgcctgcccaaatgaagagaccgactgcgatggcgtctagtaggaacatgccaatgaccccgaacacttcataacgagaggtgccggcataggcaggtaaggcgacgctgatgcagcatagcaatacgccaagcgcgatttgggtggcaaaatggtcaacgctttgccaaaaatgccgcagttctgattcggtaatggcatcatcgtcggctgccgcttcagcacggttgggatcggattgcaccgggaggcccagatcagcgcgcaactcatctaaggaaccaaatgcactgatcacagcaccgatggcttcttcttcacttttaccgtcccgtagcaaatcgcgataatagtcgcgcatgttggcgagcatgtcggtttttgcctgttgggttttggcattatcgggtagtgaggcgaatagactatctaagtaggttttaatcgtatccatgggcaggttcctccaaaggctaaagatcggttaacggctgattcaagaataaatcgacaacagttttgacgcggcgccattctgcggctttaactgcgagaaaggtttgaccgcttgaggtgatgcgatagtaagttcgcggctttccatttgtgactgcaccggggtaagcttcgatatagccatttttacttaaacggttgaaggcggcgtaaagggtggtctcgcgaatgatgtattgtccggaggttcgttcgcgaatttctttgccaattttgtaaccgtacgaatcgccttgatgtaaaatggcgagaataaggacgtcattatagccacgcatggcatcactactgatcacgagcgcgcctcctttgtgcagggttggttggtgcagcagtggtcgtgaactaactggcaaaggtgccgttcgttgactactgcatctgatgaagtaatgctaacacgattacttcatcaggtaaagtaaaaaaacaccttcaatcatgaaggtgtttgctgatagtcgattaatgtacaaaaacagtaacgaatgtaaccagcccaaacagaatacctggcatattagagataatgattggccaatctttgtaagtttttaaccagccatagcaagtccataaggtagcattaaccattgctactaatggttgaattggattgactggacttccagaaaagtttgcaatgatttccggaatgtacgaaacatacattaaaatacaggtaaaagttgccagcttactgaggagtttgagccgctttattcgggcggggtcaacaccatcaggatatttcccagtatcaacgcgcatttaaaatgcccccttttaggataaaaataactttaacacgattggtcttaaatgccaagtcgaggtgatggctgtgatagaatcgaataggcggccagcatcgcgttggtcaatttttattttttctgaaaaagcacgaaatgagggaactttatggcagacaaagagacagatatggtcactcggattcagaagcaggaaggtgccgatgcgatcatggataaggggtttgtgaccgaacgggatatccctgaaatgatggataagacatggagtgggaagttgttagatgccattaatgatgaattgcgcctacgcacagttataaatcgagcagtgatgcaacaatttcattattatatgggtgatggaacgattatctatgatcccggccagctgaattcagaaggggcaaagattgcattgcagcatgctttaggtttccggaaataaaaccttgatcttaaagcaactggaggcatcatttacagagaaaagggcccagtcaaaacgactttaccgaccatatgcccttcttctactaattgagtggcagcttttaagtttgctacattaatgccggtgaattctttggttaccgaagcctttatttgtccgtcttgatacagagttagaagtttgctgaggatcgcgccttgagaagcaatgtggtacgcaaaatcggttttagcaaacatatactcgtaatcaaaactggctgctttatctttgacgactgccaaatcaagcccggcttgcggaccgacaatgcacccaatatggccaaatgcccgaattaactgactggcagcggctagatagggttcgggatgatagaggagcgcaataccatcaacggtttgaatgccggcttgatggatttgggcgatcagatcctcgtggtaatcgagcggcacatcaacgtgatggtcgcgcagccatggatgatttttgggactactcgtggctaaaacagttaagccgctccaatgggctaactgactgagcatggaaccgacaccgccagcgccattgataatcagtaattgttgacctttattcgcattgtactcgggaatgaagcccattttttcaaatagcaactcccaagccgtcaatccgaccagtggcagtgctgccaagtcagcagtaggggcttgttgtggtgcgcgggcaattagtcgtgcgtcaactgcctgatattgctgattactgccgggtttgcgggtggtgccggcgtaaatgacccgatcgccaacatgataaccagcaacctgtgcgccaacttgggtgatggttccaactgcatcatatcccagcacttgtggtgttgcttgtcgcgttgccgcttgccgacgtttggtgtcaatcggattgaccgatacgccgtcaacttgtacaacgacttcatttggttggggagtcgggacagggagggcaaagctttggaagctgttttcggcagtgatcgctaagcctttagtaaaaccgatcgcaatattttgtgacatttgaatcgtcctttcgtttaatctgtcgttattgtaacctttttatgaagtgagttggaaatgcacaggttatttggtaaaatgtgcaggatattggcgaaacaagccaagtgtgcgcaacccagcttgaaaaattcgatgccgattgacgaatcataaaaaattaacgatgaacatgacgtgaagacgatagctttaaggaggctgctcgtgaaaaaatttggctcaaaacgtgaattgataggcttggtcattgtcttagtactggcagcggcggggtttgcatttttcgcgtggtacacgatgcggccggctgatacgatcgggacaattgcgacaattagttttggcattgtattatccgccttgattggtatcgtcttattgttagatgctgcagccaggactcggtggcgacgtttctggattgatcttttgttcgccgggttaatgctggcgctgattgattattacttcctggatgtcaccgcgccgtggcagatgctggtgacgggtgctggcctggccgtggtactggttgcactcttagctattcgaaagatcgatgaatagtgttaatgacgactagcaaaaaagctctccgaaaaatttattcggggagcttttttgcttttacgtatgcgtgctagttcatacgctggacggttacaggaaccgtttttggcagtacttttgacagttcggttaacaggttttgaagactggcctgaaatgtcaggcggaccatccggcgtttgctaagggcaaatacggcaacaacccattcctggccatttggaaggcttaccggtgtcaaggtgatactggacatgtgcgtgtatggaatcacgcgcgccagtaaaccgttggcgatcaggcgagtaggggccagtccgccagtccctgccataatggatagcaccaaaaagatcgagatgaaaataatatacggcatgttgttgactcgggttgtcataaaccaaaagccaagcagcacggcccagataagctgagatactgcatatcgggaagtaaattggatcttactttgccaaaaaagatagtagccagctaggccaattaaaacgatgtccagtccgatcaataacacattaaaactattcatgaggtactcctttttggtcaacttcatctgtggggtgatctgattcgtacaaaccagaaacctgctgataccagctaaagaatcgcgtgacgacaattttcaaaacggcaaagccagggatgccgagaatgaccccgaccaagccaaagagattgccggctgtgagcaggacaaccacaatggtaatgggatgaagttcaagtttgctgcccataaccagcggcgaaatcaattgcgtttcgatcaaccattcaataaagaagacgacaatcacggcgagaatcatgcgtggagaagttaacgcgcccatgattagcggtgggatcatcgcaagggccgagccgaaataagggatcagattcaacgggcaagccaacaagccgaaaatcaaaccgtaacgcaatccgataaccgaatagccgatcatgaacatcaccgcaacgcataatgcgaccgtgatctggccttgcacgtatgaaccgactttttcattcatttcatggagcatttgcttaaccgagcggcgcagtttcgttggtacaatctgcaagatcatcggcgtgaacttatcgccatcttttagcataaagaagaggatgatgggcgcagtggaaattgtgacgaccacattgccgacaatgccaatcagattctgcagctgtgaaatggtgccagtcacaaaggcaccttgtttacccgtgaagaaagtctggacttcattggcaatttcgttgagatcatgttgcgacaggatgttctgtttgtcatttaaatcatctaaccatttgccgatttcggtaaatatttgcggagcggaatcaacgatactggtgatttgattgctgacagcaggaataaaccgtaataagccccagaccagcaggctaatcaatacaatgaacagcaatccgattgccaagccccgatgcaacccggctttttcaaggcggttgataatcggaacggtgagatagaagagaatgccggcaaaaataaatggcggcgcaataatccctagaaaatcaacgactggttgaaagacccaagcaattttggtaaagacaaaaatgactagcagggccaaaagcaaatcaactagcagaatcatgaacttactattaacaaagcggcgatagagccacgagtcggtacgtttcaaaggcgatcctcctctaataacggtaaaggttatattccggtcacagcacgccaaagcggtcagacagtcacaaaagcccttacaaaacaaacgtagggctggcaagttaaccttgtcagtaaccgacagctgaagtcgtcactttagcgctgattttaagcacaaaaatcaagtacaccttgtataacaatgatactcgactgagtagcatttttcgaggatgggttccgtgaaatgtcaagaacgtgtaattgcagtcgttacataaaatttacaaaaacacgctgaaatcgttacaaatattataaaagcctaaacaaaggcgcttaatgtaaattttacatatacaaaagctttacaaatcaaaaaaatcaggtatgataaagtcacaaccaaaacggtgagtcaatgtcggttcatccgatacggagaggagtgaccccatatgagcatacttcggggcgctaaatggacattaataactctgaccctggtcgcaactttgctattgtttagtaactatgcgacggccggcatcttgttgatggctctagatattttcttaagcttcttctatgcagtcatcaagagcagatgtgatcggcgtcagatgcataagatgccattattgcataactaattgatgaaacaatccacagccatgacgactgtggattttttgtgagcgcgagccggcgcggttagaagtcggagtgtaagtggccttaagcgtgatggccaagaccgggccattgcgcttaaggtccttacacgcagacttctgcgccggggagcgcgttatagaaagcaggataaaaccatcgaattgcccacccaagcatgctttgtccttgcattggggagcggcgcggtccatacgcaaataaaaagcgttaatggccttaatattgaggcaaaaagatattttgttgcgcctaacgacagttttttcaaatgaaacagcaaaaacaattgcaaacgtccgttcgtattggtatgctgagtgtaacaaaagagaacgaggcggtgagcggatgccaacacaagcaagtcagaaacgttggaaacagattttacaaacaatctatgaagcgatcgaggatcatgggtacccgcccacggttcgcgaaatcggtaaatcggtcggactcagctcttccagtacggtcgcggcttacttggagaagttgctggcggctggcttgattgccaaagatccgtctaaaccgcggactattgaagtcacgacagcagggcttgattttattggggttcaggcacaaggaatccctattgtcggaacggttgctgcaggggttcccattacggcgattgaaaatattgatgattattttcctgtccctgacgatcttccgtattccgccgatgaattgtttatgcttcgggtccaaggcagttcgatgattaagatcggcattttagacggcgatcagattattgtcaagaaacaaaatgatgccgaaaatggccagattgtcgttgcgatgaccgaagaggatgaggcaacggttaaacgcttttacaaagaaaagcatggcgttcgtctgcatccggaaaatgatgatatggatgatatgtacttcccaagtgtcacgattctcggaattgtcgttagtttatatcggccggcgcttgtgtaatcagctcataattcagtaggacgaatcgccctcacatcaaaaagacatttaccagctactttatcgaagtggtggtaaatgtctttttgattatgtaccctgatgtcaacgttgcaaatatcaaggttgggcgaggcgatcaaggtcgtcttgcggtacctttttgtaaacaggtccatttggaagttgcttgagttgaccttttttggtgagttggaattgcaaagtagaactggccgcttgtggttgcgctttacccgtgaaggtgaaaactcgactttttaatgtaagctgagcggcaaaaattccctgatcggtactttcaaaaacgccgccttggttggctaaggtttcaagatagtagccgctggttgaggacgtgacccggatggcctttttgcgattatcgacttggacgaacgcgtggccgacaagtgtacttaaagtggctttgggaacggtctttttagtgggcttgacgtggctggtgacggtgctggccgctggctgtttggatgtagacttgcttgccggggttgtggaagagcagccgcttagcaagattaagatggtaagacatatcagctttttcatttccgagctcctagtgaataaattggatgcaggtcataacgataggaatcacgatcattgatagcaaggtggtttctgtgaccatgatggcagcataatcagcatcggcgtcatagagtttggccacaaccggtgcattggtcatgaccggcatgcaggactggagaataaagatttgtttcatcaaggtcggaaccggagcaaaagcaaccaatgcggtcatgagtagcggcgcaaaaagaaagcggccactaaagataccccaggcttccttgctgagccgcaactgccgccagccagccgtatgcaacgcaataccgataaaaaacatggatccaggtaccgttaagtcaccaacatatgtcagatccgccattagaaactccgggagcttgatgttcaataagacgagcacaatcccgaacatgaagcctaataacggaggtgagaaaaccttgccgagcgccttttttaaatcaaagcgtgccggtttgggcccatcaccttggataagataaaccccgattgtccagaaaatagtggtattggccatgtaataaacgaggacgtaaggaaggctgcgaggaccaaacagtgccaaattcaccggtaaaccaataaaaaccgtgttggagttgaagaacatggatttaaaggtgccttttcgtgacttcggtactttcaacaagtaacaaaccagaaatgacaaggcgaaaaggatcatcatggataacaccgggaagaacaaatccggtagcaagcgcaaaagcatacccgcagtgaacttcgacgagatggtgacgatcatgtaagcaggcaatgcgacttgggtcaccaccttggcgatgaccttgctagagtggctgttaaaccagccgcgcgccgttagaaagtagccgatgatgatgagaataagaatttcgaaaacgccaaaaacgcttgagataaatgctgtcaaataccgccacttccttataaattattttggtcgccgcaatgtaaacgttcgtcccaattcggcgtagttaggaccggcaagccgggcaatgggggccaaggcagttggattcacatgcagtgtcggtaaatcaagcacggcttctgcaaaatgaaattgacggatttctagaataaagagatccgtcatgatgattcccgccgcattacgaatggggacatattggtaaagactggtttcaaagcgaatgcgagcagcttgtaaacccggcacctgaatctccgtgctcggaatcaatggtaaatcaatcagcgttaattcactttgatcaggagccagtcttgctgcggtttgattcatcgccttggtaagatcagtgctaaccatgtgcacaaccgcttcatggcgagcaaggaggttggccgcagtatcttttggcgcttggcgttcgcgcaaaatcgcaaccgataacaacggcaactgattggaaatcccggttgtaaacgaaaatggtgctagattaatgagacctgctgtattctgggtggtaatccaagcgattggccgtgggatgatgctgccggacaaaagcttgtattgttcatgcggtgaaagttcgctggcagataggttaatcatcgtagacctccagtacataacaaatccgatggtgagaccttgcaatagaagctggtgtagcccaaaagtacgtcacgactgcaagtgtagcgcagggaacgaatggcgtcaaaaggacaagctcgtttggcattctcaagcactcactagtttgttcaaagttgtcagggcacagcggcagtcgagcttaatagccaaacgtaaggcatcacccagtgagacttagcgcgaacaaaaaagcgatgtttggcgattgagatcgcaaacatcgccgtataggcatcggaggaccgattgattaatggggactggtatcagtagcagaatttgatccgggatcagtcggagatggtgactgactgctagacgaaccggctggcggctggttactttgatcgctaccaggcttttcggaatcgtcgccagtctgcgtaccctgaccgccagtttgagccggattgctacctgacgcgccgctttggctatgctgactttcgacactaggcgcggcagaagatgatggttcagtggaaacagttgaggaaacagaatgactagtttgggagtttgttgatgacggtaccgagctgatgactgaacttgaagaaacgcttgaagcagtctgcgaggttttaaaattcgctagactgacaagctttttcttagaacgttgtaggggcaaactagtcgttaaatagtgataattatgaggcgttttacccttcaacgagatggtattgttgagctctttcttcaaggcagttgtgtagctcagcacggtgccagatgcgtccttggctgaatattcatcaacagttgatgcctgcttgtgcttgtatgtcgtggtcgtcgtgtaagtgtagacattggcgtgatcggatacaagcgtcaacttaccttttttctgtttaatactaccggtatcattaatgacttgtggctgactatgcgcgtcaataatgagcaggcgggtataagtcttggcagtcgttaatttcacataaacagtaagatcgtgatgaacaccgttttcgtccgtgacatcgccagtagcggtataagtcccgcttttaaaagactgggtgactgccgaggtggatgatgcgctactgcttgaagaggaagcgacaggtccttgaaccttagctccccgaagcactagccagatgaagacaccgataaacagaataatcgcgccgattccggctagtgtgaggtaaagcgttctgcgattccggcgaatacgttcacgtcgcatggattgcctcctgagataaaatgaattttgttcaaaactgggatagataaggatgaaccagaagtatcacaaatgagctgccggtatactacgatcacataaacctttgtacgtgatcgcagtcgatagcggcggcccactaaaatactaatgacaggatcatgtctaatatgacttttgcacaatgatgttgccattagcaagtatcaaagtttcaatcggcatatcaaaagattcaactggccagtctggttggttaaacgccataaccggtggcaccagcgtcaccgtatggcctgggtaatcggctaaaaaacgatcataatagccgccgccaaagccaatacggaaattgtctgccagcgaaaaaccgatcccgggaacaatcaaaagatcaggggccggctcgacttgatcggcatgataaggcggctcgggaataccgaaacgactggttaccaactgatcaaaaccggggtctggcaggaaaaccatttgacgtttaggcataacgtgcggcaggaacacagctttgttggcagcatgagcagctgcaatgataggggcagtgggaacttcaaaaggtccgctaaccgtgaccccgatgctgtcagcttgctgccacagcggagttttcactaatgctgccaatagattttccccagccatctgggtttctttggccgctgtttgtaggcgcttgagctgacgggagcgaaattcggctttcgtagacatgacaacctcacttattttttaggaattcgcttaagacaaccgcttgattatgggtttcatctttagctccgtataacatgataaccggatcctgttcgtgttcctttaaagttttaatgaaatttggcaaatccggattttttgctagctctgccaaatagcgttctttgaattcaggatatttttccggatcatgaccgaaccatttacgcaattccggagagggcgcaatggttttggcccataaatccaatgccgcgttgaccttgctgatgccacgtggccagattctgtcaacaagaacgcgaaaaccttgggcttggggtttttgataaatccgttcgagtgttactttcatatcgatcacctcatttcttatgataccagtcttggcaagtcgtgaatgttctagtcgcgatacggtatactaattaaaagaggtgtcatcatgattacgtgttatcaaattcaaaaagaccgcaatgtgcaggtggcaacggatgatcaggctaactggattagggtccaatctcctttaccccaagaactgcaaaccttggcaaccacttacggacttccgcaaacctatgtcgatgcggctttggataaacatgaaaatgcacgggtagaagggctggatccggctgataagatgccgggcctaattgttttacggtatccaatcgaaataaccaatgaattaggattccgccaatttaacaccgtaccgctcacgatgatcttactggccgatcgcgttatcacgattatgcagcatccattgcgggcttttgacgacttggccgcgcagccattatcctccaaaccggaagaatttgccttggaagttttgtggttagtgttgcaccaattcgtgattgacatggatcaattaaatgacgaaaccaaacagattgaaggcagtctgggcaaagcagctaaaaatactcagctttatcaattgatggcgatgcaaaagagtctggtcttttttgatgcggcgttagagcactcgggaaacctactcaagtcattacgtgcaggcgagcgctttttcacggcggctggttaccttcgtcggctacatgacgtggaagtcgaggtggttgaggctcaaaccatggtccgcattacgaacaaattattggagcagtattcgactgctgtgagtgcgattgtatcaaataacctgaacctcatcatgaaggtcttgacgagcctgacaattattttgaccattcccaccatcgttggcggaatttacggtatgaatgtacggctgccatttgagaatgcgtactgggcattttggtggctgattggcggcaccgcggttttatgcggtcttgccgcatggtggttgtggcgcaaggattacttttaaagtggcagatactttcaacgcccgcaaaattggcttgtttggcgtcaactataggaaaaaattccatataaaaatcgattctaacgtatttgctggaatcgatttttttctgggcagcattgcctcacttatatgattttaaaatcgattcgaaccgtttcatcgctggcgttaaaacgcgatctttgcgatgtacgatcgagattgtgaaggccggctgatgggcatcatcaatggctaaagtagccagacggtcatcggggttaattgcgattctggttaagaacccgatcccgacattttggcgaaccaatcgcttgagtaggggcacatcgccggttcgataaacgatattcggcgagaatgtgtgccgttgttcaaaccaggcaaacgcgcgggtatggacaaagccctcacttaaagtaatgaattggcgtttagcaagcgtggcgaaacgaacgcttttgttggctgccaaaggatcgtctttgcgggtgatgatcacaaacggtgccgcattgatttgtacgacatgtaagtcagactcgactaatggaccactggcacccagcacggcgaagtccaacttgccagctttgatttgatcaagcaaagcggccgatccagcttcgatggtttccagctgtggcattaaaccggtattaatcaaatcgggcgcaatcttaggaaacagataaccaccgatgattggaggaagaccaaagcggattttggtttttttatcccatgcaatgtcttgttgggcaagtgtcaactgattcagaataatcgccgcatgggccgctagctgttcgccagccggggtcacactgatatcatgatgacggcggtcgcgaataatcagctgtgcgtgaaaataatcctccagacgcttaatcgcggttgtaatagtgggttgactaactgcgaatttttcagcagtttgtgagaaattgccggttttcgttagcgaaagaaaatagtcaaaatcccgagtattcacgtttagcctcctaaaaaaagtgagcgcgagccagcgcggttagaagtcggagtgtaagtggccttaagcgtgatggccgggttttggccattgcgcttaaggtccttacacgcagacttctgcgctggggagcgcgttatggagcagaaaagccagcgcggttagaagtcggagtgtaagtggccttaagcgtgatggccgggttttggccattgcgcttaaggtccttacacgcagacttctgcgctggggagcgcgttatggagcagaaaagccagcgcggttaggagccggagtgtaagcggccttggacgtgatggtcgctctttgaccattgcgaccaaggtccttacacgcagatccctgcgccggggagcgcgttatggtgtgagctgccacgccgacaaaagaaaaataatggcgtcatataaaaatattttatcacttctgttaggtttgactatagtttttgcggcggcgtatcgtctcctcttgtgattaaaagttgtgtccgatttaactggcacaaaaaggagtgtggactttgaaatatacaccagaacagatcctgaataacccatttttaaataaagggactgcttttacgcaggaggaacggaaccaatatggcttgaatggtttgctgccaccagctgtacaaacacttgatcagcaggttaagcaagcttatgcccagttgcagaccaagccaactgatttggccaagcgtcaatttttgatgaccttgttcaacgagaatcatgttttattctataagcttttctccgagcatatcaacgaattcatgccaattgtttacgatccgactattgccgacacgattgaaaactacagtgcactttttgttaatccacaaaatgccacgtatctttcaatcgatgatccggaccatatcgaaagcgcactgaagcatagcgcagatggccgcgatatccggttgctggttgtaagcgatgctgaaggtattcttggtattggcgattggggcacgcagggtgttgacatctcagtcggcaaattgatggtttatacggctgctgccggcattgatccgagtcaggtcttgccagtggtcttagatgtcggcactaacaatgaaagtttgttgaacgacgacctttatttaggcaatcgtcacaagcgcgtatacggtgaaaagtatcacaactttgtcgataaatttgtcgccgcagcagaaaagctgttcccgaacctgtatttgcattttgaagactttggacgcagtaatgctgcagatattttgaatcaatataaagacaagatcactaccttcaatgatgacattcaaggtaccgggatcatcgttttggccgggctattaggcgccatgaatatttccaagcaaaaattgaccgaccaagtttatttgagctttggtgccggaactgccggtgctggtattgcttcgcgagtttacgaggcctttgttgaagaaggcttgagcccagaagaagccaagaagcatttctacttggtggacaaacaaggcttactctttgatgacatgacggatttgacgccagaacaaaagccgtttgcccgttctcgcagcgagtttgctaatgcagacgagctgacaacgcttgaagctgtcgttaaggcagttcatccaacagtcttggttggcacgtcaaccgttccgggtacgtttacggagagtatcgtcaaggaaatggctgctcacaccgatcgaccgattatcttcccattgtccaatccgacgaagctggccgaagctaaagcagatgacttgatcaagtggacggatggccgtggcttgattgctaccggggttccggctgctaatgttgaatataagggtgtcagttatgcgatcggtcaggcgaataatgcgctggtttatccgggcctgggcttgggaaccattgcttcaacggccaaactgttgacggactccatgatctcggccgctgcgcacagtttaggtggaattgttgatccggatcagccaggtgctgccgtgttgccaccggtttcgaagctcgatcagtttagccaaaccgttgcgattgctgttgctgaagacgccatcaagaatgggttaaaccagcaaccgatcagcgatgccaaacaggctgtggccgacatgacctggaagccggaatatcagccattaccggattcaattgaactagacttggaggaatagaactgtgactgcattaagtacatccattcaaagtgtgctgaccatcgttttgctcattgccgtgggttatgttttacggcggcaagggcggttcgatgatcagtttggtaaaaccatctctgatttattgatgaaaattgcgttgcctgcttcgatctttatttctgttttgcaacgactgactttaaacaagctggtaagtctgtcatccggcttagtttacggcttcggtgccgttattcttggctatctgattgcctttttgctggtttggctgcttaaagttcggccaggacggcgtggcactttcatcaacatgttcgtcaacgccaacaccattttcatcggcttaccgttgaacctggccttgtttggtgacaaggcggtgccatatttcctgatgtattacgtggttaacacagtttcaacttggacagtgggtgccttcatcatggcatgggatgatccgactcaggaaaaagcagaaaaaagcggcgccagcttcaactggaagaagttattgccagcgccattggttggtttcctggttgcgttagtctttctgttgcttaagattccgtttatccacgttggctggttaggttttgcagttaacacgctggattatgttggtagtttagtaacgccactatcattgatttatatcgggattattttagctgatgccggattaaaggctatccggtttgatcgcgatacgattgtggccttaattggtcgttttgtgattgcgccagctttgattactggtttgatcttgttgggcatgcacgctggcttcaatgtgccgggacttgaagcccaaacgctgatcattcaggcggcggcaccaggacttgcggtcttgccgattctggcgactgaagcccatgccgatgttgaatatgccaccaacgttgtcacaacttcaaccgttttgttcgtggtcgtcgtgccgattctcatgatgctcgttcaaggtttggcataaagtgaatagtttgaggtgcaacaaaaaaagagccagctggctctttttttgttgcttttaatgttgatgggcttcgagataagctaaagcgctggtgtagtccggctcgtgggtttgttcagtgatcaactcgcgatacttaacggtgccggtgtcgtcgataatccagacactgcgggcatcagtatgattgtcagcaacaaacagtcccatggctttcccaaagtcagcattttgatcggacagtagctgcattttcttgacgttctctgcggcgcaccatgtttgctgttcttgaggggtattggtcgaaatagtataaaaatcgacgttatcaaacgcatccatatcttcgttgaagtgcttggttgaaatactgcaaactcgcgtgttgatgtctggaacaacgctgattaacgtcaaacgtcggctaagatcttgcgtggttaaagactgaccttgcgcatccttgaccgtaaaaacgggtaacttttcaccaattgctgttggggtaccgtttgtcatgatagcggtgccgtgacgagttatttccatcagaattcactccttgtattgtgtgctgagcgtaagccagacttctgagctggcgaacgcgttatgtgcgtttcccggcgtgttggaaaattttgaaacgccggaaaaacacagtaaccgaaaactactttgctcaataataacgcctgacatccttagtttaacatgaccacatactaaaataaatgtgcacaatctaattgcaacatgtcgatcagcatataaattgacgcgaatataaatatttatgtaaggttaaattaatggcaagtagcagtccgtggttattgctatcctaatgaatggaactcgcgcaagaaagtggcaaagggggcggtcaaatggagcagacattggtagtttatagttccgagacagggtttacgcagcgatttgccttatgtatcgcgcaaacgttacattgcgaaatgattgatgtacagtttttgaccgcttcagatctgaaaaatcggtcattggtgatatatggcggtcatcttgtgggcaataaagtgttgggattaaaatccttttatcgccaatttaaagaagatttgcctgaacaatttattgtgttcggcagcggggttgtccggcgcgagtccgtgaattgtcaacagattgcgcagtatcagcagaatcatcagtgtcaatgcacccgtttttattatctgcaagggcatccaaaactgaatcaaatgaacctcttttggcggattcgggctgcgtgggcattaaaacgctacggaagccgatcctgcccagcggttcaagacgccattcgtccgctggtttcggatgtgactcaggtattgaatcgctcatttgctactgatatcgttgaaaacccaccgttgtcttgacttcggtgggttctgtgttttgtgagcgtgagccagcgtgcttagaagtcggagtgttgtaagtggctttggccgtgatgggcgggttttgacattgcggctgggcttcttacactccgacttctgcgccggagaacgcgttatggttaaaactgattattcaccctcggcaattgagcccaccaaaatatggaagtatttataaattgatgttggcggctcagtcaaaataatcgttcgggcgaaagcaaaaatatcggctaagtctttaaactttaaagccgctgctatttcaacaacctgatctaacaatgcacgtgcctttttgtgctgtccttggcgtgcgcacaattcggcacgatggaactgtgcccataaagcaaactcagcgcttggctttttgtcgagcgctgtttctaattggctcagatacctagcggcagcctgattatcttgccgggttaattccaacatcacctgattttccaataagttaaggataagtaacggcgcactgcgaaaatggcgatagtggtgactacgcttgatggcaattgtcagtaagcgatgttgtgtttcagccggcatcgcaatgctgaagatgatgaaaagatataaatcgagttccccccaattgtctagttgctggagatattgttccgcgacatgggtaagatcgggtcgcactggcaacttatgcgcctcatcaatgaccaatgactgaaaaaagacaggcaaaagcatgcgcgcgttgacagccagtttatttttgagcgtgggtgtttgttgaaagcgggtttgcgcttgccggacgttttccttcattttacgcagagtttcgggaaaatcctgggggttggctgacattgtgagggacgaaccaaaataagtctcaagcatccgatcaagattactgtagtccatgtcaaaatcatcagcggcaatatataagaattcttccggtgttgtttctaagcgttccagcaggtgcaatagtttcgtgaccgttatgtcgttttgtccgcgctcgaccttggacagataagaactactgatggtggcatcggctacttgcgcgagcgtcaagcctttattttttcgaatttgtctaagaagcgtaccgatattcatggacttcgcctttcatatatgacatttttcgtttccatcagcataaacctgactatattaaacaacaaggcatctgatcagatgaagctaaacaagatgatgggagcgaggacgatgttgacatggcgttatgggcgtaaatggcagttgctagtctatgcgattgcggctttgttttacagtatgatgaatgtaggggttgcctactgcttgacgatactgattcaggcggcatccgcgcgatctatggcgcggttggtgcaggcagtggtgcccagtttgttaattttcttaggtgcctccgtagcaaattggctcgtgatgttcttgaaggccgtgatcacacgccgagtcaatttgaatattaaggcaagaatggcagcttatttgattgatgacgcagatctcgtcagcacccaatcatcagcactgtcgtttatgacgaatgatttaaaaatgatcgaaacaaatggcattgcaagcgaattggccatcattaaccagctgttcatctttggtggggccatgattggagcgtttgcgtttgattggatgaccgccttagcctttttcctcggcaatctcattccgctaacggtgtcccgagttgctaggaaggggttgcatcgcgcgtcaaaagattggtcaactgccaatggtcactggacgtcaggaatcaagaactatttggccgggcgggataccattcggatttatcaggcgcaggcggttgttaaaacgcgcatcaacaggctggcacgcggccttgaagatcagttgaaaaagatgaccgttttgaccggcagtatgaacacgctgggcatgctattggcactttggttcggcgttttagcaccttttggcatcgggatttaccgcgtgatgatcggggcttcgactttagcgttatttatgggcattgtgcaactgtcaaacgatatgcgcaatccgctgattatggttatcgaagcgatgaatcaatggcagacgaccaaaccgctagtcgcaaagatcaagcaagcacagcctagagatgcgtcgacagctgaaaagccaataaccactggacccattgtgcttaaagatgcatcggtaacacttggcaaacaaaagattcttgattcgcgcaaccttaccattaagcctggccaaaaagtattgattatggcgccttccgggtacggtaaatccaccttgctgcgactgctgatcggcgagttaccgctagccagcggacaatattatcttggtaatgtccaaataacggcggcgactcgtacgcaattaagtcatttgtttggcttgattaaacagacaccatttatgtttgacgatacgattcggtttaatttaacgttaggcggtcatttttcccagacagctttagacaaggcggtggctgatgctggtctgacggcgcttattgcacaaaaaggatgggattatcaagttggcgaagagggccatcatttgtcaggcggccaaattcaacggcttgaaattgcccgggctcttttgcggcagcgcccgattttgttagccgacgaggtcacttctgcgttggatgaaaaactaagtgatcaactccatacccgcctattgcaaagtcctgcaacgttaatcgaagtggcgcatcatataagtcagtcatggcagcagcgatacgatcaggtcattcaacttgatgcagatgcaaaagccggttgaagcaggtgatgctgcgtgacacgggtgcaatggagaatacaggtcaaacaaaaaccgcatgataaaaatgcggtttttgtcgttcttatacctgctcaatttctttacttaatgcctcaatctcatcaactgtcgtccccaagaaactgattgcatgcttcaaagcggcgtcggtggtgacatcaacgccggcgactcgagctgcttcgactggatcaagtgagtcgcctaggctgagataacgcaaccaccgatcaacggctggttggccttgttgttcgatggcttggaatgcttgggtagcaaccgtcaagccagctgagtaggagtacgaataaagtcccatgtagtaatgactttgccgcatccaagtcagctcagcacctggctcaagttctactgccgatccccaaaaatcggtcaggactttacgcgtaatggcgtccaaccgagcagcatcaaaagtttcgccgttatcgatcaagttatagacttcccgttgaaacgcggcttcgagcagatgggtgacaaagttgtggaaataggtatcatttaataaccgtgacaaggcaaagcgcttcattcgcggatctttagcgttttcttcgagatagtgagtcagcaacagttcgttgaaggtggaaggactttcgaccaaataggcattaaagtccgcatccaacacattatgggcttcctgtgagcggaccatctgagcggtatggcctaactcgtgaatcaaggtgtaaacggcaggcagcgtattactccaagtcatttcgacataaggatgcacaccatacggtccagcagtgtaagctccggaatccttgccttgattagcagggaaatcgatccaccgctctgagaaagcctgcatcatctgtgcctggtaatcttgacccatgagtgcggtggcatttttaatatcttctttggcttgttctagtgtgatggttggcgcataattcggatcaatgtcgatttgcaaatcggtataaccaatatgatcaagcccccaaagcgatttcacatgtgtcacataacgacgcatgatcggagctaaatcgcgcatgataacatcaatctgacggttaaacatctcgcgggtgatttcttgatcggcgagtagatagtcaatcaccgaatcataaccgcgcatggtagccgtaatcttttcacgcgtgacttgggctaagtaacctgccgccatcgtgttttcataacgacgcaaggtctggttgaattgagcgtaagcggcgcgccgaatttcggtatcgggatgtttttgataattttcttcatacatgacaaacgataacgggtaagttttaccgtgcgccgtaaacgtaccaaagtccatatcgccaaagatgctttggtcgcgaatatcacttggagcctgaaaaaccggtgtcaattcggctagcaccttctcggcagctggtggtaaggcaccttgtttggcaactttgatttggcgaataaaaccggcataatcaggagcggtctcgacaactgcatcaagcacgttttcggaaagttgcgtgagttcggctcgaaagaaacttagctgaccgctgatttcgccatcgaggcccgttacctgagcctgccgcgtacgcaatgcaggatcagttgtatcggtggagtatggcataaagccccaatgaatgatgcgactggcaagagctacaatggttccatagtcagctaatgcatccgcaatgacagctggttgcgtcaatttgccttgatacatcctgacaaaatccttggtcaaggcccgcacctgctttactgcttcagtgtacgcaaaatcatcgttgaaaatcggagtaagatcccaagtcaactgctgatcgactgcttgccgttttggtagtgttgtctcgctcatgtaaaaagcctccttaaaaaagtgagcgcgagccaacgcaggcttctgcgttggggaagcgcgttatgtgcgaatcgccgcgtttaacaccaggaaacgcactatagtggctaaagtatagcattgatcacgactaaaacgcatgcgcacgctagcaagttcagaatttttccaaaaaggtattggtacatctatgcttactgccggtaatagcagttcattttgcgggaaaaataaacttaactaaagctaaactgccttttttcatcagctaccactcgtgtatactgaatatgaacgaatttactgaaaatattcaaggaatcgaggcacatgcatggcagaagaacaaactttagtcttggttaagcccgatggtgtcgcccaaggacatatcggcgaggtcattacccgcatagaacgacgcggattcaccattgaggcactaaaagtcacacaggcaacctccgcccaattacatcagcattatgcagcacttgttgacaagccgttctttcccaaaattgaacgcttcatgaccagtggcccgctggtggcgatgattgtcagcgggtttaatgtgatcgaagccgttcgaacgatgacaggcgctacgaatcccggagatgctgcgccaggcacgattcgcggggactttggtcgggaatgggccgatcagacgattcgcaacgttattcacagctcagatagcgaagccagtgcgcaacgtgagattccaatttggtttgcagacaagcaatatgcccctaaagccaatcaatagccgctttggcctagttcattttaatagcatcatctgaaactgtatttgaagaaagcatccaaaaaggcagttgcgatacgatctgtgatcataccgcaactgccttttggtgtcatcggattaatgtagcaggtgcttttaagccgttagtagtaggtgcggcgattgccgaagtttaatttggcaatgatggtgttgggttccgtcatatccggtgattgcagccacaagccgcgggacgcgagctctttaaacagataatttatcgtggcaatttcttcagctgcagggtcgtcaattttagcaccggcttgatgcgcctgtgcaatggcatcgtccgcgaatgtatcattcaaagtggcatacagtttgcctagttcatcgtccagataagcttctagtgcagtaaaaaaagcgccatgatcggctttacgatcaaaataccgcgctactagctggttgttgtcaatccccatctataacacatcctttttaaatgattttaccatgcgtcagtgatcaaaagaaatcatcgttttttaaagctgggtgcagcttaccgccagttgattttagaaagcacccgtcgaccgaggaattcttgaatcaagaggtaaaacggtacggttgaggccatgagcggcagatagagtaaggctaactgccaatgccataagttggcgagtgaaaaaataccgttgaaaacaaagaagacaagaaatagcgcgacactgagactcgcaagcaagccggttttaagccggttaaacggtcgcgcaacgactagcaggacattcaaggaaatagtcccgatcaacatggctaccatggtcgaagtggtatcgaaactgagatggaagaatgattccatccaggttaacaggagcgtataaacaacgacgctaatagccgctggtgccgcgactgtcatgaccttttgcatgaactgaccggtgacgcgttcgaagttaggctctagggtcaagaagaaagagggaatggccaccccaatagctgaaaccggggtgagattgatggggacaatcggataatcgagcggcaaaaagacaaagatagtcgctaaaatgacggaatacatggtcttgaccagatacatcgaggccacacgttcgatgttgttgatgacccgccgcccttcgtttagtaccccggtcatggcatcaaaattagaatccaacaaaacgaaatcggcaatcgaactggcggcatcggcaccggaagccatcgcaatgctgcagtcactttggcgcaacgccaagacatcgttaacaccatcgccggtcatcgcaaccgtatgccccaaagcctgataagccatgatgagctgctttttttgatccggggtcacccggccgaagacattgtattggttaaccagcgtttgaaaatcagcggcggtggcatcagcagaaatggtgctcatgtccacactgcgatcagcaccttcgagatgggcttgcttggcgatgttagcgactgtggtcggatcatcacccgaaatgacttttaaagccacgccttgggtcttgaagaaatcaaacgtgttgatggcagtcgggcgtaattcatccgtgatgagaatcaagccgattaactgcggattaaccaaaggctgggtaagttgggtggccgttcccaccgcaagcacccggtagccatttgccgcagctttttgaatcttagccgttatggcagctggcagttgatcaccaaatgtaaactggggcgcccccataaacaaggcttgtccatccacaacggccccggaccatttgcgagctgaagaaaatggaacggtctgggtgacttgttgattggcatcggcatcggctgcagctttgattgccaaagccgtttcattgtcatcgttgagtgcatagacgatcgcagcggcggcgcgggtgacatctttagcggttcgtccgtctgcaggtaatgtgtcggtgactttgagcttgccactggtaatcgtcccggttttatccaaacatattgtgtcgactcttgctaaagcttcaatggccggtaatgcccgcaccaagacgcgcttgacagcaaggttgcgtgcagaaacagcgagtgcaacgtttgttaacaaaaccagtccttcagggatcatcccgatcatggctgcactggtggttaaaatcgcgcgattataatgaccccgtcgaatcatggaaaccgtgaaaagaatgacgccgattggaatcaaaacataggttaaaacccgaatgatacgattgatagtggctaatagctgactttgactggccttttctgccttagcttctagcgctagtttagcggcaaaggtagcgtcaccgacagcggttacttgcatggtagcctgtcccgatacaacaaatgcaccggagagcaaagtgtcaccaacttttttggcaatggggcgggattcaccggttagtggactttcatcgctttcaaggccgttggtagctaccacggtgccgtccaccggaatttggtccccgcgtttgaggatgaccatatcgtccataaccagttgctcaagctcgactttttccacctgaccgttacggatgactgtcgcacgggtggcagcaagaatcgacattttgtcaatttggcgcttggcttgaatctcctgaatcgtaccaatggcagtattgataatggcaacaccgagaaacagtaaattcttatagctaccagtcgtaataatgagcgcacccaacacgacattgaccaagttgaataaagtgaaggtattgactttgatgatctggctaattgatcgtgtcagtggctttagtggcaggttgtgttggcctgcatcgattcgttgctgaacttgttcttccgataacccttgatcaggtgaaatcttttgctctgccatcgcatgccctccagtacttttcatccattttaccaatccagacaacaagatgccgaatatcacacttgtttttacaaaactttgaagttgctggcatggttgggttatggttagggagtcatgaaaccgtcataatgagatgaaagttatagaaagaagtgctctcatggtaaaacgaaacccaaatggaacccgatttatcacattacctaatggctaccacttgtggacccagacattaggcagtggcccgattcaattactgacgttgcacggcggaccaggcggcacgaatgaagtgtttgaaaattttgctgctgaactggcatcttttggtgtccgtgtctcgcggtacgaccaactgggttcatttttctctgatcaaccggacttttccgatccggctaatcaaaagcgttttctcaatattgcctattatgttgacgaagtggaaaatgttcggcaacagctgggccttgatcatttttacctattaggtcagtcctggggcggtgtgttggcgattgaatatggcttgaaatatccgcagcatcttaagggacttattttgagctcgatgattgataacttggatgagtatttagttaacattaacaagattcgggagaccatgttttctagtgatgacgtggcatacatgcaacggattgaagcccagcacgcgtttgcggatgctaaataccagcagttggtgcgtgagttaggggagcaatatcttcatcatgccaaagatccccagccgcgccatttaattagcacgttggcgacccccgtgtatcatcattttcaaggtgataatgaatttgtgatggtaggcgcacttaaggactgggatcgacgggctgatatacatcgtctgacaatgccgacttatctgacattcggtggacatgaaaccatgccgttatcagctgccaagcgaatggctcagacaataccaaatgccactttgcatgtcacacctaatgccggtcatggtcagatgttggacaacccgacagattatttcagtcatttgggtcagtggcttgtgaaaacggatgctggatcacctttattagataattaacgttataatataaatggtaagtatatgtctctcatgtcatggaggtgctttcatgtctgattttgatgaattaaaagaagggctacttgaaccggttcatgcctttgatcacgcactggagcaacaacccgatttgattattccgttagcagtgattcatttgattcccattgcactgactttaggcggcggcattgcgatcattcgcggtcaccagaaattacgcgcggaaaaagaacgaaccaagcaattgagcctgaagctggaaatgcacaaacgtcatcatggccggcatccatggcgactggcaccagaacatcgtggcgcacatgaagtgtttgcaccggaatatgcagaagtaccggttaataaaaaacatcatttgcatcacaagcattaatttgtattaggtgatttgctttgaaacgactcccgccaataaacccgcgggagtcgtttttcggttggggggttcttgcatactctcgaaacgcgttccccggcgcaggagtctgcgtgtaaggaccttggacgcaatggtcaaagcccgcccggccattacgctcaaggccacttacactccggtttctaagcgggctggctcacgctctgctgaaacgcgttcgccggcgcaggagtctgcgtgtaaggaccttggatgcaatggtcaaagcccgaccatcacgtccaaggccgcttacactccgactcctgaacgcgccggctcacgctctgctgaaacgcgttcgccggcgcaggagtctgcgtgtaaggaccttggacgcaatggtcaaagcccgaccatcacgtccaaggccacttacactccgactcctgaacgcgccggctcacgctctttttactttcagattgaatctcgcgtacagttgggggaaaatgaaggacacaattatgttttggagatgatgtttgtgtcaaccatatttatgcgggttgcgatgcctgctgatattcctgcaatgatgaaagttatcgcgtctgcgcggcagtttttgggcgcgcagggaattgaccagtggcaggggacttatccggatcaggccgcgattgagcaggacattgctaccggtatcggccgggttttgattgtggatggccgggttgccggagtggcggctttagttgtcggtccggatccgcattatctcagaattgatggggcaggctggttggcagatgtcccgtatctagcagttcaccgattcgcacttgacggtagtattcgcggtaaacagttgagtcgggtattttttagcaacattatgagtgaagcttatcggcgcggttttgacgatttgcgagtggatacccacgcaaaaaatgtgatcatgcagcatgcgattacaggtatgggctttgattttcgtggcatcgtttatatggacgaaccggttcctgaacgcaatgcctatgaagttcggttaacatcggtttaatagacgtaaacatggagggtaaagatgcaggacattggtaacttagcacttattttagtaacaacattggtattggcacacgtgagtcggttgctgaaaatgcccgcagttattggcgaattattagcaggaattttaattgggccggcacttctgggatggatttcgtctacgcatacgatttcactatttgcagaaatcggtgtcattattctgatgtttttagccgggttggaaagtgatctggagttattgaagaaatactttaaacccggtatgttagtcgcggttatcggcgttattgtgccagttgtcgttgtctttggctttgcccatctttggggatttaacttgaccagcagtctctttcttggcattacatttgcggctacttcggtttccatctcggttgaggttttaaaagaattgcatgccttggaaggtcgcaatggggcaacgatcttaggggctgcagtcgtagacgatatcttgacggtcttaattctaagttttacggtcgcagtattaggggaacaaaaaacaaccagtgttccgttttggctgcaaattatcgagcaactgttgtacttcgttggaatttattttgtggtcagatgggcagcgccgtatttaatgcggttgtctgaaaaattattcccggcttctgcggttaccattatgtcgttattgatttgccttggaatggcatatgtggccgatcttgtgggcatgtctgcagtcatcggtgctttttttgccggagttgcggttggacaaactcattatcggcatgaggttgatggcaatttgagtgcaatcgggtatgccgtttttattccggtatttttcgtcagcgttggcttgaatatgcgttttgatacctttggccgtgatttgggcttcattgccattttgacggttttggcattggtgaccaagtgggtaggctgtggccttggcgatcgtttagcaggcgctagttggttacaaagcaatgttgtgggagctggcatggtttcgcgcggtgaaatggcgctcattgtggctcaaattgggtttgaggccaagcttatggacgcagaatactattccgccgtcattgtggttattgtcatcacaacgttaattgccccggttattttaaaagacgcactacaccgtgaacaggaacttgtataatagagagcgtgaacaggagcgcatagaaatcggagtgtaagtggccctggaccgaaatggccgggctttggccattttgatccagggtccttacacggagatttctgcgactgtgagcgcgtttaaggatagagcgtgaacaggagcgcatcgaaatcattgtctaagcgcccatacctgttgtcggcgttactaatagacgacacttaatggcttttttacagcctttcattcatgtcaaataaggaggatctcaatggcaacattattttttgattttgatggcacggtagcagattcagaagcaggaatcgttgcagcattaaagtacatggttcaggatcgcggattgcgtccgttggataattcagcctatgttcaatttattggcccggcgttggtgcaaaagcttcctgaagtctggccggaattggatgatattgaagttaagcgggcaattgatgcctttcatcactattatcaagaggaaggcttatatcaagccaaactttatcctggctttctagatacgatgacggcattgaaggaacagggacaccatctttatattgcttcggctaaacccgagatgatgctgcatcgccttgttaaacactttgccttggatcgttactttaacgctgcttatggggcaagtgacgatgagcagacgcgcgtcacgaagacggatgttttggcctacgccttaaaagaaaccaatgaagatcctgctaaaagtgtcatggtcggggatcgcgcgaatgacatgattggcggcttggacaatcatgttcagttactcggtgtgacttatggctttggatcagccaaagagctagaagatgcgggagctaaggtgcttgtcgataaaccggaagcaattcctgcaggtttggcaaaattggctaaataataagcgttagataagtttgaagctattaaatccctgatggcatcacgatggggatacaaaaggcgaatgcattttccatatgtgcggagaatgcattcgcctttattcagtcattagcgattctttttagcggcttgctgtggccgaatgaccttggaaccaatttcattcaataacttcacgaactgttttgctttgcgttcgcctagtgctgcgacccattcgttgaattgctcattggcatttttcgtaatggccgcttcgacctgtttgccaagcggggttaactgtagcatattgcggcgccggtcagcttcaaactttgactgggtgacgtaatttaagttgcgtaaaacccgcagttgacgggctaccgcgggcttggttacgccacgcttattcacaattgcagttaaactgatttccggatcattggcaatgtccgataaaatccgatattgctcaaaacttaagtgatacgccgccattggttccgagatcagttcattgatattcttgaacgttgaaaaataggcatccacatatgcctctagtaagggtttatcagtcatatttcttcctccgaatattagtttaacaaatcacgggtcacatgtaacttgaaattctgaaaagttgcggtacacttttcagttatgtaaaggtcttgaaccacttatggaggttaataacgtgcgaaaacataaaaaagcttggctgatcggtattctgtcggtcattggggtgatggtggccgggctggtgggtgccagcttatatttttatcagtatgcctttgttccatccaagaaatctttcttgagtgggaaggaaagccggattattacggatagtaaagtatggcttaaatctgtacataaggaaacctggactgaacaggcagccggcgataagctcaaactagtcgcggattatgtacccgcagccaaaccgaccaataaaacgatcgtggttgcgcatggttatatgaccaacaaggaatacatggccccgcaaatcaagatgtttcacgatgccggatttaacgtcttggctcctgatgatcgcggccaaggccagtcggaaggaaactatatcggttacgggtggccggatcgactggactatctcaaatggattaaccagattataaaaaaacaaggcaaacagagtcagattgccttgtacggggtctcgatgggcggtgcaaccgtgatgtaccttagtggcgagaagttgccgccgcaagtcaaaagtatcgttgaagattgtggttataccagcatcattgacgaacttgcttatcaagccaagtcaatgtttaatatcccgaagtggccgttggtaccggcagttgcgctaactgcgacgttcaaagccggctacaatgtttttgatgccagtgccattgacgctttgcacaaaaacacccgaccgattttattcattcatggcagtaaagacacctttgtcccgaccaagatggtttatcaaaactatcgtgcggccacaaaatcgaaaaaagctttgtgggtcgttaaaggcgcagcacatgcccgtagttttccggatcatcagaaggcatatacaaagcgcgtggttggctggttcaacgctaattggtaaccgttgtatgtctgcttaatgggtggcagtatgagcaacacgggttaagacggtgtaaatttttttggcatcgcttggtgttccgcgcaactcgtaatcggccaaaaaaggcgcgtcgaattccttggcgtagcgtttggcggtcagacaatattgttcattgaaattgcggttgccagaaccgatgatgcctagacaaagcttggcattgtcgccttctgccagatagtcacccatggcattggtcatcagttccttgacgccgttatcaatgccgttaccaccatcgagataggtgggtaccatcacaaagaacggtttcgtttcgccgtcactttgcgtcgcctcggaaatttcttttagaacaatcgctggattttccggattctgatcatgttgggtttgcgcatattcggctagacgtttagcaaatgcgcgcgtgttacctgaaattgaaataaataagatgcgaataggttcagtcatgtggcctgcctctttcattagagttttgaaaataacaatgatgcggctgatcgttaaggtgagctggttagaaaaagaagtcgcggtgctgtcactgatagcgccgcgactctttttaatgaaatggatctgatgcaatcaatgcttgttgccaaaatgagctgatttgcaacattagaactcttgatagaccgctggatcctgattgtttaagcgtccatctgatttagttaatgcgtcaatcgcagccatttcttctttagtcaggctgaaatcaaaaacatcgagattcgtgcgctggcgggaaagatgggcagactttggaatcgggagaatgtggtgttgaagatcccaacgcaaaataacctggccaacattcttgccatgggttgcggcgatctgtttaatcgctggttcttgcaaaaccgctccccgccctaaaggactccatgcgaccgtttgaatattgtgcgcgtcatcgtactcgcgttgttcttgctgattgaaatagggatgtaattcaatctggttgactgctggcgtgaccccggtttccttgatgagccggtcaatatgctcaggcagaaagtttgaaacgccaatagaccggatcagtccgaagcgttgggcctgaatcagcgcttgccatgcttctagataaagatcctctttcggattcggccagtgaatcaaataaaggtcgtagtaatctaaaccggctcgatataggctttcttcgatggtatcaatcgcctcttgataacgatggtggcgtcccggaagtttagacgcaacaataagctgactacgtgggatcccactttgacgcactgcttcgcccacagcaccttcattttcataattaaaggctgaatccaacaagcggtaacccagattaagggccccaaccatggctcgaaccccgttagtcccggttaatttatatgtgccaaaaccaatggctggtaaaacattgccgtcgtttaatgtatagtgcatttgagaaacctccttgtgaagttgtgacccgatgcaacatcgaataaatacatgtgaaagtgaggttgccaaccggcgccaacaccagcaatcatacggcgaaaagcgatttaggatgatggcttaatgatgaccgacatgcatcaccattaagtgtagtccaaatgtcaggaagcgtacaagtcatgatgacgcttcgtgtataatagggccagatgcgagggaggggatccacacgagaacacaacaatggcgaggcgtctcccgtagttggtttgcattatttacgctgatcttttgggtacttctttttgttgaagcctttagtaccggtatgatgttgaccattgggacacccgcacgaacagagcaaatcgttgttaaaagccaaggtctgcaacaactcacggatactttaaaccatgatctggtaacaacggcgaaccaaaatggcgctgctttgaatagtgacactaaactggtcacccttgatgacactcagcggcttgccgttaaaatgatcactgccagtgcagctaaccaaacgcatatttcactggcaaccattaaagaaagtctgacgagtcggcttcagacagcggcgaaaaatcaaggtcaaaattttgacgatcaaaaagtgttggcgagtctcaatgccaaacttgaatatgaaatcaatgagtcaatcatggagcaaggctgggggcttatttatccgttgttggtccttatgacccagacagcggtgattgtagccgcgattttgctggtgattgttctgctcattatgttaaaaacagcacactcatggcggcggtttatggccgttgttgggcggtcgacttacgcaatgggttattttggtggtttcatagcgattcttgtaactgcgagtccattgttaggcatgattagtacgcgggcaccgttaaatacgcaattagcgagtgatttaattcgggcatactcaccgctatggcagcgagtggcaggttggaccattgtcgttggtttaatcattgcggcaattagccatttcttaccacgtcctgccttgcttgcagatgattcggcgaacccggcagcagaaaggtaggttccatgaaacgaaacaactggatttggttgggcttacttggcatggttctggttgtcagtgcaggttggtattggttccacaaccagtctgccaacacatccgatcaggagcaggcgtcgattggcaaaaccgcaacgctttatttgcatggctattccggtggtgccgggtcgaccaacacgttaatccgtcacgctaaacaggcgggagcaaccaaagtccttattgcaacggtgagtaaaaacgggaaagtcagttggcttgggacgcctcatcatgttcgtaagccaattgtgcaagtggtctttgaagacaatcgcaatccggatgctgtgaaatgggctgattggctggcgacggttaatcgtcagctttaccaacgttatggtgtgcgcaacgttaactttgtcgcccactcaatgggaaatatggcggtgatgttctatgcaattcgcaatcaagaccagcaaaaactacccaaaataaacgcctatgttgccattgccgggcattttgacggcatcattggtatgggcgatcaaccacatcaaatcaagttaactgctaacggctatccatccccgttagacgaaaattatgctgagttggctcggatgcgcgatcgttttccaaaaggggttaaggtgttgaatatctacggtgatcttcgcgatggttccgattcggatgggcgggttagcaacaactcatcgcgatcgttacgatatctggttagcccacgcgcaaccagttaccgggaaagagaatacttcggtcgcgatgcccaacacagcgcattacatgaaaatcctaaggtcgcccaagcggtagatgcttttctctggtgagactcacggttaggtgcgatcgtatggtgacacaacaacgcgtccaccaagaaaactggccatatagacatcaccgggttcgtatccttgctctgccaagcgatctttaagccatttctcatcatggtcaatggcgtcaagtgcggccgggtcaatttgtccatctaaaatgagtggatatttgatggtttcatcgccttttaaaatgacgtttaactggccattttgttcaagataagcttggcgaacatcgcgtaaatcattgacgccggcagctcgtagtttataagcaaggtcgttagcagacaagcctacctgtgtggcggtatccactttgatttgaccatgttgaacgactaataacggttcgccatcaatcacccgtttgagccaacgattgtggttcgtcaggtatttagtgctgaaaacgattaacgtccagatcagcagcacgttgacaaactgcaacagaccgatatcggtattataaataacgccgccgatgatgccgccaagaacgtaattctgcatttgatcgacaatggttgccggtgcaagattacctttaccggtgagcttgatttgcgcgatgaagacaatgaagcccaaaagcagcttcattgccgtcacaaagtatggatcctgaaaaagtcgcatatgaatctccttatttagtgatgaactgagcttttggcacaatcaaggtcgttttagataactggtaactgttattatcggcattaattgtgacggtgtacatttcttttgtggagcggccgatggtgatcagcatgccggtgtgaacagtattgctgttggcataaagctggcgggtagcgacatgcttttgggttgccacgctgcgtaacagggtggcaacggcttgggaatcagcattggccgttcgactagcctgaagatcgcgaacttggatgccgatggtcaggagttcaactaaagcaactagcaccaaaagatcgcggtatttgttactgcgtttgtggcgtaaaaagtacagaagataagcaataataagcaaggcaccgattaaaataatggtataacgtaaggtgctttgccaactgttctgctgggttagcacggaataagcaaaaaaggtagttcccatagtgcacctccatgaatcatggtctgatcaaatcataacaagaataatagcgagggtgaagttgttcttgacatggcttatcgcggtgttatgatgaattcaatttatgacaaacacattgctttgcggagaagagtaaccgaagcgcagatcgacagcgagcctggacagtgtgagcaggtgatcggctaatcggtgaagatgagctccaaatagcttttcagtggttcacgccattgaaacgggtgcacccgttatgatgccaggtatcagttttggtactgttgaggtgttaatgttaaattaacacgaataagggtggtaacgcgcaccgtcgccccttgatcggattcgatcaaggggcttttttcgtcccgtgacggctatgacttaccgcatcagtcgagtgtgttgcataaaggtaccgactagttggttgtttcattgctgcgtgttgtcagtggtgaaatattaatttgtagttgattttgcgtaggcatccatttttgaatgtgatggttattcaagactgtagtgcgtttgccatgacgcgtttatagggctagagatctgacctacactccggtttctaagcggccctgttcacgctcactttctataacgcgttcaccggcgcaggggtctgcgtgtaaggacctcagccgcaatggccaaagcccggccatcacgtctgaggccgcttacactccgacccctaagcgcgccggttcacgctcactttccataacgcgctccccggcgcaggagtctgcgtgtaaggacctcgaacgcaatggccaaagcccggccattccgcccgaggccacttacactccgactcctaagcgcgccggctcgcgctcactttcttttaggagggtttcacatgacagaagaagttcaaaccaaagccccttttcgtgctgatttagttggtagtttgctgcgtccggagcggttgaaggttgctcatcagcagcttgggatcggtgagattcagcaggatcaggagctggcgattcagcatgaagccatcaaacatattgttaaaaagcaagtcgaactcgggtttaatgccgttactgatggtgaattctcgcggcgttattggcacctagactttttctggggcctgaatggtttcgaaaaggatgatgcatggaagtatgaacgggactttaaaggtggtatcaacgctgctgccaatgttcatcttgccggtaaggttggtttcaatcccgatcatcccttctttgccgcctttaactatctcaagagcattgtgcctgccggggtcttgccgaagcaaacgattcctagtccagcgctgttgtttagggatcatcgcagcgataactggtcgaagtactatgcttcttttgatgattatttagctgacgtggtgcaagcatacgtggcaactattgagcacttttatactttgggtgtccgttacttgcagattgatgatacgaattgggcttatctgattcaaaacctaaaagatacagagaacgacccgaaacgacaccagcattttgtcgactttgccaagctggcgcatcaggtcattaaagcagtgttagttcgattacctgaagatttgaccgtaacttcgcacatttgccgcggaaatttccagtcgactttcttattctcgggcggctatcagtatgttgctgatgaaattggcgacttgccttatgacggattgttccttgagtatgacagtcagcgtgccggttcgtttgagccattaccgcagctgtggcaaggcgataccaataagcggattgtgttagggttgattacgtcgaagtttccggagttagaagacgaggaaaaagtgattgaacgtatccatgctgcgactgcttatgtgccactgagcaacctggctttgtccacccaatgtggttttgcgtcaactgaagaaggcaacaagctgaccgaagatgatcaatgggcgaagttggccttggttcagcgtattgcgcatcgggtttgggaagatgcttaacagaaagccggctagactcaaaattttttgaccctatttggcatgatgtcatgtcattcccagatttttttcacaccggtgggattgtgttatatgatgagtaggtaagctattgagaaggagatccttaatttatggcaaaagttgaaagctttacgttagatcacactgcagttaaggcgccttatgtccggttaattaccaccgaaaagggcccgaatggcgatgaaatttctaactatgatttacgcttggttcagccaaacaccgctgcgattgatactgccgggttgcatacaattgaacacttgttggcatcattattgcgcgatcgcatggatggcgtgattgattgttcaccgtttggctgccgcaccggctttcacttgattacctggggaacacacagcaccacggaagtcgccaaagcgctgaagtccagccttgaagcgattgctaacgatattacctgggatgatgtacccggtgttgacatcaagagttgtggcaactacaaagatcacagcctgttttctgctaaagagtgggcaaagttgattttgagtcgcggcatttctaacgatccatttacccggcaggttgtctaatctaacgagcattgattagaaccaaaaatggcactgcacaagttcgaatagcgaacctggcagcgccattttcatgtcaccatgtttaactgaatagatcaatcaaccaccggccaccatatagcaaactcatgctataggcgaagatggtaatgggtttgccgagtataataatccagaagaacctggtgaaggtcattttggtgagaccggcgagcaaacatagcacatcatctggggcaaccggcagcacaatggcaagcgtaaacaggtgatcaaaccgggtctgattcttagtgtagccgatgtatttttcataagttttttccgaaattaaatacgtcagcaggggcttgccaaaacggcgggcaagaaaaaagttaataaaagatccgatcgcgatgccgatgtagttgtagagaaaaccaaaccacgggccaaaaagaatcacacctgcagcggtactgatgccgcctggaatgatgggaatcacgacctggataacttgaatgacaacgaaaaataaagctccggttaagccgagtcgggcgatgtaactttgtaaaaccttgacatcagaaagaatccctagatcgtaccaataaatagtgacgatgactaaagcgatcacaacgatcagggtggcaagattgatcaaatggcggacattttttggagtcataacgttaagcctcagaacgatttatcatcaagaaaagttctatgctacaatgagtcaagcgtaccaaacatatgtactgaatggagagcttatgtacgaatactttgaaggcacaattcaggccgtaacgccggcgtacattgtcattgatgtcaatggcatcggatttcgcctgctggtagccaatccatacgattttgaagcgggaaagcagacccggatttatgtgcaactcatcatccgcgaaaatgatcaaacactttacggatttgaaacggcagcggataaacgaacttttaaccagttgttatccgtcaccggcattggtccgaaatcagcgttggcaattttggcaaatgtttcaagtggtggcctagcaactgccattgcccaagatgatgttaaatttttgaccaagtttccgggcatcggtaagaagacggccgctcagattatcctggatctaaaaggcaaaattacgaccgatgctcaaccggctgccgcaacgatcatgccgaccgccgatcaagtagcgccggagctggcagatgccttggctgcactggttgccttaggatacacccaacgcgcggttgatggcattaccgatgctttgaaagcctttgacgccacgacgaccgatgcttatctgcgtgaaggtttacgcttgttgagcggacgagcataacgttgattatactggagcagcaggacatcgacaacggtaagactttttcagacaatatagaaggggcgtgagtttttgccagacgcaaacaaggatcggttagtttcaggcgacattgatgatctgaatgaagcacaaattgagaaaagcttacgtccacggcggcttgctcaatatattggtcaggatcgggttaaacatcagctgaccgtttatattactgcggccaagcaacgtgaagaatccttggatcacgttttgttatatggaccgccgggattaggcaaaaccacgctggcactggtgattgccaacgaaatgggtgtgaatatccgtaccacttccggaccggccattgaaaaaccaggtgatttggtcgcgttgctgaatgagttgcgccccggagatgtgttgtttgtcgatgaaattcaccgattaccaaaaattgttgaagaaatgttgtactcggccatggaagacttttatattgatattgtcgttggccagggtccgactgcccatccggttcattttcccttgccgccatttaccttgattggggccacaacgcgagctggtatgttgtcggcaccattgcgcgatcgatttggcattagtgaacatatggcgtattattcgcctgatgacttaagtgagattgttaaacgctcggcgaatgtcttcaatatggcgattgatgcagaaggtgcttacgagattgcgcggcggtcgcggggaacgccgcgggttgccaatcgcttgttgaagcgtattcgagattttgctgaagttgccggcaagagcccggttgacttggcaatggtcgatcatgcgcttgatcagttgcaggtcgatgcccaagggcttgatcagattgatcgcaagttattaaccttcatgattcgtgattaccaaggcggaccggttggcttatcaacgattgctgccaatatcggtgaagaaatggccacgattgaagagatgtatgaaccctacctgttgcaaatcgggttcttgaaacgaactcctcgcggacgcatggtgacccctgctggctttgcacacatggggatgacgatgccgcaatcctcagacgagcagtcgccatcaaaaaacaactaaatgaaatgaatggaagcgaacaagttgcaagacaaaaaacgttatcggcgcgtagaaaataaagattatcaactttcggattttgattatgacttaccgcatgaattgatcgcccaaacaccgctgaaagaacgcgatgccagccgtctgttggttttaaatgctgatactggcgcgatgcaggataagcatttttatgacattctggattattttaaaccaggcgatgcgttggtcatgaacgacacacgggttatgccggcacgactttatggtgtcaaaccggaaaccggtgcccacatggaagtgctattacttaataatacttccggcgacgactgggaaactttgatgaagccagcgcgcaaggcaccagtcgggacagtgattgattttggtgacgggttgttaaaggcgacggtcaccaaagagctggaacatggcggacggatgatccattttgattacgatggcattttcatggaaattcttgataagctcggtgaaacgccgctgccgccttacatcaaagaaaaacttgaagatccggaaatgtatcaaaccgtttattccaaagagctaggatcagcagcagcgccaactgccggattgcattggacgaaagagttattgcaaaaggtgcaggataagggcgttaagctggtttatctgacgctgcatgtcggtcttggaacatttcggccggtggtagaagaaaatattgaagcgcataagatgcacagcgagttttatcgtctgacaccggaagcagctgcaactttgaatgaggtacgcgataacggtgggcgcatcattgctactggaacaacctcaattcgaacccttgaggcgattggcactaaatttgatggtgctatcaaggcggattccggttggacagatattttcattaagcctgggtatcagtggaaagtcgtggatgcctttatcaccaactttcatttgccaaagtcaaccttggtgatgctggtggctgcgttcacaggccgggatacgatcttgaacgcctacaaacacgccattgaagaaaagtaccgattctttagctttggcgacgcgatgttcatttattgatgatcgatcatgtgacccgctactgtctgcgggtagtttacgccattgatcgtctctgaaggtatataaaaaccggtttgcgcgtttgcaaaccggtttttataacggacgggatcacatcaacacataccaacagacatgtctcgatttttcttttaacgcatcgctgcgtggaacaacgtattcatagacgatcacaatggccaggtcaaaacccgggaagtgcgaaaactacggtaacggtgatcccgtccttacctttattttaacaggaaaaaccagtagaaaaaaggataaagctcggtgatcgtggggcagtgctttataagaaagttggttatcatttgctggacaggtttcatttgtgaacaggcctgcagcttttgagcgagtcacttacttttaaatcacaagtaactctgttaaactggcataacgagaaaatggataagcggtgctgcgagggcattgctgtgaataaggagtctgtatggaaccagcagttaaatatcgtctcattcatcaagataagcatagtggtgcccggttaggtgaattgatcacaccgcatggaacttttccaacgccgatgtttatgccggtgggaacccaagccagcgtcaaaacaatggcgccagaggaattggacacaatgggagcaacggttattttagccaacacctatcatttgtggttgcgtcccggtccggatttaattgaagaagccggtggattgcaccgtttcatgaattggcacaagggaattttgacggactcaggcggttttcaggtcttttcgctggcagatacccggcatattacggaagacggggtcaccttcaagaatcatctgaatggcgcgaaaatgttcctatcaccagaaaaggcgattgcgatcgaaaacgcgttagggccggatattatgatgagtttggatgagtgtccgccgttttttgaaagttatgaatatgtcaaaaaaagtgttgcgcgtaccagtcgctgggctgagcgggggttaaaagcgcataaaaatccggattggcaagcgctgtttggtattgttcaaggagccggcttcaaagatcttcgtgaacaaagtgccaaagacttggtaagtatggattttccgggatattcaatcggcggcttgtcagtcggtgagtccaaagatgaaatgaaccatgttttggacttcaccacacctttgctgccagaggataaaccgcggtatttaatgggtgttggttcggctgatgccttgattgatggggcattgcgcgggattgatatgtttgattgcgtcttgccaacccgaatcgcacgaaatgggacgtgtatgaccagtcgcgggcgtcttgtcatcaagaatgccaagtatgcccacgactttggcccgcttgatcctaattgtgattgctatgcttgccgcaattacagtcgcgcctacattcgccacttgatccatgttggcgaagcattcggtattcggctaacaacctaccacaatctttatttccttttacacctcatgcagcaagtacgtgaagccattgccaacgatgatctgcttgccttccgcgaagatttttttgaagcttatggttataacaaggaaaaggcgaagaatttctagattgtttggagcatggtccgaaattctgttacactgttgaatgacaaactaaaaaaacaagaggtgcctaaattgggaaatggtaatgtttcaatgatcgttctgctggtgatctttgtagcgttcatgtactttggcatgattcgcccacaaaaaaagcagcaacaaaagcgtcaggaaatgctaagtcagttaaaaaaaggtgatccgatcgttacaattggcggcctgcatggtgtgatcgattcaattgatcagcaagcagggaccgttgtgattgactcagacggtatttatctgacattcaatttaaatgcggttcgcggcgttgcttcacgtccggcaaccccaaccccggctccagcagcaaaagccgaagccaccaacacagatgaacagcgtgtggctaaggaagcttctgatactgcggccaagtccgatgatcaaccggctgctgctgacagcgatgccaaagcagacgatgacaagcaggcttaaggttaaagattaatgatgttaacagagagaccggttcttgaccggtctttttttacggccataagttcaaaaagatacaaagtgaaaaacgttggattcccctgacaaatcagctttaacagtgaacaagcgaaattttcgtgaaaaagttcactaaaattgtttacaaaatcacaaggacaaggtatgatgttcttgtgaaatggttaacaaaaattctgcgaaatgcttggaggtaagctcatgcttaagaatactgcgaaggctgctactgaagttgatgtgaaaggcatgattgatgaactggttgccaatgcgcactcggctttgaagatcatgaagacttttgatcaagaaaaaattgatcatattgttcatcgtatggcaattgccgggttggatcatcatatggaattagcgaaactcgctgttgacgaaaccggccgtggtgtttgggaagataaagccattaaaaatatgtttgccactgaagaaatctggcattcgattaagaacaacaagaccgttggcgttatcaatgaagataaacaacgcggcttggtatccatcgccgaaccaatcggggttattgccggggtaacgccggtgaccaacccgacatcaaccacgatctttaaatccgaaatttccatcaagacccgtaatccgattatctttgctttccatccgggtgcacaaaagtcttcagcgcgtgcgttggaggtcattcgggaggaagctgaaaaggccggattgccaaaaggggccttgcagtatattccggttccaagcatggaagcaactaagacactgatggatcatcccggcattgccacgatcttggcaaccggtggccctggcatggttaagtcagcttattcatccggcaaaccggccttgggtgttggcgcagggaatgcaccggcatacatcgaagcaagtgccaatattaagcaggctgttaatgatttggtcttgtccaagagttttgataacggtatgatttgtgcttccgaacaaggggccatcgttgattccagcatttacgatgccgtgaagaaagaatttgaagcccaaggtgcctattttgtcaaacctaaggacatgaagaagttcgagagcacggttattaaccttgagaagcaaagtgtcaatcctcgaattgttggccaaagtcctaagcaaattgctgaatgggcagggattcaaattcctgatgacacgaccatcctgattgccgaattaaaagacgttggcaagaaatatccgctttctcgggaaaaactgagcccggttttggcgatggttaaagccgatggtcatgaagatgccttcaagaaatgtgaaaccatgttggatatcggcggcttgggacacaccgcggtgattcacacagctgacgacgaattggcattgaaatttgctgataccatgcaggcttgccgtatcctgatcaatacaccttcttctgttggcggtatcggggatctctacaacgaaatgattcctagtttgacgctgggctgcggctcctatggcggcaactcgatttcgcacaatgtggggacggttgacttgttgaatatcaagaccatggcaaaacggcgcaacaacatgcaatggatgaaattgccgccaaagatttatttcgaaaaaaactcggttcgctatctggaacacatggaaggcatcaagcgcgccttcatcgttgctgatcgttcaatggaaaagctgggtttcgtcaagatcattgaagacgttttggctcggcgggagaatccggtacaggttcagacgttcgtggatgttgaacctgatccatcaaccgatacggtcttcaagggaaccgacatcatgcggtcgtttggtccggataccgtgatcgcgattggcggtggttctgtaatggatgcagccaagggtatgtgcttgttcaacgatgctggcgatgcggacttcttcggtgccaagcagaaattcctggatattcggaaacggacctacactttcccgaagctgaataagaccaaactggtttgcattccgacgacttccgggaccggttctgaagtgacaccatttgcggttatcactgattccaaagcagggatcaaatatccgttagctgattatgctttgacgccagatattgcgattgtggatagtcagtttattgaatcagtaccgccagtagttgtggctgattccgggatcgatgttttgtgccatgcaaccgaaagctatgtatcaaccatggcaacccactatacgaaggggctgagccttgaagcaatcaagctagtgtttgaaaacctcgaaaagagttatcatggcgacattgcggctaagtcaaagatgcatgatgcttctaccattgcagggatggcgtttgccaatgccttactggggattaaccacagtattgcccataaattaggtcaggcgttccacttaccacatggacgctgcatcgccatcactatgccacacgttatccggttcaatgctagtcaaccaaagaaacgtgcaatctgggccaagtacagttacttccgtgctaacgaagactatgcagaaattgcccgctatcttgggctgccaggaaagaccaccgatgaattagtagaaagctatgttcaagccttcattaaattggcacatagcgtcgggatcaagttaagcctgaaggatcagggggttcagaaagcggatctggacaagcaagttgatcgccttgctgaacttgcttatgaagataactgcacggttaccaacccgcaggaaccattgatcagcgatttgaagcacattattctcgatgaatatgaaggaacagattcaacattctaagtacgcacatgctaatcatttcacgatgatcggcaattgttcatcagataaaccgtttgcgtcggtcgtcattaaacacgtcaagaaattgacgtgtttttttgtgcaagtcatggcataatgtagtacagtgactgcaaattaaaagtaaggatgtaaaatgacaccgaataaagaggattatcttaagttgatttttgagatcggcggcgataccgaactggtctctaataagcaaattgttgcggggatgcatgtctctgctgcctcggtcagtgagatgatcaataaactgggcgaagagaagctagtagcacacacgccttatcaaggcatccagttgacatcggctgggcgaaaaaaggcggctatcttagtgcgcaatcatcgtctctgggaagtctttttagttaagtgcttgaagtatcctgccgacgcagttcatcaggaagctgagaaattggaacacgccttgacgccagaaatggcaaaacgtttggcggccatgttaggcaatcctcaatattgccctcatggcggtgtgatccctgatgctgacggccactatattcagcagagtcgcgtcactttgggagcgatggaagtcggccaaaagggtcatattgaacggttgatcgatgaggtttcattgattgattacactgtcaaacttgatttgcgccttgatgacgtctttacggtaaccgccaaaacgttggatgcagttgtcatcaaactagatcgaactggaaaagaattggcagtcgatgctgatcgcgctgctcacatatttgttgaattgtaatcaagacttgggaaagcagggtcatatacatgccagaagaatcgcgcgctgtgatcattattttcggtgggtcaggagatttagcttcacgaaagctttatcctgcattgttcaatctttatcgccgcggagtgcttgctgaacactttgcagttatcggaactgcccgccgaccatggagcgacgaacattatcacgaagtcgtagcaaatgctgttgcaggtgcacatgcggatgctaaacaggtgcacgcctttgcccagcactttttctatcaaagtcatgatgtaaccgatgcagatcattacatcaccttgaaaaatcttgcggcaaagctggatgatcagtttgcagtcggcggtaatcgcgtcttttatatggctatggcaccggacttttttgaaaccattgccagtcatcttaagtcagaacatctgttgacggatgccggattcaatcgtttgattattgaaaaaccgtttggacatgattatgctagcgccaaagcattgaacgattcgctgaccgcgacgtttgatgatgatcagatttttcgaattgaccattatcttggcaaggaaatgatccagaacctactggcgttccggtttgataatgccatttttgagggtgtctggaacaaagactttattgacaacattcagatcacgttatctgaagctgtcggagtagaggaacgtgccggctattatgaaaaggcgggtgcgttgcgcgacatggttcaaaatcacgtgatgcaagtattgtcttacttgactatgcccaagcctaagtcgtttacggcaaccgatattttaacggaaaaagataaggtgtttgctgcgttaaggccttatgatctggcagcagcaaaggctaactttgtgcaggcacaatatgtggcggcgcaaatagatggcaaaacggttcctggttatcgccaagaggaaggggtcgcaccggattcgcaaacgccaacttttgtcgcaggcaagattttgttggatatgccacaatggcaaggcgtaccgatttatattcgaaccggcaagcgactgacccgtaaatcgactcaaatcacgttaacgttcaaaccggtgaccgcgccgttatttagtcaagcagaagcaagccgcccggatagcctgacgatttacattgaaccgagcgaaggctattccctgcagcttaacggtaaagcattgggaacgggttttgacgttgagccggatgagttgcgctatcgccacgacccgacagcggctgcagcagctccggaggcctatgaacgtttaatcagcaatgtgctggaaggcgatcagacaaacttcacgcattggtctgaattatccgcttcatggcgatttattgatgccattcaggcggcatggtcccaggaaacaacaatgccaacttatccagcggcaacaatgggaccaaaggcggcatttgacttacttgaacgcgatggccgcgaatggttctggcaaccacggcgcgtccagctagctgattgatgatgatactgaacaaagggacggagaccaataaaaggtcaaagcctcttttttttaagtgagcgcgagccggcgcgtttagaagtcggagtgtaagcggccttaagcgtgatggccgggctttggccattgcgcttaaggtccttacacgcagacttctgcgccggggagcgcgttatggagcagaaaagccagcgcggttagaagtcggagtgtaagcggccttaagcgtgatggccggtctttggccattgcgcttaaggtccttacacgcagacttctgcgctggggagcgcgttatggagcagaaaagccagcgcggttagaagtcggagtgtaagtggccttaagcgtgatggccgatctttggccattgcgaccgaggtccttacactccggctcctgcgctgggggagcgcgttatggagcggaaaagccgacttctgcgcaggaaagcgtgttatgaagcgcaagtccgacttcaagatttgttgaaacgtgtcaaggttccggggaggtgagcaaacacatggcgttattcgaattacccttacaaaacgatacgtcacgtaaaattattcatctagacatggatgcgttctacgcttcgattgaaatgcgggataatccgcgactacgccataaagcattggtgattgctcgtgatccgcggacaaccggaggcaaaggagtggtcaccaccgcaaattatgttgccagacgttacggcgtccactccgccatgccagccaatgaggcgctacagttggtgccacgtaaggaactcgtttttaaaactccggactttcccaagtacaaagcggtgtcggcacagattcatactttatttcatcaggtgaccgatttaatcgagccggttgcgtttgatgaagcttatcttgatgtttcagctaaccatgcttttcccagtacgattgcgctcgcattgtggctacaggatcagattaaacaagccacccagctaacgagttcaattggcatttcatataataaatttattgctaaacaggcgtctgattataataagccggtggggcggaccctagtgttacccgagcaggcattgctgtttttggatcgtttgcctatcaagcagtttcgaggtgtcggcaagaagacactaccaaaactgactgatcttggcgtcacaaacggcaaaacgttacgggcattgtcgcaggatcagttattaactatgtttggaaaaatggggtttattttatatcaacatgcgcgtggtgttgataatcgaccagttgccgtgcataccgctaaatcgattggtaaggaacgaacatatggcacgccattaacggatgccacggcagttgagacccaattgcggaagctggcggcgatggtggtaactgctttgaatcagaagggaatgcatggcaaaacggtggtattgaaagtcagagacgttgactttgtgacccagacgaaacgattgactcaggaccattattttgagggtgaacaagccatttatacggctgcgtggcaactttggcaggaagttaaactgaccaagctagccattcgacttttagggattacggtcaccggacttgaccctaagcagtatgaaaatattgatttgccgttgtagagagggatgtgctgtctaaaaatggttcctaagcgtattagcttagttagagttatgtgtatggcaaacaaagaggcatcagtttagacgattccagcagcagtgcgataggtcaccttgttcgaatattaggatagaaagcaagagctggcggagcggtggcgggctcagtggtgcccaccactctagctacgcggtcgccagcctgccaccgcggagccagctcggagtaacggaaatcacttaattagagtagaaccgagaaaaagttgacacttacgccggttcacgctctgttgaaacgcgttcgccagcccagaaacctgcacataaggaccttggtcgcaatggccaaagagcggccatcacgcccaaggccgcttatgctccggtttctaaccgggctggctcacgctctgctgaaacgcgttcaccggcgcaggagtcggagtgtaaggacctcgaacgcaatggccaaagcccggccatcacgcccgaggccgcttacactccgactcctaagcgcgccggttcacgctctgtattagtacactctcaccctatggtatactaacgatagattgcaatgaggtgatggtatggcgacaaagcatgagcagattttggattatattgcaaatttggcggttggtaagaaaatatcggtgcgttcgattgccaagcatttgaaggtgagcgaaggtactgcttatcgtgcgattaaggaagcggaaaatactggttttgtttcgacaattgcacgggttggtaccattcgaattgagcaaaaaccgttaaatccaattgaatccgtgacgtttaaaaccttggttgatttgattgacgctaaagttttaggcgggcaggctggtatggacaaaaaactcgataagtttgtgatcggggccatgacaccggctgctatgcgtccatacattacgcgtaattcgttattaattgttggtaaccgtgaagacgctcagcgattagcacttgaagacggagcagcggttctgattaccgggggctttgaaacaagttccgcgattattgcgcttgctgatgatcagcaattaccggttttacagacggcttatgatacatttacagttgcaaccatgattaaccgcgcgttgtctgatcaggcgattaagcaagacatcttaaccgttgccgctatttatacgcccctttcacaaatcgaaacgattggcgtggaggcaaccgttggcgattacctggcaatgacagatccccattatccgctcccggttgtgacgcgaaacggacgcttggtcggcttaatgcgtccggcactggcagctggcaagaaaccgactgtgccaatcgaacggctaatgcaaaaagatccgcaaactgtcaaaccatatttaagcgtgacgactgtcggccacacgatgcaggataatggcatgaacgcaatgccggttgtcgatgacagttggaatcttttaggtatcgtcacgcgcaatgctgtcttttccagcttaaccgggattgcccatagccgtgaactgaccaatacgattgctgaccaggtgagtgcacagttaacggctattaccccgcaaaagccatatggtggtgggtttgagctcaaaacagtgccggcgatgaccaatacgctggggacgatgagttttggcgtccttgctgaagccattaatagttgcacgactcgctacttgcacgataccgggcgccggaatgttttggttgagggcgttaacctgaccacttttcgaccggttcagttggagagtattgtgactgttttattgcgggtgcttgagctaacgagacacgatgcgactttggacgtggacgttctcagtgatggcgttcaggttgccaaggcagttgtgacttgtcagctattagaaaggaattgatcaaaaatgatccagaccgatattattaacgctattaaagccaataatccaattattattcatcgccacatcaatcctgatcctgatgcgctagggtcacaggtggggctggcagaaaccattcgtgccagttttccggataaacaggtttatcaagtcggcagcgatactggcaatttaagttggttggctgaagagcaaacaattaaagatgatgtttatcaaaatgcgttggtgattgtcaccgacactgctgatacgccgcgcatttcggacagtcggtttaatcaaggcaaaatgctcattaaaatcgaccatcaccccaacgatgatgcttacggcgatctcgtctgggtcgacaatcaggcgagttcagcttctgaattgatttatgatctcattgctgccagtgacggagttttaacgttgtccgacaaagcagcgcggttgctttatgccggaattgttggcgataccggcagatttttattcaacaataccaccccgcatacactgcaggttgctgctgaactgatcaaaaaagacttcgatccgactgccattaacaatcggatgaataccgtgacgctggggcaggcgcgtttgcagggctatgttattgatcatttgaaaatcagtccggctggtgcggctagcgtgacggtaccgcgcacggcaattaatgacctgcatttagctgatgatcaggtaagcgcggttgtcggcactcctgggcggttagacacggtggttgcatgggccgagttcattgaacaggcagaaggcggttatcgggttcacttacggtctaagggtccgattattaacggcctagctaaggaacataacggtggcggccatccactggcaagcggagccaaggcggccaattttgacgaaatcattcaaatcgaaacgcaacttgatcaattagttagagacttttcaacaacaagaaagtaggcattatggacaatcaattcaaacaataccaactcaagccttttgtgattgccggccttgacgccatggggattacccagccgacgccgattcaaaaaaaggtgatccctgcgttgctgcgtggcgagaacctggtaggtcaaagccagactggtagcggtaaaacccatgcttttttggtcccattgcttagcctggtagatccaaatgaagacgcgacccaagttgtgattacggcgccatcgcgggaacttgccaatcagatttatgcagttgcccaacaattgacgcaaaccgaaccagcaatccggattagccgtttggtgggcgggatggataagcaaaagcagattgataagctgcaggcgcatcaaccgcacgttgcaattggcacacctggccgaattttggatatgatcaagcgctatgatcttgtgccagcatcggttcgtcattttgtcgtggatgaagcggatatgactttagacatgggctttttggaaaccgttgacgccattgcttcaagttttcccgaacatttgcagatggccgttttttccgcgacgattccgcaaaagctcgaaccgtttttgcgcaaatacatggatcatccgaccgtgattgaactcaagccacaatcggttattgccgataccgttgagaatattttaatcgcagcaaaggggcgcgacaaaaacgagctgatttatcagttagtgacgatgggccatccgtttttggtgttgatttttgctaatacgaaaaccagtgtggatgccattcatgattatttgaaacatcagggactcaaggttgccaagattcatggcggggttcagcctcgggaacggcggcgaattatgaaggaagtcgctgaccttaagtatcagtatgtagttgccactgatttggctgcgcgaggaatcgatatcaagggggtatcgatggtgattaatgccgagattccgcgcgatcaggagttcttcattcaccgggtcgggcgtactggccgcaatggtttgccagggacagcgattacgttatatgagccgggccaggaagatcagattgctgaattggaacatatgggcatcaaatttaagcctaagaccattcaaaaaggtgaactggttgacacgtacgatcgtaatcgccgggttcagcgcaagcctaagcaagaggacacgagccttgccattcgcggcttggtgaaaaaagcgaaacaaaagcatatgccaaactatcgtaagaagatccggacagcagtgttattggaacgcaagcgcaatgccaaagttgcgcggcgtcaagccttgctagccgagaaacgcaagcaccgtaaacgagggtgagaacatggccgtaaacgagttgacgttaccgacatggaatagcttggatgaaaaaagacaacgatttattttccaacagttgacccgctactttttgagtccgttactgacagttgatgagattcgaccggtgactgctactttttatgggcagacgttgcatacttttgaagccatgatcggcggcgaatgggtgcggttgattccggggatggcccaagttaccctaggttttcatgcgcagcagcaagaacaactggcttcttacatgcagcagagcggtttgactgtaacggacttaacgcaggctttgtcgccgcaacgggaagtcgctatgccgcctatgctggttgcgactaaagctacgccggcaaatgaggagatcttagggcggattagcctgacgactcgtattttcaagggtaatcacatgcgctatgctgcgattcgcgcgcaggtgttgcgcttgttggatcggcaaggcagccttgatccttttgcccaaagcggttgggcggcgagcttgaccagtggcaacattaaattacgacttgccagcgctcatcattatcaagtgagcatcgtcaagtcctggcaaaaagcggatttgatcaagtcgctgagtttttttggctttcgattgccgactcaggatcagtatgaatatttacaaagcggcggccggcaaagtctgtttgcgtttggcaataccttgccgccgcagttaccgcgttatttgccgaatccatttggtttgacgattccggttgaacgtgcgggtagtgaactgattgcggaagatattcaaaaaagcacagtgttacccgcacagccgtcagcaaaagcagcgttggcattgtcgccgttttatcaggcagaaggtgccgatgacctgaccgttgccagttatcggcgggttgcgacagttacggttaattaagaaggtagacatctggtgtcttgaaacatgacgaatagccggttgttttttcaataacgagttgacctggtttttcagaaaagctataattgggactcgttaggatatgtgtcgacccctgagtgagacagaaacagccacatacgttgagagcggctgcaccaggctaagatatgctccctaatatcaggtgaacgaatattaatgaagtggtaatgactcgcatcattgcaaccaaggtggtaccgcgtgcaagcgcccttggcagcaatggtgctttttatgttgataagggtgtgcggttcacgttaacgcgtttgttggcgcagggatctgcgtataaggaccttggtcgcaatggccaagagcgggccatcacgcctaaggccgcttacactccggtttctaagcggccctgttcacgctcactttccataacgcgctccccggcgcagaagtctgcgtgtaaggacctcgaacgcgatggccaagcccaggccatcccgcccgaggccgcttacactccgacttctaaccgcgccggctcgcgctcacgttaacgcgctccccagcgcagggatctgcgtataaggaccttggtcgcaatggccaaagcccggccatcacgcccaaggccacttacactccgatccctacccgcgctggctcgcgctcactttcttttaggaggatatgtcatgaaaaaaatgtcaagcggcgagattcgccaaatgtttttggattttttcaagagtaaaggtcatgcagttgaacctagtgcttcgttgattccggttgatgatcccactttgttgtggattaactcaggcgttgcaactttaaagaagtattttgacgggtcggttattccagacaacccgcgtattaccaatgctcaaaagtcgattcggaccaatgatattgaacttgtcgggaagacagcgcgccatctgacattttttgaaatgctgggcaatttctcggttggcgattatttcaaaaaagaagtcattccgtgggcgtgggagttattgacgagccctaagtggtttgattttgatcctaagcgtttgtatgtcacggtttatcctaaagacaagggcaccaaggaactttggcgcaaagtcggggttgcagatgatcatattgttgaggctgaggataacttctgggatatcggcgaaggtccatctggtccggattccgaaatcttttatgatcgtggccagtcctttaacaatgtggctgaggatgatccggaaaactatcctggtggcgagaattcacgttatgttgaaatctggaacatcgtcttttccgagcttaaccatttgccggatggccggtttgttgagcagccgcataagaacattgatactggcatggggcttgaacgcttagtcgcggttattcaaggcacgccaactatttttgaaactgatttattcatgccgattatcaaggcaaccgaaaagatgagtgcaggcaagcgttacggggccagtgcgcaagatgatgtgtcctttaagattattgccgatcatgcgcggacggtaacctttgcgattggtgacggtgcactgccaagcaatgaaggccgcggctatgttttacggcggttgattcggcgggcggttttaaacggtaagaagctcggtatcaatcatgactttttgtatcaactcgtgccggttgtcggcgagatcatgaagagctattatccacagattctggccaaccagccatttattcaaaaagtcattgaatccgaagaagcccgcttccggcaaacgcttgacgctggggttaatctgttgaatcaaattgttgctgaactgaagcaaaacggaaaaaaagaaatttccggtgcggatgcatttaaattgtttgatacgtatggcttcccggttgaaatgacgaatgaatatgctgaagatgaaggcttgaaagtcgatatggccggcttcaaaaagaacatggcggcacagcgcgatcgggctcgcaaagcacggggtgatcggcagtcaatgggcagtcaagataccgttttgatggacattaccacgccaagcaagttcaccgggtggaccgagttggatcataaacatgccacgttacaggcgattgttgtggatgatcagcttcaggatgaagtcagcaccgggcaagcccaactgatttttgacgaaacgcctttttatgccgaaatgggcggtcaggttgctgatcacggggttattaaagctcaggatggcaccgtattggccgaagtgacggatgtccagcatgcacccaatggccaaaatctgcataccgttaccgttaaaggcaaactgacaaagggccaaccatattggctcagcgttgatcgtttgcggcgtaagaaagtttcacttaaccatacggccactcatttgctggatcaggcgttgcgggatgttttaggcgagcatacccatcaagccggttcgttagtcgagcctgattatttacggtttgatttcactaatttcggtcaggtaacgccaaaacaactgcgcgaagttgaaacgattgttaatcagaagatctgggatgctttgccgattacgtggaaagagatgccgattgccgaagccaagaagcttggtgcgattgcgatgtttggggataaatacggtgatgtcgtgcgaattgtttccatcggcgattacaataaggaatttgacggcggtacccacccaaccaataccaatgcgctaggtctgttcaagatcaccagcgaatccggtattggcgcaggggttcgccgggttgaagcagtcacgtccaaggaagcttatgaatacctgacccaacagcaggactggcttaaggaaacggctgatcatttgaaaatagatcaagtgaagaatgtgccaagcaaggtcactcaactccaagctgatctgaaaaccgaacaaaaaacggtggcaggattgcaagctaagttggcagcccaagcagcagccggcatttttgaccacgctgaaacagtaggcggatttaaactgattgacaagcaggttcaggtagccggaatgaatgaattacgacaacttgccgatgagtggaaaacaaagcaggcttcggacatattagtgttaggtaccgaagcaaatggcaaggcaaacttgttagtagcggctaatgccaatgccaatcaagccggtttgaaagcaggcgacctgatcaaggccattgcgccaaaagtaggcggcggtggcggtggtcgtccggatatggcccaagcaggcggtaagaagccagctggcattccggcagcactggcagaagccaaaaacgtgatcggccagcatgcataagcattgaatgcagtttttcttaaatcaaacaatggacatcaggagttaggatggcgttttgctgactgacttctggtgtttttgtttttgctgccatgaatacgggaagtcatggtagaattaagaaaacgatttcagcgaggtgagggagatgaaagcgttgcggttgggaatgacggattttttggggtcgcgtgaactgtatcgcgttgtccgtcaagccgatagcgttaaactgacatatacggttgatccatcaagtaccgaggggacaatcgaaaatgaattgactggcacagatgcggaggcgtttttcaaccggttagcaacgtttgactttgcgtcttggcgagtacttggtgaaccgcagccgccactgcttgctgatacacggtggaaccttgcgataacggaagatgatgaacgggttttgcgatatgaaggcgggcagccatttccggataggtttaacgagctactgagtttattaaaatataccgtgacggttccaggcggccattttttaccgccgatcgcatggcaactggattatgtgcgatttggtacgttacagttaccaaagtttgaaggcccaagacgattcttaagccggcagttacgctatcggcggacgtatttgattgaagccaacgagaatcgggttgtgttgcgcacccagtatgctgaaccgcttagtgatcatgatgtggtctatcatgatcccaaattagtcgcggcactcgcttcaaaagtggcagctgcagttgctgaattgggcgaagtcgctgacctgtcaattgattcaacgtggcaaccacggtctgtactggctttgacgattcaatatccccacggtgagccaacgcgtattcaggtggatgccgagttgaatcggaccatgaaaatgctatggcagaccgtcacagaagcaattcaggcatttcagcgcagcagtgaacaccgagatcagcaagatgccattcagcttgggccgcaattgatgcactatatcaaggtgaatttccgccacggggtcaaagactatctgtacaaaacggatatccccagtttgcaggaaggcgatctagttgttgttccagtgggcaatgaaggccgcacgttacatgctgaagttacgaatccgcatgtgataccgccaattcactttccggtaccacctgataaaatcaagcaggtgatcggattggctgacttggatgatgatgaagacgaggacgaggacgattggtgttaaagcgcatcgtccaaaaatatcacttacttttgctcaggaattgtacatttgcattgatttcaagtaaaatggtctgtgaagcggatagaatagaggtgtaagaatgagcacattagatcaaaccgttcactttgattttcgcgataacaatcctaaaaatgttcacgagacgttggaaactgtttataaagcactagaggaaaaaggatataatccgattaatcagatcgtggggtatctgatttccggggatccagcgtatattccgcgttataacgacgcgcgtaacttgatccggaaacatgagcgagacgagatcattgaagagcttgttcgaaactatcttggcaaggagcaagcttaatgcgcttgatggggttggacgtcggttcccgaactgtgggggttgcggtcagtgatcctttggggtggactgctcaaggattagagatcatccgaatcaatgaggataagcagcagtttggactcacacggctcaaagaattggtgacccaatatgaggtgacagcatttgtcttgggattacccaagaatatgaacaattcaattggaccgcgcgcagagaaatcacaagcatatggtgatttacttaaagagacgtttgggctgccagttgatttcatcgatgagcgattgacaacggttgaagcttcgcgaatgttaattgaagaagcagatgccagccgtaagcggcagaaacaagtgatcgacaaactggcagcgcaaatgattttgcagaattatctggatgcaaaaggtcccttgaccaagcaataactctggctgcggcgatgcgtccctgccagaattgaaggagaacaagatggcaaataatgaacatgtcaaacccggtgacgacaatcagcagattaccctgattgacgaaaagggtaatgaagagctatatcaggttttgtttacatttgattccgaagattatggtaagagctacgtactgttgtatcctgccagtgaagatgatgatcaggaagtcgaaattcaggctttctcgttcacacctgatgcaaacggtgatgccagttcgggagatcttttcccaatcgaagatgataaggaatgggacatggtcgaagaagtgttgaatacttttttggctgatgacgattcgaatctacaagattaatgacgtcatgaacccatcaggccaccagtattttggtggcctttttgtggcaatgccaaaatgccccagtatgggtggtcccaagaaggaacgaatagagtagaaacgaaggaaagttggcgcataccgaagcacttctgctcgcactttaccagttatggtagaatacactttgaaagagtggaggcattcacgccatgagtgaagagaagcgtcgttttaaggccgttatcggtgataaagcgtatacgattatcggtcccggatccgaacagcactttttgacggtcacgaagctgttgaatgaacggcttgatcaagtcaaaaaacttgcgccggatctgactgccgaggaacaggcgattttagttgccttcaatgctgtttctgatcaagttaaattgctggcagcccagcaggatcattccgatcagaaagcataatgggggaacgttttgatttcaattacgattattttagttttggcctatttctattatagcggggcccgccgcggtgcagccttacagtggttgcatgtaggtggttatgccttgagttttttagctgcaacggcactagcccgacctttgggagaacactttacgttgttgatcccttatccctctgcgacgaatgcaggccagtttgccttttattccgataaaatcggcttgacgttggatgatgcattttatcgcggatttgcttttttagtggtgctgacgatcggctggttattgacgcggattgcggctttgtggttccacgacttgacgtataaagcaatggcgcacaaaaagagtgcattaataggcggctgggccaatttagcgatagggtatatttttttatttctcattttgtcattattggcattgattcccatcaccggtattcaacatgggcttgatcactcgcttgttgccaaaatgatgattaaatactcacctgggctgacacagtttgtgaatgccctttggttatgaacatgatgacgctcaaggacggataactgacgtctttgggcgcttcttgattatgggagcaatttaaatgaacacgaagattttaagaacacttgagtacgacaaaattcaacaggccatactgcgccaagtggtaacggcaaatggacagaaaatggtccaaaacatgaccccgcaaacagatcccgaaaaggttcagcgagcattagacgaaaccgcagatggagcttcggcattgcgacttaagggcggcattccggttccacagttggaaaatattgacccagcgctaaaacgggttgatattggcgccgtgctaaatggtcaggagttggccagcatcagtcgggtcctgcaaacagtcagtgcaattgataaattcttaacggatttgcaagaccagattgactttcgccagttgtattcactgcaggccgagctgaccgtgctgccacaattatctcggcggttaaagacggctgtggatccagaaggaacgctaacggatgaagctagtccggagctgcatggtattcgcgaacagattaagcgaatcgaaggcgatattcgcggcaaaatgtccgaatatactcgcggggcgcagtccaaatatttaagcgatccgattgtgaccattcgtgacgatcgctacgttattcccgtaaaagcagcttatcgtgtcaagtttggcggggtcgttcacgatcagagtgccaccggacagacgctttttgttgagcctcaggcaatcgttgcgctgaataatcgcttacgtgaggcacaaatggctgaaacagccgaaattaatcgcgttttggctgaactgtcgaatgaattggcgccgtataccggccaaattaaggctaatgcggcagttttgggacattttgattttattaatgccaaagccaagctggcaaaagctcaaaaggcaaccgagccactcgtatcagcagaaaatgatgtcctgctgcgccatgcccgtcatccgctcatcgatccccatcaggtggttggcaatgacattccgcttggcgccgattatcaagctatggtgattaccggccccaacaccggcgggaaaacgatcacgttaaaaacgctgggattgctgcagttaatggggcaatccggcctattcatcccggctgacgatgagagtcggatcgggatctttgatgaagtttttgctgatattggtgatgagcagtcgattgagcagaacttatcgacgttttctgcccacatggataacattgtccatattcttaagcagctttcgcaaaacagtctcgtcttgtttgatgaactaggcgccggcacggatccgcaagaaggggcagcgttggcgattgcgattttggacgcggtgggtgaagtcggcgcgtatgtggtggcaacgactcattacccggaattaaagctctatggctacaacactccgaagaccatcaatgcctcaatggagtttgatagtcaaacccttcaaccgacttatcgcctgttggtaggcgttccgggtcgctcgaacgcctttgacatttcgttacggttggggttgccccacacaattgttgaccgtgccaagtcgatgatcggatccgatagtcatgaacttaacgacatgattagcgatttggaaaaacagcgtaaggcggccgaaactgctcgcgcttctgcacagcggcaattagcagcagctcaggcacttcatgatgaattggcgagcgcatatcacacgtttaccaccgagcgcgatgctcagctacaccaggccaaggaaaaggcgaatgcgctagttgacaaagcacagaaaaaagcggataaaattattaagcagctgcggcaaatgcaattgaccaatccgggtaccgtcaaagaaaatcagttaatcgcagccaaaaccgatctaaaacggttgcatcaagatgaaccgcttcagaagaaccgcgtgttgcggcgagaacgcgaaaagcaggcgttgcatgttggtgatgaggttaaggttgccagttatgatcaaaccgggaccttgttacaacaattcgatgagcatcattggcaggtacagttgggaattttgaaaatgaaagtcccgacaaccgagcttgaaaagatcaaaccatctaagcaggtagccaagcagcggccggtcgtcaaagtcagtggcggtggcatgagcggcccttcaacaaccttggatctacgcggcgaacgctacgatcaggccatggctgacttagaccagtatattgacgcagcactgttagccgggtacccatccgtcacaattattcacggtttaggcaccggtgcgatccgcaatggggttacccaatatctgaaacgtcatcgccaagtcaaaagctttggatttgccccgcaaaatgctggcggctccggcgcgacgattgttaatttcaagtagttggctagttttttgccggcagatgtgctatgatttagttacaaaaagtaagaggaggaatccgttcatggttcaagcagttacagattcaaactacaagacggagaccgacactggcgtcaccctcactgatttttgggcgacttggtgcggcccttgtcggatgcagagtccagtgatcgacaaattagccgaaagtcgcgatgacgtcaagtttgttaagatggatgtcgatgctaatccggagacacctaaatcattcgggattatggcgatcccaacgctggtcatcaaaaaagatggcaaggtcgttgaaaagctggtcggttatcaaaccaaggatcaattagaagcaaccttaaacaagtacaccgcttaattgaatttgcgattcagacacactgattgaatggtcagtgtgtttttttgaccattttttcggggacgccagaatcaagaaagcaaaaaaatatcccaaaattctgatttcatctaaaacgagggaaaacaatatcttttttagctttaagcggatatatttaagctatttcgatggtccgtcaccgaatttttcaggcaaaaagtaccggctgaatttgcgctgattcgagtttgaaaaaatgccggcgatgcctagtgtttcgggacttcggacggttatctaactggcctgtttgattcacattacgaaactgttaggtgattgttacgcttttcgttggcgaggctttttctgtaaaactataatggatgtgtcaataagaacgtggggtgacaagatgttcgcaaaattaaaagcggtgtgggaaaatcccacatttcggttcatcttttggaccgtcacgtatttcgtgatactgctggtcttggtttatctatacggttacagcggtattaacaacagtaaattcatttataacgagttttaaagggggaaaccgcgatgatcgataatgttattacagcgattgatcgggtcgccgcagagcatccaacgcgcgtggcttatgattatgaaggaacccaatatacctacgcccagttgaaagaaggcagtgaccgccttgctggattctttgcggaatcattgccggctggtgaacccatcattgtctatggtggtcaaacctttgacatggttgaggttttccttggactttctaaatcagggcatgcctacattccgatcgacacgcatagtccaaatgaacggattacccaggtgcaagatgttgcccatgcgcctgctgtgattgaagtggcaccgcttccgattacggtcccagatgtcaagattattcgggcaccggcgttacatcaagctgagcagtcacacgcgccaattcattcactgcagcatgcggttgctggcgatgataattactacatcatctttacaagcggcacaacggggaaaccaaaaggcgttcagattagtcacgataaccttttgagctatgtgaactggaatatttccgactttgggcttgaagaaggcgttgtcgccatgtctcagccgccgtattcctttgacctaagtgtgatggatctttatccgaccttggttttaggcggcaccttgaaggctttaccaaaagaagtcactgataactttaaagaattatttgcgacgttgccaaaattgggcttgaacgaatgggtatcaaccccttcttttgtcgaaattgcgttacttgatccgaatttcaagcaggaaaattatccgaacctgacccattttctgttttgcggtgaggagctagttaataaaaccgcccaagcgctgatcacacgtttcccgaaagcaaccgtctataacacgtatggtccgaccgaagccaccgttgcggttacgggaatggcgattacccaggcgattgttgatcaatatccgcggttaccgattggctatgcgaagcctgataccaacgtttatgtggttgatgagcaaggtgaacaggtttcagctggcacagaaggcgaattgatgatcgtgggtccaagcgtgtcgaaagggtatctcaataatccggacaaaacagccgcggcatttttcaaggctggcaatcaacgcggttatcggtctggtgacttagtgaccatgaccgcagatgggatggtcttttatcgcggtcggactgatttccaggttaagttgcatggttatcgcattgagctagaagatgttgatcataatttgaatcaggtttcttatattaagcaggcatcaacggttccgcggtatgacaaggatcataaagttgcccagttgattgcctttgcggttgccaaaccaaatgactttgatagcgaaatgaaactaacgcaggcaattaaagccgaactagggaaaatggtgatggaatatatgattccccaacggattatttaccgggatcagttaccgttaacggctaatggcaaggttgatcgcaaagcactgattgcagaggtaaatcattaatgcttaatttacaaccgtatgagaatccacagtattttgtctatttaatcattgccttgcttcccgtcatcatcggcatgttcaaaggctttcggatgcattggtatgaaagcatcttttcgttggttttcctggtactgatttttgatgccgataaatggcctcaaggaaaagcgttattggggtatgtggttttcaacttattactggtttacgcgtatttcaaatatcgaacgcgcgaaggctcaaaaaactccacggcagtcttttatcttagtgtcgcgttaggaattgcgcagctggcagttgtcaagtttacgccgctgtttcaacatcatgggtctattcttggcttcttgggcattagttatttaactttccgagtggtcggcacgattatggaaattcgtgatgggtcgattaaagacctgaacatgtggaagtttatccaatttctgctattcttcccaaccatctcaagtggcccgattgatcggtatcggcgatttgtcaaagattacgatcgcgttcctgatcccgagcattacgcccagttggtgaccaaagcgattcactatctgatgcttggttttctgtataagtttattctggggtacatctttggaaccttgtggctgccttctgttgaacacatggcgatggccagtcgcggtggggctttcttgggactcagttggccagtcgtgggcgtcatgtatgcttactccggttatttgttctttgattttgccggttacagtttgttcgcggttgccatttcctacttgatgggcatcgaaacaccgatgaactttaataagccttggatgtcatataacatcaaagacttctggaatcgttggcatatgagtttgagcttttggttccgtgattatatctatatgcgctttgtgttctttatgatgaaacacaagtggattaaatcgcgggtctggacggcatttgtcggttacctcgttttattcctgattatggggatttggcatggtgagacctggtattacattgtctatgggctgttccatgcgatgctcattaatctgacggatgcatggctgcggttcaagaaaaagcataaggactttttcccgcataaccgcgcaacgcactacttcgccattttcatgaccgctaatgctgtatgcttctcgtttttgattttctccggtttcttagacaagctgtggttccactaaaagaatgttgttgtaggcggtcaatcgcttgaagattggctagggtttaaaagaaagaggtaattcatcatggcagacgaagcaattaaaaatggtgttttggatattttggcagatttgacaggttcggatgatgtgaaaaagaacttggatctgaacttatttgaaaccggattgcttgattcaatgggaacggttcagttgctattggaactacagagtcagtttggcgttgacgcaccggtttcagaatttgatcgtaaagaatgggatacaccaaataaaatcattgcaaaggtcgaacaagcacaatgaaaaaaccgatcgggaagatcctttggcgcggacttggcccgttgctgatcgctatcatcctggtcgctgcgttgatgctcgtgccatttaagtttggccgcagcagccaagcaacgatcaggcaggcggccagctccatgtcggccaacgtgctgaaaggcgaaactataaaaaacgaggccatggccgaaaactatgtcccgttcattgggtcatccgaattgtcgcggatggacgcatttcacccttccgtgttggctcagaagtatcatcgtgattatcgcccatttctcatgggaatggcgggaacgcaatcactcacgcacttcttgtccatcaatgccttgacgcatgttgaaggcaagaaggcagtgatggtgctgtccccacaatggtttgtaccaggcggcgttcgcaaagcccagtttgattatttctattcgccggcacagatgacgaccttcttacttcatgctaacccgaattcggaagcggatcgctttgcagccagacggttacttcaatttccgtccaccgattctgatcgaaccgtcaatgaagcactgaagaatattgctgccggtcagaaactgtcagatggccagtattggtatttgaagcaggtcaaggatccaatggctgatcatcaggatgcgttgttttcacggctatttttaaataataaccaaccgcaacttgataaggctgccaagacattgccaagtacttacgatgttgatgatctagatggattggcaacgcggatggggatgcaggagacgaccaataacccatttgaattgaagaatgatttctacacaaagcgggttaagcggaacatgccgaaattaaagggttcgcaggcaacttggagttatgttaagtcgcctgagtattcagacttacaattagtgctgaatacgttcgccaagaagcatatggaagtgctctttgttatcccgccgatcaatgcaaaatgggcggccttcaccgggctggatctaggcatgattcaaaacacggtcaccaaaatgaagtatcagctgaaaacacaaggctttaatcacgttttggatttgagtcaggatggggcacagccttacttcatggaagataccattcatattggctggcgcggctggctgaagatggatcaaacggtgcggccatttttgaagacaaccaaagcagctcccgttcattacaaactcaatgatcagttttataccaaacactggcagcagcaatcggccaatgggttggattagaggccagtcaggtttaggtgccatcgcattatgtagtaaaaagtgaggcaagcataaaaaacgaagggcaaacgaatttctcccatgtcgggaaaatccatttgcccttcgtttattttctgtatgcaagttgactcagctttgatcgctggcaagatcaattaaatgtttggcggtgggttgcgcatctttattgtccatcacaacagtcagaacaacattttgctcgcggcgctgaatggcactgcctccttcgactgcaaagccaaatacctgctgcagcgcttgcgctaaaaagccggcttcgagttgaaagtcgggatcgtcataagtacgaatccgagtcgcgacaacatctcctgcaagcagatattggcgctcttgccgtttctgtttaagtggcgacaaagttcccagaccaacctgggtgaatagctgtggtaaggcagattccgcgacaggtaatttggttgccaagtcacgtccagcccaatagagaatatggtgctgttcttcacctagcatatttggcagcataagatcgcgcattgccgtgattgcaaagaatgaaaccgagccgggaaggttcagcagggtggtataatcagattttgccatgttgtgcctcctgtttctattcgtctagtatagctgaaaaatggattgataacatacttttctgagtgcttgcattttttttggattaaactcacaataaagactcggagctttatagcggaggccagcacgataagggatcgacggctgcgttccttttcgagggatagggttgatgttgggaataccacgggatgggttggcgtgaaagggtggccgacagcggctttctggacacggcgaccactaatcggcggtcttgccgtcatcaagtgattcaaaaggagaattatgatgaacaagcaaccaatcggatttattgattcaggtgtcggcggcttaacggttgtgaaagaagcgctccatcagctaccggccgaaaacaccatttatttaggggatcaggcacgcttgccatatggaccgcggccagctgagcaggttcaggcatttacttggcagatggtcaactttttactcaccaagcatatcaaaatgctggtaattgcgtgcaatacggcaacggcggcagcattaccgttaatcaaggccagattgaagatcccggtcatcggggtgatcaagcctggtagccgagcagcgttaaaggcaacccagaccggccatattggtattattgctacggaaggtaccgtcaaaagcggggcgtatcctaaagctttacgagccaaagcacctaacattcgcctcacgagtctggccgcgcccaagtttgtgtcgctggtggaaagtaacgaagcgcactcaccgattgccaagcgtgtggtagcggacaccttgcagccgcttttgcatcaagatattgatacactggtgttgggttgtacgcattatccgattttgcggccgattattcaaaatgtgatgggtgaagacgtcacgttaattgattctggtgctgaaaccgttaatgatgtttcgatgttacttgactattttgacttagccaacgatggtagcgaggtgccaacgcatacgtattatacgaccggcgcaccatcaatgtttgacgaattgggggaatcatggttggaactaaaaaaaccgatgcacgcacagcatgttgacattgatacacaaccaacgcattttgtagagccgacttctgaggcgactgataaaaccattgtcattgccagcaagaaccccggcaagataaaagaatttaaagcgatgtttgagccagcgggggtaaccgttaaaagtttggctgattttcctactgtgcccacggtggatgaaaccgggaccacttttgaagcaaatgcccgccaaaaagctgatcagtatgcacaggatttaaatttgccggtgcttgccgatgactcagggttgatggttgatgccttggatggacaaccgggaatccgttcggcgcgctatgccggtgacggtcacaatgatgcggcaaataacgccaaactgctggctgctttggccgatgtccctgaagaagcgcgaacggcaacgtttcatacgacgctggtattagccaagcccaatcaccctgaagccgatttggtggttcatggcgatctatccggacgcatcacggcgatcccccgtggaacagacgggtttgggtacgatccttttttcctggtgccggcgttagataaaacgttagccgaactgaccgcggatgaaaagaatgaaattagtcatcgtggtaatgcaatgcgcgcattggagaaggtttggcaggcatggttggaggaaaatgtatgaagattttggcagtgagtgacacacatggcgaccgcgatattttggcggctattttgaagcaacagccgaatctagatggttatttttatgcgggagattcggaattacctgcaaacgatccgctttttaaaatttatcgtgcagtcgcaggtaatatggattttgatccggattttcccatgaccgttacagcaactattgataacaccacgatttttatgacacacggacatcgtttcggggtgaactttggactggataagctggtggcggcgggggaagcagcccacgcacggcttgtgatttttggtcacacgcatcagttgggcgttgaagaacatgccgggatgattgtgttgaatccaggctctattagccagccgcgagggcaattcgccaatctcggcggcacatatgccacggttacttttacatccgatcagattcacgttgatttcttgaagcgtgatggcagtatcgttgcaccgttaagccgtgattttttgcaatcatcacactgattacgaaaacattgtggcagcggaataggcgagtatagaaaaacggtcccaattacggaaccgttttttatatggtcatctttaatttgaggttaaagaaataagatcttatacgttaaaacagctaggatagcagcggcgatgggtgctacaaccggaacccaggcgtaaccccaatcggagctgcctttgtgttttagtggcaacagtgcatgcaagatacgcggtcccagatcacgggccgggtttaatgctggtccggttgggccacccaaggatgctaccagcgttgccacgagaaatcctaaacccatgtgtgcagtgcccaggttgttctggaagaaaggcgccttagtaatacccagagcgccaataaaaagaatgtaggaaccgataaattcattaacaaaaccattcagcttactcttggtggcactaatcgtactgaaagttccaagaatatgctgtgtattggtggtgagatcataatgcggtttatacgcggcaacgacaagcagctggcctaccattgctcctgccatctgaacggcaatatatggtagcacctcggaccaaggaaacatgcctgatgctgctaatcctaaggtaaaggcggggttgatgtggttaccggagatggcgccaaacatcatggcagggatcatcaccccggcaccatacccaaccgcgatcaacagccaatcggagccatttcctttggtacctttcaaatcaacgttggcaacggaaccgttccctaacagaaccataacggcggtcccaataaattcagcggctaaccgcactcctaaatcatatgtcatttttttcctccaaattagtcaaagatcattaaagtttcagtggagcttatacaagtataattattgctcaagatagtgtatcaatttttataaataccgtccattgaaattcccttggagagcgcgttatagacagctcatggtaaaataatatgaggtgtttatccgtcttttggcggatggcacttaccttaatgagcgttaagatgctgtaaagaaggttacttagctcaacataatttcgcttttttaaactagaatagcaatatcaaaaaggagctagtcatatgttaaatcaggtcattgccaacatgctggttgagaatcggcatcactttatgatcgctgcggatatggtggcaacggtttcggagaataatcccttgagtcacgcttttcttgtgcttacaaaggttagatatgcaaagattcccgtgttggatcatgattcgaagttcaaaggactcatctcactacctatgattaccgacacgatgctggggctggaccatatcagttttcaatctttggacaccatgacggttaaagacgtgatgcaaacggatgtcgccacgattaacgacccatatgatttggagactgtgttacatttgctggtcgataatccgtttattccagtcgttcaggatggctactttacgggaattgtgacgcgacgtgaagtgatgaaaggcatcaacaacattggccacaacatcgacaagcagtttcaattggagccggtcacaccggtaacggagaaagaatcctaattgattaaaaccagcaaagcaaatgaatgcgtgctggtttttttgctgtcatcaggcatcccgatcgctttccggtttatccaaaaagacagttgccaaaaccccaatcacgagactgacaagaacagccaatacagcagccagcgtacccgtagttggccaataaggagcaatccctgtttcaatcagaatgaccaccgccgcggcgacaatgccacaaaccgagtaataaacctcaacctcaaaatgttctagtaaataacccattagtttggcaatggcaatgagcccgatcaacgcacctaccataaaaggtaccagtaaggcgacagatcccatcgcagacgtaaacccggcccaattaccggcaaccaaagcccgagcagcatcacctaactgactgacagcatggtaaaccgtgccatattgatcgatcaccatgagcatgaccgatccggaaattccgggaatcgccattaatgatacggcaaagatacctgaaaagcccatgattgcggcatcctgcacgctcgatagtcgttgaatggcgatcaggttctccggttgggtgccgccaagcttggctaatccataaatcgcaataaatccgccaagcaccaacaaaagataccaccatgaaaacggcttaagaaccagcttgcgataaatgaacggtccgatccccagtaccaagccgatgaaaaagccgtaactcggtaatggccagtgggtcgtgataaccagaaccgctttagtagacaaaaggatcccgacgattgcgcctaagccaaccggggtcagaaagcgtaaatttttgcgcggattggcgcgaaagtgattaagtgcatttaagaggcgatcataaagcccaaccacaaccgcaaagatactgccggaaagtccgggaatgacaagtgcaatgccgataatggcacctttgataaaattaagcatgacatctccttatagatggatttattaatagacaaacacggataaggtcgatcatgaacctgcttgcagattcagcggcggtgtaatgacatgaatgccggcagatttcaatgcggcaatgtaggcagccaggaaagttcgttggaggctgacttgttcaccattttcggcgtagaacagaacctgataggtaaaagttccgtttttttcttcagtcaggccaaggatatccggtccatccgtaatggttgagaatttcggtaccagattgtgattgacatgttcaatcgttcggcggaccaaatcaagatcggtcgttggggctaacggcaatttgataagtacctgcatgttgctgcgcgaaaggttgctaacaatcgtaatgttgcgattaggaataaagttaaccgtaccatcgtagctttttactacagttgtgcgtaaccctaggctagtgacggttccggaaatcgttcctagtttaaccacatcaccaacatcaaactgggcttctaacaaaatgaagaaaccagttacgacatcattgacgaagccctgagcgccaaagccgatcgccaacccggcaacaccagccccggcgagcaacgtgccaacaggaacccctaatgttgagaggatcgcgtaaaaataaaagaagagaacaaagtagaaaaaaagatttttggacaacgcgtggatagttttgacgcgtgttcctgataacttggcgcgatgttggtaacttttaaaggtgcgattgatggcaaattggcctaagcggtagagcgcaagaaacagaattgagaagaatagcaacgagagcactttatcaatcaaagttccggcaatctggtcccaatttattttcgtaaagtaccttaaccagacattggattgtccagtcacggtcgcggttgtgaagatcgtgcgaatcacgtgatggcctcctttgtattagcctcattttatcagaatcagggctagcttgctggggatttgccgcgtgtgaggcaatttttaatgttaggcagggttgtggagaaagtgcgagtggcgagtgtggggacggatggtttcaatatgtggttgtaggtgcagaaagctacgtctgaaatcggcttaggatctgaaacgcgtttacgggatcggaaatctggaaatctgcatgtaaggaccttggatgtattgaccacaacccggtcaccacgctcaaggccacttatattctggtttacgcccataacgcgctcgccagcccagaaacctgcgtgtaaggaccttgagactaaatggccatagcccagccatttagtctcaaggccacttatattctggtttacgcccataacgcgctccccggcgcagaagtctgcgtgtaaggaccttaagcgcaatggccaaagcccggccatcacgcttaaggccacttacactccgacttctaaccgcgccggctcgcgctcatgctctgaaacgcgttcgccagcccagaaacctgcgtgtaaggaccttgagactaaatggccatagcccagccatttagtctcaaggccacttacactccggtttctaaccgggctggctcacgctctttaaatcttttgcacgcgtgttgtgacgatgttatgattaatgtaaccaactggtttgaaataggagggtgttggatgtcaggtggagagattgcttggattattgcggcaacggcttttttgattattgctttggcgattgccatcattgctgttcgcgtttctggcgtaaccaaagaagttaaagaaaccgttgctgagacgaataagacgttggatacgatcaacggggagcttggcattttgacgaaagaagttgaaggcctacttgccaagagcaatacccttcttgaagatgtaaatggcaaggtggcggcgattgatccggtctttaccgcgattggtgaacttggcgaaagtgtttcggacttgaaccagtcaacgcgtcagctcactcagcgggtcacgaatggtgcaaaaaacggggctaaggcaacggttgctgcacgaatgggtgccaaagcattttcaatgttgaccaaaaagaaacatcaaaatgaatagcagggggaaacataatggctaaaaaaggacattttttgcttggatttgtatttggagctgctagcgccttggcaacgacttatttattgacaccgcaaaccagtgatgagttgaagcggcgggttaagcatgcgtctgagaaccttgctgatcgcgcggttgattatttcgattacgccaaagaagcaagtgctgattggaagcaaagtgcaacggatttcgtagatgagatcaagacgcgcggtaacgatgctgacgggtcacaagccttggctaattatgatgctgcaaccgaacaattacgcgatcagctgaacacggctaatgataccgatacttcagctgactttgatgacatcgttcttgatggtaaaagtgcgtttgcgcaggcgaaagacgatgatgaaggtagtgaaacccgcaccgatgaagtgcctgaaccgacaaaaccggtaacgattaaagaggcatcagcagattcggcagcggcagattctcaagcagcagataagtaattatcagctttttgatgattaaagatggcggcaaacgaaaggtaactccgtgtgagtacccttcgcttgtcgcttttcacatcgtaacggtcaaggcgagccgaattggctattttggttagaaattgagggagtaacatgttaaacagtgaacgtcaggcgcatatcaaggctgcattgagtacggcagctgaaccgcttagtgcatcgagttttgcacgccgatttacggtcagtcgccaaacgatcgtcggggatattgcactattacgggcacaaggcgaacccattatcgccaccccaagaggctatacgttatcgcaaccagctgcacttgagtttttggttccatgtaagcatacccccgcccaaaccgagcaggagcttcaattgattcttgataacggtggctggattgaagacgttttggttgagcatccgttgtatggccagttacgcgggcaattgaatattcgtaccgttgccgacatgaaactgttcttgagtcgggtcgcgcggtatcatggccatcttttatcagaattaacgggcggtattcatttgcacagcattagtgtcaagcagaaaagcgacattgcgaagattaaaatggcgcttcatcaggcgggtatcttatatgagcagctggaggaagcagcggatcagggataaatagtttagtatctgagcttttaggctgaaagaaattggtgagtgaatctaaaaaaggttctagcaatgactgagcttgtcattgttagaaccttttttactagattgacatgtaaccctcgatttcaaaagcgcaacaattaacgtcacaagttaaccattaatgaccgtgaattcctttgatgtgtgcgtaaatggttcgcagccggtttccgtgacgtggacacagtcttcaatgcggacccccgccactcccggaacatagataccgggttcgatggagaagcacatgccgggctgcaagatcatatcattgccttccatgatggacgggaattcgtgcgtcgacataccgatgccgtggccgagccgatgattgaagtactcgccatagcccgctttagtaatgatatcacgcgcaattttatccagttcggatgctttaagtcctggcttaacagcgtccatcgcggttaaattagcctcaagacagatgtcaaaaatttcccgtggcttaccagtgacttgaccaaaagcaactgtgcgggtcgcatcggacatatacccatgattgtcggtgcccagatcgaacaaaaccaattcgttaggtgcgagttttgttcccatcggttcgccatgcgggttggcagcatcgacaccagcttggacaatggtgccgaagctcatgtgcatgacgccttctttcatcatggcataatcgatttcagcggcgacttcttgttcggttgctccggctttaatggcattgaatcctgcctgaaatgcccggtcggcttgagcaccagcggcttccatctgcttgatctctgaagcggttttgatcaggcgctgtttttcaataaaacgagaagcatcaatcgggaaggtagcgtccgggaactgcttcatgatcgcttcaaatttgaaaacggcgagattatctttttcgattgcccatttcgttggattagggttgacggttttaatatgactcgccagttttgcaaacgggtcctcgtgatcaagataaccgaataccgggtaggcccagccggcttttttgacttcttcgatggtcagttgcggtgtaaataagaagggatcgtgatctggagcgacaattaaagccgtaatccgttcttctggatcttggaagaatccggtgtagtagttgatgttgatcgggtcgctaatgtaagcaagatcaaggccctcttcaccgatccaagtctgtaatgctgctaaatgttcgttcatgattttcctcctcaaaggacaaatgcaaaagtaaacgtcaaaatgacatacctgattaaacagccactgggtaagtcagtttcttgacgattcatcatgtcctgtggtgtgttgaaaacagttggttcaggttactccttaaaactcgctgctagcggcttagcaagcaacacaaacgcaactttacccatcagtataacacggagaaaatgctaaaactttctgaaaagcctatttgtgaaaatttcatggaaaaatcagtaaaacgcttgcattgccgttctggttctgttattttggaatgtaaatagaggtttcgtgaattttcattttcgcgactaaggagaaaataaagtggaaaaacaaacaattacaatttatgatgttgcccgcgaagcaaatgtgtccatggcaacggtgtcacgagtcgttaacggcaatccaaatgttaaaccggctacgcgtaaaaaggttttggaagtcatcgagcgccttgactatcgaccaaatgcagttgcccgcggcttggctagtaagaaaaccaccactgtcggcgttatcattcccgacgtgaccaacatgttcttttcaagtctggcgcgggggattgacgatgttgctaccatgtacaaatacaacatcattctggccaattcggatgagaataaccaaaaggaagtctcggttctcaacaccttactggcgaaacaagtcgatggtttgatctttatggggcacgagttgacggatgcgattcgcgccgagttttcacgcagcaaaacaccggttgttttggccgggtcaattgatcctgacgaacaggtaggcagcgtcaatattgattacgtggctgcggttgaagaggcgaccagacagttgattgaaagcggcaataagcgcgtcgccttggcaaccggttcattgacacatccgatcaatggtcaatttcgcttgaaaggctacaagcaggcacttgaaaaagcgggtgttgcttacgatgaaagcctgatttttgaaaatgaaccaagttatcaggctgggttggccttattcggtaagttgcaaaaggttggcgcaacagctgtcattgccggcgatgacgaattggcggttggcattttggatggtgcgctggacaaaggcgttaaggtcccggaagacttcgaaattatttccagtaacaatacgaagctgacggaaatgacacggccacagttgacctccattgatcaacctttgtatgacattggtgcggtggcgatgcgcttgctcaccaagatgatgaataaagaagaaatcgaagaaaagaccgttatgctaggttttgatattcttaagcgtggttcaaccaagtaggcagaagtaacacgatattctggcggcatgccaagcaagcatagacgataaaaagcagatgaatcagcgcatatatggcgcggttcatctgctttttggtttgttggtatgataaagatcaatgctgccatccgcgcattgcttagacggtagttaatcagttaatggccggtacctgtattagttgacggggtttgcggagtagtcgtggtaccgcctgttgtcggtgcagaactggtggtggctgcttcagtgccagtaccgccaccggttgtgccattgttgccgccagtaccggtagtttgcggctcactcggttgattttccgaagtgccttgttggttttgctgactcgatggcacggttacgctaggtgtacgactgctagaaactgttgctgatgaaggggtttctgtcgtaatcggcgtttcctgatgttcttttttagcctcggtggagcggccgttagcatctgacacttggccataaccattgcttttgccatcaagataatcgtagaacagctgataattatctttactgccgccaattgcaaactcggccttggcggttggctcccagtcattataaaggctggtcacagttgagccgccagtacggtaggtgtgcccgttaaacgaaagacttgcagccggctgaccggtttgtttatcaacggtgacggatttgacggtgctcggtcgacttagtttcttatccgctttgaattttttaggaatagtatgatataccgcattggccagttttgcccaatatgcttcattggtcatcgagctattttccgtgagggtatagttcgtgccattactattatcgtaccccatccagctggcaatcgtgatgcccggagttgagccgatgaaccaaatatcgcgaaaatcgttactggtcccggttttaccaatcagattatcggtattaaatcgcaactgatagttcaggctttccgcagttccggatgcaaccacgtttttgagcatctggttcataatgtagttggtgcctttagagaaaaccttggtctttttgacttgatggcgataaacggcatggcctgagggatcgacaatttcggaaatgacgtaggcgggaacatgttcaccttgattggcgaatgttgaaaaggcgctggcttgctccttaacgtcgaccccgtaatcagtacctccaagtgccagaccaagttgactatagtcgttgtcggtcagggtgttgatccccatcttttccatgtaggctttgacgtttacggatggcttgatatgtttatatagattaacagcaggaatgttataggattgtgccagtgcttcagtggcagggataaagcggttttggatctggccgccatagtcagtgacgctgtaattgttcccgagattggttttgaaatcagctaaggcagtttgcgagccgataattttttggtcaatcgcaggggcataaaccaaaagtggcttgatcgtcgaaccgggggaacggagggtataaatatggttgagttcgccggtaacgccgccaacaaagccgagaacggccccggtttgattatcaaggacaaccgatccgttttgaaccgggtatttaacggtttccgtttcaccggttttcggattaatctgactactggtataagtttgaccgaacgtatcacgggttgcgcgcatgacaaattgcatgcgatcataaacatctttgtcaatcgtgctcttaatgcgatagtttttggacgcaaaaagatcacctgcctgtcggagataatcattgtttaaagcgctatcttttgcgagctctgctgcagaatggccatcgctttttgctaatttctcggctaacaatgatttggcttcacttagtaccatgttatagacataaccatactcatcatcatcctggtctgctttttctggctggagaaaggcaccctttagatcaaatgatttggcagcaacatattgacgatggctgataacgccagcccggtacatgcggaagaggacggtttgttggcgattgataccggctttgagactggttttcaatttaccatcggccgtgtaaggggtatagacaaatggactttgcggcaggccagcgatgaaagccgcttccggcaagttaacttccttagccgaaaccccaaacagtccttgcgccgctgcttcaactccggcaatattttggcctttgttattacgaccaagcgtagcaacattgagataggttgccagaatggtgtttttactgaagtgattgttcaagcgccgggccagcataatttcagcagccttacgcttaaaggttgtctccgaatttaaaaacatcattttgaccacttgctgcgttaaagttgacccacctgtctgactgcccataccggttaagtcggagaagaacgcacggataaccgccttaggaacaatgccgttgtggcgatagaagtcttcatcttcagtggcgataatcgccttggtgagccatggcgacatctcattgaggttgactttggttgagtacaggtcgcttttaacatcgctaagcttgacgttgtgggcaaaatacatgctggaagtgcggctggtattggacaacgttgctttcatagcagtttcagttggaattggcgttgcgtcaataatcgacacaaaatagccgccaaacaagccgaggccaaacacgacagcaatgcctaaaacgcctaataaatagtaaacagttgttttgatgctttgaagtgtgacgttgccataatagacaacggcagctttacccgttagttgttgattggtatctgctttggaatcgggatgccgggtcacgaattgcgtgaaccaacgacaaaatcgagtcccaagcgtcttgacccgattgacgaactttttcaagtgcttgtcccaccttaaattttggtctagtacgccttagtataccttaaaaacagggcggattctaatgctgtaaatggggagtgccaagtgaggtgtttggaggtttgaatctaaggagcgttaggcttggggtggtggttttttagggggaggtttacgcgtgcgggctggttcacgctctgctctaaaacgcgttcaccagcccagaaacctgcacataaggaccttgagcgcaatggccaagcccgggccatcacgctcaaggccacttatgttccggtttctaagcgggctggttcacgctctggtctgaaacgcgttcacagtcgcagaaatctacgtgtaaggacctcagacgcaatggccaaagcccggccatcacgtctgaggccacttacactccgatttctaagcgcgccggttcacgctctggtctgaaacgcgttcaccggcgcaggagtctgcgtgtaaggacctggggcgcaatggccaaagcccagccatcacgtcccaggccgcttacactccgactcctaagcgcgccggttcacgctcttgcgacttaactttcattgtgtaagactaatagcatatgtcatgaataagagaatggagcaggttatgtatcgaattattttgtttgatgtggacgataccttgttggattttaaagcaggggaattaaaaagcctggcaaaaatgtttgccaagctgaaattaacgtacacaccgcggattgaagcgagttatttaaagataaatgccaatttgtggcgcgattacgaagcaggtcgtatcactagaccggaactttttgatgtgcggtttgccaagctatttcggcatcatcgcattgatgctgatccgcacttggctgaacgcacttatcaccactttttggaccaagaagcgatcttattgccacatgttatggaaaccttggatgcactaaaagattatcgactcttcattgttagtaacggtattgagccggttcagcgccagcgattggctaccagtggcttgattgattactttgaggatatttttgtttctgatagtgtgggtagtcccaaaccgactgtcgcgttctttgattatgttgctaaacatattccgcggtttaatcgcaacgagacgttgattatgggcgactcgttaacctcggatattcaaggcgggattaacggtaagattgattcgatctggtttaacccgcattttcagccgaatcgcgatcaaattaccccgacttaccaactgaacgaatttagtgatctaactaaattactcttggctaattaacggctgtctgaactgattagtcggctaaacgaatggtgccgctcgtaaccaccatggtaccttgggccgtttgtaacagtaaggcaccattatcatcaaacccgctgattgttccggtcagcgggttttgtgtgccattcaccgtaattcggcggccaacccatgcagcttttgcgcgataaatcggcataatggtttccggattggcaaatagacgcatcagattggttaaaaatcggcctgccagttctggacgcggatcgctatctggctgattggcaagtaacgtggtgatcggctgatcggttggcagcactgctgattgagccggaaaaagatcaaccccgatgcctaagaccacagcgttgtgttcaatgagtgcttccgctaaaatgcccgcaaccttgcgaccacctttttgcagatcattcacccatttgatcgcggtcacaatgccaaactgggtttcaattgcttgctgcagcgcaacccctgcagctggtgtgatcagggactgactgatttgcggatggaatgcgtaactaagataaagccccgcatcggcaggactggcaaaatgtttgccatggcggccgactccggcagtttgttcaccggcaataagaatttggggaaccgtactgttattttgaacggcgtgttttaaaacggtgttggtagaggtcacggttgcttgagtagcaacggctgcacgcaaatgaggatcgtctaaccatggatctaaagcatgaggtgtaaacatcataagcttcctttctgatttgcatcgcacaaacgccagaagtcaccgcaacatcgtgagttgccgacttctggcgcttgggttgcatgattagtttaaagagcgtcaaggcgttagtgttcgcagcgcaatcaagcgggcaaagtcacttcactaaccggctaattgcatcggcatagatggcgactgctgccacaatgtctttgatcggcatatattcatttgcctgatgcatgacattttcctggcctggcatttgggcaccaaaggcaacaccgcgtttgatgatacgaccataagtgccaccgccaatgacttgttcatgaccggggatgcctgtgtgatcactaaaagtctgaagcaatgtcttgacaagtggatcatcaccagatacatagtgtggttcctgagcgtgaccgctgactgccacattgtactgatctgctcctagcgccgtttcaatctgatcacggattttggctgcatcggttccttgcgggtagcggacattgaccagaacgctttggggaccgtcttgcgtaaaggtgaagatatccggacttgcggtcaggtcgcccattagtttatcggtataattaatccctaaatggtgaccacgtgagtctagatgaaggtggttggcaatcatggtcagataggctttcccggctggatcaaatggtaagtcggccaaaagcgttgctaaataggttgcggcgtttttgccatcttttggttcttgggcatgggcgccttttccaatcaattcaatcgtcgtcgggttgcctggtgtcagggtgagggcgacttcttgctctgccgcccacttctcggcttgcgtcataaatgcttccggtaatggtccgctgatgacagcctttgcttcttgtggcaccatgtttggccgaataccggcggaaaaatgattcaacgttagatcagcggttgcagcggcgattggtttttgaacgatttcaaaactggcaatccccttttcgccattgatgatagggaattccgcgtctggtgaaaacccgaagtcgggagcaggttcagtttcgagatagcggtgaataccgacccagtcagactcttcatcggtaccaagaatgaagtgaatctttttattaatcggcaacttgagatcgcgaatgagctttaaggcatagtaagcagcgatacttgggcctttgtcatcgctggttccgcgcccataaatcttgccatcgcgaataacggggtcaaatggatcggtttgccagcctggtcccgcgggcacgacatcaacatggccaaaaagcccaaagatttcgtcgccatcgcctaattcgatgcggccggcaacatggtcgacatttaatgttttgaaaccgtcccgctgtgcaatcgtcaaaaatgcttcaagcgctttggccggtcccggtccgagaggatactcatcggtttgatggtcagtatcacgttccgaattgatcttcaaaagtgtggttagatctgagagaagttggggttccaatttttcagcttcttgctgccaattaatggtcataaggttaacctactttcttactagtgttgccttaagaatagcatgtttaaggcatagaaacgaatgaatgactcgatcattgataatgcgtagtgaagacagacgccgcgcctattgatagagcaactcaagtttttaaccgatgttcaggacactggcattgagaagcggtgtatcgaaggccgtgtcgccaagtgcccagtgaaggagcggtttttggttttcggggatgctgcgatagagcgtgagccagatatgcatattctcggcggttggcagcacctgtaaatctttggcgtttaaccaaccgatttttgtttttaaatacagctggccgctttgataacgggctgctaatacccagtagcatttgtgattgccaacatggccggtaatggcttgctgatgtaagggatcggcgtgcacgggtaccttaaagtgtcggctggtgatgacgatgcgctgatggagaaaaagacttgcccaaccggcttcaggggcaaggttaatggtttcggcagggacaaacgcattgtcgccaatttgatagtaagtactgccagcgagggaaaccatgctggaaatcatgatcggggtttgcggtgccagccgttcagagcgcaacaatggctgataaggattttcataaactggcagtgcagcaaggcttgagtttgcgccaagatcattgatgctggtggtgacagcagctgccttaagcgtttgaaactcgtggccgaggctggtgtaattagtgacgacgccatcaatgttgagattgacgagccaagtccatttcgcccgatcctcgttcatttcatcccagacataaactttcttaccaagatcatgcagttgggtgacaagttgcggcgtcactaaatcggaacttagattaataccgtccacgtacgtcaagacgtcaaagttgatccgcttaagcgagccaacgatcaaaattcgcggaatatttggtagaactgcctgcaagcgtttgaggctagctgctgagaatgaatgaaacatcacgcgattttccatgtgatattgcttgatcagggccgcaactttgtcttctagatgcggatgcggttcaccttttacaattttagtctcaatcaggaatttatgctttgtttgttgctcatgggcgaagagttcctctaggctgtgaatcggttcgccatttttggtatgatattgctgaagttgtgcgaagtttgttttcgcgatcgccaagttggcaccagtcgttcgctgaatcgtggtgtcatgttgaatcacaatcacaccatctgcactttcatggacgtcaagctcaacgtaatcagctccgttgttaaaagcgctgtcgaaactttgaaaggtctcttccggataatttaaaggatcaccacggtggccgactagcgtaaaccccgaaagcagaagaaataatggcactaaaaagactatcagtgtgagtcgtttgcccatacaggctgctcctttccagaaaaaaacatcataccacaaagatagcaccgcaacgcgactgggacaatttcccatacttcgtgaaatcaaataaggagccttaattgaaaatggcagaaaaatatcaggttttcgatttaattcaggaaataacgcgtcttgacgggagtcgttatttcgagctagggaacgtcatgatgaacggacgtgccgaaaaagccgcgatgaaagggtttattaagcgggtccggatcgttcaactgaatattgcccattcgacggccgtgacgacttatgaaaaatatattaatgaacattacgagtttccaccggccgatttaacgagttgggaagaatgggacaagccggagggcccaattcgtgacgcttatcatgagatcctcaagcaaaatcacgtcggttaattagctgctgcattcacttgtctcggtgaaggtacatggcagccgaatattttaataaaaatatcaatttttaaatgaagtccagcatcattacgggtgtaggcgcgccattttagaacttccggtttaaaccggtcggggattttgcgttggattgacgccacttatataatgtaaggcatatgaaagcgaggggtccgcgtgaaatacataggtaaatggctactgccgtttatagcggcaattgcggtttttatcggcatgcagtttgatagcggcctttataccaaaccgattgggcgagtcgaagccgtgaaagtagtcaagaccgagagtcatcaggatgaagaccagaatcacgatcgtctggtgaggcaacaggtgcaggttcggctgctgaatactgctaaccgggggcggcgggtcaccatgcataatacctactcgtttagcggcggcttggataatcagctgcgggttggtgagcaggtgtttttggatgtcaataaaggcacctacacattgaacaacgtcaaacgagacgcaattctggcggggcttttggtgctaacgtttggtttgattttccttgtgatgggacggcgtgcttggttaacgagtatcagtattttgctgaatacgctgatcttctttgcggcagttgaatgggaaattggcagtaaacagtggcaagcctggtggttatttgtcgggttagcggttgtttttactgttttaacggctgtcttcattgtcggatttaaagcgattgctgttgctatttctttgggatccttggtggcgaccggactggcagtggcgcttggttacgggattatggccatgacaaactacaatggggttcattttgaagaggtcaaatatgctacccaaacgccgcagttgctgttctttgctcaggttgttatcggttctttaggagccgtgcttgatgaagcaagtgatatttcggtcgctattttccagcttcacgagacggctaaagaacgatttcgcgctggcatggccattggacggaatgtgatgggtcccttaatttccgtgcttttcatgatcttcatcgccgatacgtttatggagtcggttttgtggattcgcaataataattcgatcgcgcaaacggttatctgggtgatgggacttggttttgcccaaagtctgattagcgcattcggcattgtcctggcagtaccggtgaccagcggattagcggcgttaatggctaagattaagaaggtgacagcatgaacgcgattcttgcgctagccttggtgttagtggtcatgatgtttatcgttggcggcaagcaaggcttagcgaacttctttgccttggctgccaatgccctgcttatgattttggtcgtgatattaatggccagcgggttcaatccgattattgtcgcggttatttttggcttaatcattttagcggcaacgatctttttgagcaccaatcagcttaatgttgctgggcctgcgtttgtttctgctttattgatcatgacgttactggtcggtttgattttggtggtcatgaccttaagtcaaacagccggtttcgggccggaagattccgagagccttgaaggtttctcggtgtatattggggttagttttccacacattctgattgcaacaactttactgggcacgcttggcgccatcgctgaagcggcgattgcggtcgcagccgggatggatgaaattaaggatcaagcgagcagcgcgggcattaaacaaatgggtcatgaaatcattggaacggctttaaacacgctgttcttcggtttttttggtggtttttcctctttgtttatctggtttgcttcccttagatatcctttttcacaagtgattaataacaaaattttcgttggcgagttattgcaggtcttgatttcggttattgcggtgatcttaacggtaccgatgaccacttgggttgtggcgacaagacatgcacatcgtcggaaggagtaacatgcaatactttattgcggacacccacttttttcacgcggatcttttaggtgataatgactttgcaccgcgactttttccatctgtagaagcaatggacgatgcgatgattcaagcttggaatgcacgggttgacgatcgggatgtggtgtatcatttgggcgacattgccatgaatccggagcattttccccagccgccggaagttttggcaatcttattgcagcttcacggtcgcattgtttttatcaagggcaatcatgattatgaatcgttattcaaatatctgcaccggcatgacccgggcgtaaatggtttgcctaagttcacgtttcattcggttggtacgattatcaaagacgatcacacgcaatttattatgacacactatccgctgatgatgggaattgtgaagcagacactgaatctacatggtcacattcatcacaatagtgtcaacatcgcggaaaatatcaacgtcggcgtggatgcaccggagcgcgatttactggtgccgcatttgcctttcgggacgccactgacggcagctgaaatacatgagatttatcgactaaaggttgcagttttgagtaaggaacggtagcgatcagaagcggtttgaccggtcgcaatttcgggcataggatgaaattagaatggattgatagcaataccttgaaaagatgctggttgcaaggagtctaaggaggtgccttgtggagaagttggtgatcctgcacacgaatgacttgcattcccactttgaaaattggccaaaaattcggcgattcatgttaggaacacgggcggctgagcaagcgcaaggagctagtgtcttagcgtttgacgatggggatgccatggatcgatccgtgccactaaccgaggcaaccgatggccagattaacattcaattgttaaacgaaatcggttatgacgcagtaaccattggcaataatgaaggcgtcggtaatccgcatgcagtgctggaacatttatatgatcatgccaattttccggttgcacttgccaatttatttgagccggatgggaccagaccacgctgggcaaaaccggttgttatgaagcagacaccagcaggaacccgagtggcgattgtgggctttacggcaccgttttttctcacgtatgaaccgaatggctggcaggttaagacggtggcggatgttttcccggcaatacttaagcagctggagggttcgtatgatgttttggttgttttgtcgcatttaggcattgaagccgaccgacatttggcgcaacattatccgcaaatagacgtcattatcggtgggcacacgcatcacttgctccctgaaggcgaattgcatggcaccactttgttaaccgccgctgaaaaatatggtcattatgttgggaaaataaccttaaccttaaatgatgaccatcacattcaaacgcggcgagccgaaacttttcaaacggctttgttgcaaagtgccgcggcggatccacgtgagattcaaggctatgaaagtaaaggaatcgccttattaaaacaacagcaagtcgcacatttacctaaacagctagccattagctacgatcggccctcaccgttacttgattttggtttagccgcggtggcagcaaccgctcagacggatgctgcaattttgaatgccggcttgtttttgacccctcttggccccggggttgtcacccaagccgatttgttagcttgcttaccgcatccgatgcatttactgaaggtgactttgagtggtaaggaactttggcggctgatcatggaaatggaaaagaatcggatgtttttacgacactttcacatgatcgggatgagttttcgcgggaaaatttttggcgatatcggctatcgcgggataacggtggatcgggagaagcggcgggttttatggcaaggtgagccgctgattccggagaagcaatatacgtttgcgaccgtcgacaactttttattcattccatttttcccaaccatcgagattatgggcagtaatgaattgcttttccccaaaatcttgcggcaggttatcggtgactacatggcaaaagtttatccaagatagtttcgtgttatacttttggaacacccacgcaaggactgctgtgtacgtgcggcgatgataagccgcatgaaacgatttttagatgaaaaaggaggtcatgacttgggtgaacgatcaccattatccgaacaaatcgatgatgccttgataccggccttaaaaaaagatttacgaatcgtcaatgtcgggcacgatttgatcacgatcgatgggcgccggtatcggattgtcaagaattatcgggatgcctgcgatcttgagcgattaaatgaacgctataatgatattcttgataagtatgatttcattgtcggcgactggggatatgaccagttacggcttcggggcttttataaagacgatcgccgtggtgccagcaaagatcagcttatcagcacattagaagattacctgtatgaatactgtaattttggctgtgcttactttgtgcttgcatgtctagacaagcccgcccctaagtcgagtccccgccggcaaggacgcgatcagcattcgcaaacgactaagaatgcgcagcgtaaacatgccaataagcacccattacatggcaaacgtaaagccaacaaaccatacacggaaaagtcagttcgatcaccgcaatttcgcggcgaacaggctaaaaccgtacaccaaaaccaaccacgcaaacggcattttacgatccgtcaacgtgagactaacaagaagtagggacagacttgaagtataaaggttatatgattgatctggatggaacgatttatcgggggaaagaacggattccggcagcaaaggattttgtcgaacggttgcaagcggcgcggattccgtttttatttttaacgaacaatacgactaaaagccctgaagatgtcgttgataatttagccaaaaatcacgatattcatgtcacgcctgatcagatttacacgccatcattggcaacggcggcttatttgacggaccttaatcacggggatgtttcagggaaatccgtgtatatcatcggtgagcttggcttgaagcaagcacttttggataccggattacggttaaatgaagtggatccggactatgtggtagtgggcttggattatgatgtcacctatcataagtttgaattggcgactttggccattaagcgtggcgccaagtttatcggcaccaacgcggataccaacctacccaatgaacggggattggttccaggagctgggtcactgattgcattagtagagcgtagtacccagcagcgcgctttttacattggcaaaccggagccgacaattatggagaaagcacttaaaaagatgggcttgcctaaagactcggttgccatggtgggtgataattacaacaccgatattaaggcgggattaaacgcgggcattgatacgatcctggtttataccggggtgtcaacgcgtgattatgtgtctaaacaagttcatcagccaacgcatcaaattgaccagttaacggactgggaggtttagatgaaacgcgctgggcagtgggtggttctttggctggcaataattagtaccgtcattttggtcacgatcctgagcacgttgctgacgtttccaatttatgcacatatggatgacttaccgcaaattgccgctatgtcattaggaaggctttaccacaattacttacaattgatggcttacctgaatttcccttggattgggacacttcgaatgcaggattttccaactagtctgcatggagcggttcactttgctgacgtgcgtcgtctgtttattttcgatatcctcgtggccctcgtaacgctgccttttgctattcgttggctacatcggctcaaagccacgagtaagcgttacttgttggtgcgaccgtttatgatcggggcagtcgtgccaatcgggttaacggcactattggcgatgaactttgaccggttctttattgtttttcatgaaatgcttttccggaatcaggactggctgtttgatccggcaaccgatccgattatcaatgttttgccggaaggattcttcatgctttgtttcctactagcatttggtttgtttgaagcagtgatgatatggggcatttggcgagggcggcaagatgcacggctcgggtcaaagcaatagaaaaggcgcagcacatgttgtttataaacatgcgttgcgcctttttgttagatttgatgattagcgatcagcgactttggcagtgcgggttttaaccgcggcaatgaccattggtagaagtgagatcaagacgatgccaagcgcaacgagtgaaaagtgttcttttacaaaagtcacattaccgaaatagaagccgccgagcacgcataaggtgacccataagaaaccgccaagtaaattgtagtggatgaacttaccatagtgcatacgggaaccaccggaaacgaatggggcaaaagtgcgaataagcggcatgaaacgggcaattgcaattgttttgccgccatgcttatcgaagaaggcctctgcttggcgcaacttgtcacgattgatcaagcgcccgaaccagcctttaccggtagaagcagcagaaccgacacgcttaccgatttcataattaacagtatcgcctaaaaccgcagcagccaagaaaaccgcgaagagaatccagacattcaagttgtaagccgcgttggcagctaaagcacttgcggcaaacaacagtgaatctccgggtaagaacgggaagacaacgaccccggtttcgatgaagaccatcgcaaagaggatgacgtaggtccaggggccgaagctattgacgatggtgatcaaatgttcatcaatgtgtaagatgaaatcaaacaactgggtcattttgtaaactcctttaatgaattatctttcattatacgggataagatgaaagtttcatgaaacatgcgaaaattttagaaaaacatcaataaatatcgtcttcgatttccggatgggagtgggcaaggcgactggcagcagcggcagccattgccccgacgatatcatcaagaaaagtgtggatgatccccggctcgtgggcattgagcttggccagaattcctggcttaatccgatcaatatagccgtaattagtaaaaccaattgatccataaacattgacgattgaaaaggccaacacctcatcgaccccataaagcccttcatcttctgcaatgatcttctgtaaaggctcctcaagactgtttgcttcagcagccttatctaaagcgatgccagtcatcacggcattttgaacctcccgtttacgcaaaacaatgcgaacgttttgcgtggcttcttcgatcgtcaatttaggaatgaaacgttcctgtaagaacatgacaagttcaccaatatcactgagttgcacaccgcgctcgtgtaataactggatcgtgcgttcatacaatttctcttcatttgtcatttttcgcttctccattcaaagtgggcgttggccagtgtgcttagcagtcggtactggcgaacacattagcgtcattaggttgagctggctggttttatcgataaagttgggtactgtgcaaagcttgacggcgttccgggtaaagccgactgagcgcttcgttaatggcagtcggtgcctcaccaaagccgctggcaatcaatggcaactttccggcataactgacggcatcaccaatcgcaaaaattccgggtcggctggtttgcatctgtgaatcaaccaggatgccattacgatcggttttgaactgccatgcttgaagatgccgtttgtcagtaacaaagccataattaaccagcaatttgtcgactgttaaggtgggctggtcctcaccacgaacttcttttaagcgtacagccaggcgcttattttcgtgcgtgacggcttcgattaaatacggggtttcgatcgtcacactacttttttcaagtgcagccacacttgcctcaagtccgcgaaatttggagcggcgatgaattaaagtaacatgccgggcaatcggctccagcgccaaagcccaatcaatggcagaatcgccgccgccagcgatggcaacttcctgatcgcgaaaagtctccagatcttgaacaaaataaaaaagttgctgaccttctaaagcggggtcataatcaacggctaatttacgcggcgtgaaggcaccgccaccagtcgcaacaatgaccgttttagtgtggaaatctccttggctcgtatgcaaaacaaaagtaccatcatcagcctcgtcaatggtctgaacttcagtagctgttttgacgtccggcttaaaatgcatcagctgagttttcagttgagcgactaaatccttaccgctgacatgggggaagccgccgatatcataaagaatcttggccggatataaatttccggtttgaccaccgagttcgtcaagactttctaataataagacatctgcttgacgtaacccggcataaaaagcggcgaacatgccgaccgggccgccgccaatcacagtgatttcatatacatgctgcactgacatttgcaatgctccgtttctataaataatatgacgttcataccctaccatattttgctaatggttaccaaggtgacagtagtctggcaagcctgtttaacaagatatcaccattgaatggttcattgactaagggagtgcacaaagcaaatgacatttactttgcccatattgatgatgctggtatactacgcctagtgttagaaatacgaatgagacaaatgaaggagactgattatggactatccacaactagaacttgcagaattcaaaggaccaaaagcaatttttgaaaccagcgaaggacattttgagattgcactatttccaaaacaggctcctaaaaccgttgataacttcatcggcttagctaaaaaagggtactacgatggcctgatttttcaccgcatcattgccgattttatgattcaaggcggcgacccgacaggcacgggaatgggcggcgaaagcctgtggggcaaaccctttgaagatgaattttcaaatcaactatttaatctaaaaggtgctttgtcaatggccaacgcgggtcctaacaccaacggcagtcaatttttcatcgtcacgaataggcatctggatccgagcatgaaggcacaattaagcgaagccggatttcccgaaccgattatcaaagcctatgaacaaggcggcacaccgtggttagatcatcgccacaccgtttttggtcaagtgttatcaggactatcggttgtggagaaaatcggtcaagtcaaaaccggtgccaacgataagccggttgagccggtgacgatcgatcggttgacaattcaagactaatattggttgccgctgatttttagggtatactcaaagagaaatccaatgaaatgaagtgtcagaatggaatatcgcataggagatatcttgactggcaaagtgacaggggtccaaccatatggggcgtttgtcatgctggatgagcacacacaaggtttagtgcacatttcagaatgccagcacggttatgtcaaggacaccagcgatatttttaacgtcggccagcgagttgaagttgtgatcttggacatcgacgaatatacccaaaaaattagtttatccttgcgtgcgttgcaagcgccgcctcggttaggtaagaagcggcgtcgcaaacattactggaccagtcgtaaatttcacaccggctttgcaccgattgccgctcatttagatgggtgggtcgctgaagcacttgaacacttagatggagaaaccactcataaatgagcggttttttctttacgcttcatcagcagtgcaggcaaatgaggcgggcatagattgctctggcttaattaaatggcattaggctgttcatggtaatgaagttagggtattgcgagaatgtggtcagccagtttgcaaggttgatgcagcgaatttttagaatttgacattaacgtggcaattttgggttcacgatacgatctttagcattttgaggagatgcacgctgccttagagcttagtgtaagggaatcatgggttgatgcagggcgctaattgtcgttgtggcaaatggaaaacggaatgccccacagtcgttcgcaagtgtcatcaaacgttttagtgaacttttaacacgtcctcccaccaattgttcgcaaaatatgcgaatttttatgcattttaattgctaacgttcgttgtttttcggaattggaatttattttgatttatgtcaattttttgttgactagttcgcgcaagtgctggtatgatacttgttgttgtcaaaacaaagacgtcgttccttgacggatgaactgatgagataaagttgatgaatcagcaggatgtgcatcattttcaataaattgaataaatattcaatttaaaaagttgttgacatgatatgctgatcatgataatctatcaaagttgtcttttgacaaagtagtcctttgaaaactgaacaaagtttcgtttaaatgtgcagggtccttgatacttcggtatcgaggcaaaaagtaacatttgcgaagtcaattcgctagaacaacaaatcgagctattcgaacagctcatatttatatgagagtttgatcctggctcaggatgaacgctggcggcgtgcctaatacatgcaagtcgaacgagttctgattattgaaaggtgcttgcatcttgatttaattttgaacgagtggcggacgggtgagtaacacgtgggtaacctgcccttaagtgggggataacatttggaaacagatgctaataccgcataaatccaagaaccgcatggttcttggctgaaagatggcgcaagctatcgcttttggatggacccgcggcgtattagctagttggtgaggtaacggctcaccaaggcaatgatacgtagccgaactgagaggttgatcggccacattgggactgagacacggcccaaactcctacgggaggcagcagtagggaatcttccacaatggacgcaagtctgatggagcaacgccgcgtgagtgaagaaggctttcgggtcgtaaaactctgttgttggagaagaatggtcggcagagtaactgttgtcggcgtgacggtatccaaccagaaagccacggctaactacgtgccagcagccgcggtaatacgtaggtggcaagcgttatccggatttattgggcgtaaagcgagcgcaggcggttttttaagtctgatgtgaaagccctcggcttaaccgaggaagtgcatcggaaactgggaaacttgagtgcagaagaggacagtggaactccatgtgtagcggtgaaatgcgtagatatatggaagaacaccagtggcgaaggcggctgtctggtctgtaactgacgctgaggctcgaaagcatgggtagcgaacaggattagataccctggtagtccatgccgtaaacgatgaatgctaggtgttggagggtttccgcccttcagtgccgcagctaacgcattaagcattccgcctggggagtacgaccgcaaggttgaaactcaaaggaattgacgggggcccgcacaagcggtggagcatgtggtttaattcgaagcaacgcgaagaaccttaccaggtcttgacatcttttgatcacctgagagatcaggtttccccttcgggggcaaaatgacaggtggtgcatggttgtcgtcagctcgtgtcgtgagatgttgggttaagtcccgcaacgagcgcaacccttatgactagttgccagcatttagttgggcactctagtaagactgccggtgacaaaccggaggaaggtggggatgacgtcaaatcatcatgccccttatgacctgggctacacacgtgctacaatggatggtacaacgagttgcgagaccgcgaggtcaagctaatctcttaaagccattctcagttcggactgtaggctgcaactcgcctacacgaagtcggaatcgctagtaatcgcggatcagcacgccgcggtgaatacgttcccgggccttgtacacaccgcccgtcacaccatgagagtttgtaacacccgaagccggtggcgtaacccttttagggagcgagccgtctaaggtgggacaaatgattagggtgaagtcgtaacaaggtagccgtaggagaacctgcggctggatcacctcctttctaaggaaacagactgaaagtctgacggaaacctgcacacacgaaactttgtttagttttgaggggattaccctcaagcaccctagcgggtgcgactttgttctttgaaaactggatatcattgttgtaaatgttttaaattgccgagaacacagcgtatttgtatgagtttctaataatagaaattcgcatcgcataaccgctgacgcaagtcagtacaggttaagttacaaagggcgcacggtggatgccttggcactaggagccgatgaaggacggaactaataccgatatgcttcggggagctataagtaagctttgatccggagatttccgaatgggggaacccagtacacatcagtgtattgcctgcaagtgaatacatagcttgttggcggcagacgcggggaactgaaacatctcagtacccgcaggaagagaaagaaaactcgattcccatagtagcggcgagcgaagcgggaagagcccaaaccgagaagcttgcttctcggggttgtaggactggacattggagttaccaaagttcgacgtagtcgaagtcagctggaaagctgcgccatagaaggtgaaagccctgtaaacgaaacggcggactctccgtccaggatcctgagtacggcggaacacgtgaaattccgtcggaatccgggaggaccatctcccaaggctaaatactccctagtgaccgatagtgaaccagtaccgtgagggaaaggtgaaaagcaccccggaaggggagtgaaacagttcctgaaaccgtgtgcctacaattagtcaaagcccgttaacgggtaatggcgtgccttttgtagaatgaaccggcgagttacgtttgcctgcgaggttaagatgaaaagtcggagccggagcgaaagcgagtctgaacagggcgcttcagtaggtagatgtagacccgaaaccaagtgacctacccatgaccaggttgaaggtgtggtgaaacacactggaggaccgaacccatgtatgttgaaaaatgctgggatgagttgtgggtagcggtgaaattccaaacgaacttggagatagctggttctctccgaaatagctttagggttagcctcggaggatggatcatggaggtagagcactgtttgaactaggggcccgtcaagggttactgaattcagataaactccgaataccattgatcttactccgggagtcagacagtgagcgataaggtccattgtcgaaaggggaacagcccagatcaccagttaaggtccctaaatttatgctaagtggaaaaggatgtggcgttgcacagacaactaggatgttggctcagaagcagccaccatttaaagagtgcgtaatagctcactagtcgagtggcactgcgccgaaaatataccgaggctaagcataataccgaaactgtgggtgcacccgtcagggtgcgcggtaggagagcgttctaagggcgttgaaggtcgatcgtgaggacggctggagcgcttagaagtgagaatgccggcatgagtagcgaaagatcagtgagaatctgatccaccgtatgactaaggtttcctggggaaggctcgtcctcccagggttagtcgggatctaaggcgaggccgcaaggcgtagtcgatgacaagcaggttgagattcctgcactagtttattttgtttaagcgatggagggacgcaggaggctaaggaaagcgcacggctggaaaagtgcgtccaagcagtaagtccggtagcgagtgaaatgcttgccgccttaaggacaagctgtgatggggagcgaaattaaagtagcgaagttcctgatgtcacactgccaagaaaagcttctagtgagaaataaactacccgtaccgcaaaccgacacaggtagtcgaggagagtatcctcaggtgagcgagcgaactctcgttaaggaactcggcaaaatgaccccgtaacttcggaagaaggggtgctgaccgcaaggtcagccgcagtgaataggcccaaacaactgtttatcaaaaacacaggtctctgctaaatcgtaagatgatgtataggggctgacgcctgcccggtgctggaaggttaagaggatgagttagcgcaagcgaagcccagaattgaagccccagtaaacggcggccgtaactataacggtcctaaggtagcgaaattccttgtcgggtaagttccgacccgcacgaaaggcgtaatgatttgggcactgtctcaacgagagactcggtgaaattatagtacccgtgaagatgcgggttacccgcgacaggacggaaagaccccatggagctttactgtagcttgatattgagtgttggtaccgcttgtacaggataggtaggagccgtagagatcggaacgctagtttcgatggaggcattggtgggatactaccctagctgtatgaacactctaacccgcgtcactgatcgtggcgggagacagtgtcaggtaggcagtttgactggggcggtcgcctcctaaaatgtaacggaggcgcccaaaggttccctcagaatggttggaaatcattcgcagagtgtaaaggtagaagggagcttgactgcgagactgacaagtcgagcagggacgaaagtcgggcttagtgatccggtggttccgtatggaagggccatcgctcaacggataaaagctaccctggggataacaggcttatctcccccaagagtccacatcgacggggaggtttggcacctcgatgtcggctcatcgcatcctggggctgtagtcggtcccaagggttgggctgttcgcccattaaagcggtacgcgagctgggttcagaacgtcgtgagacagttcggtccctatccgtcgcgggcgcaggaaatttgagaggagctgtccttagtacgagaggaccgggatggacgttccgctggtgtaccagttgtgccgccaggcgcatcgctgggtagctatgaacggaagggataaacgctgaaagcatctaagtgtgaagcccccctcgagatgagatttcccattcctatatggaagtaagacccctgaaagatgatcaggtagataggctggaagtggaagtgcagcgatgcatggagcggaccagtactaatcggtcgaggacttaaccaagtaaagcgccaactggcgctaagccagcgcgcgtttcgatgaaatacgttaagttccggcaaaaacaacaacaatgatagccagttttgagagcgcaaagttctcataagtgtggtggcgatagcaagaaggatacacctgttcccatgccgaacacagaagttaagcttcttcacgccgagagtagttggtgggaaactgcctgcgagggtaggaagctgccacgcttacatatggaggattagctcagttgggagagcgtctgccttacaagcagagggtcacaggttcgagccctgtatcctccattgagccgttagctcagttggtagagcaactgacttttaatcagtgggtcgacagttcgagcctgtcacggctcagagaattattggttttaattgacggctcaagtcgatatttttgccgacttagctcagttggtagagcatctgtcttgtaaacagggggtcgaaggttcgaatcctttagtcggcatggcaccaataatttgataagcattttgtttcatgcggaagtagttcagtggtagaacatcaccttgccatggtgggggtcgcgggttcgaatcccgtcttccgctttccaagcacagtgccgagggtgtgcttggtcgaaaagttcctcggcattatcatgatttgcacccatagcgcaactggatagagtgtctgactacgaatcagaaggttgtaggttcgactcctactgggtgcatttaacgggaaatagctcagcttggtagagcacctggtttgggaccagggggtcgcaggttcgaatcctgttttcccgattggacgcttagtccatatgtttttctcgcggtgtagctcagctggctagagcgtccggttcatacccgggaggtcgagggttcgatcccccccgccgcgattgagcttggacctttagctcagttggttagagcaggcggctcataaccgcccggtcgtaggttcgagccctacaaggtccatctttacaggcgggccactgttcggtataatcagtttgttactgttatcgcgggatggagcagttcggtagctcgtcgggctcataacccgaaggtcgcaggttcaaatcctgctcccgcaattaatatggttccatggtctagttggttaggacgcctgcctgtcacgcaggagatcacgggttcgagtcccgttgggaccgtttgcggctcggtagctcagtcggtagagcaatgcattgaagctgcatgtgtcggcagttcgattctgtcccgcgccatattcataatcatccttatgcgggtgtagtttagtggtaaaaccacagccttccaagctgttgtcgcgagttcgattctcgtcacccgctgcggttatgatattgggcctatagctcagttggttagagcgcacgcttgataagcgtgaggtcggtggttcaagtccacctaggcccattgcaccacttaattttatatacacatggagaagtactcaagtggctgaagaggcgcccctgctaagggtgtagaccgggaaactggtgcgagggttcaaatccctccttctccgttgtggcccgttggtcaagtggttaagacaccgccctttcacggcggtaacatgggttcaaatcccgtacgggtcatggttaaatggagaattacccaagtctggctgaagggaacggtcttgaaaaccgtcaggtggatgtcaatccacgcgagggttcgaatccctcattctcctttataattatcgcgggatggagcagttcggtagctcgtcgggctcataacccgaaggtcgcaggttcaaatcctgctcccgcaattaatatggttccatggtctagttggttaggacgcctgcctgtcacgcaggagatcacgggttcgagtcccgttgggaccgtccctctcgatttgagaggaacaaattctataaaaagattcaaatggctcggtagctcagtcggtagagcaatgcattgaagctgcatgtgtcggcggttcgattccgtcccgcgccattatggaggagtagcgaagaggctaaacgcggcggactgtaaatccgctccttcgggttcataggttcgaatcctatctcctccattcatagggatatagtttaatggtagaactacggtctccaaaaccgtcagtgtgggttcaactcctactatccctgctttataatggcggtattggtgaagcggttaacacaccggtttgtggcaccggcatacgtgggttcgatccccacataccgcccttttattggggtatagccaagcggtaaggcaacggactttgactccgtcatgcgctggttcgaatccagctaccccaatttctccaactgccataggagaaatgcactcaacttgatgaatatggcggtgtagccaagcggtaaggcatgggtctgcaaaaccttgatcgtcggttcgattccgatcaccgccttatcttgcggctaaaccccagcaagacagagtgttagctatcattattatgccggtgtggcggaattggcagacgcgcgggattcaaaatcccgttccagcgatggagtatcggttcgaccccgatcaccggtagcacggccccctagaggggcttttttagtgctcagaaatggctttaaattgggattcttgttttttctgggcgcttaaaaatccctgaaaaaagatgcttttaccgaccacttttgctttttgggggtattttgctaaaagtggtcggttagctcgtaattccaaatgacgctactcctcgtgtgtcaaggtattgagagccttttgttggtcggcaaagtggtcgctggctatcacaaaactttaacggttttcgccgcttgtcttggagccaacttgtctatcagaggtttgtggatttttaaagtgatttcgatgttctcatgtctcgagcgccgaaacatgaattaaatagccatacccttaacaggcaaatactactgcgagtgtggcgaagggtatggaacttaggccaagcatgtctaaacgcatacttgcacgacggatttcgcagttacggcatcaccgttaactgcttcctcgtataaacaactggcgagtggcccaagaaagatagatgggagtcgctttcgcttaatttgtcagacgagatagattgggagcctttgtatcaaggacgaatcttccttaattgtatgcggtgataccaacagatggcgttgagagagaactaaatctggcttgcgtttccttagcactcaagtacaacagatcgattgcaatgcttacagcgaaaattcaagcaaaaaaattgtcccatgattgccgtgtccaaggcaatcatgggacaatcttgaactggcctaagaagctcacagcttgggattaatcttcccgtgtaaacttaataatctttgctcgtgagcgttctaaagcacgacggaaacgattgcttgtgggcgtatcaaacggatgcaagactgccgtctcaaacgcctcatattccaggggtgacaggttttctagaagctgaaaaaattcaacacgcatgagcaatccgtcttcgactgaacgtattgctagccgttcctgcaaagattcgagcgcactcgctttgaatggaatagcggtagcatcaatccgacgcttatgggcaaagtgtctgcgcaagattgaacgtaagtgggactgtaacaccattcgataatacggcccaaattgcgagccactgctgccgtcataacgcgcaacagcttttatcatggcaattctggcctcttgcaaccaatcctcataggaaaattctctgaggttgtagggttttaaaacctttaaaaccagagggcggtattgttcgaatagtttacgggaagcttctgaatcgttcacagcttctcttatcaagctcagttcttcttttttcatatatcctcctcccctgatctactagcaagatcattctacaataaaacgtttacaattgaatagggaacaattgttcaggtataactttttataccagggcatgtataagaaatcgcaaagaatcagcttttctggggcacaaaattattaacattattttcttattttttcaattagaatcaaagaatgcgtcctgatcaagttgaatgactgattagcgcgtggacatcgtgatccggtttaattggcacgtttggctaaaattggtatggtaaatagcctttatatgatgcgactgtctgtactttaatattgggctgaatggtacctgtggaaataaagtttaaaaagctgcccgatgcgtaaggaagagcttttgcgcttgatttaacgaggtgagttattttacatactccgtaatctgcggtaacctaattaggtcattttataaggaggtttccaactatttcttcaaaaacaaaagacaacaaaattggtctatttcagctagtcatgttggcacttggttcgttaattggatcgggctggttgtttggatcgtgggaagcggcagaagtcgccggaccagcggcaattttttcttgggtcattggcggcgtcattatcggtgtcattgcctataattacgtggagttaggtacgatgtttccggaatcaggcggaatgagtaaatttgcgcagtattcgcatggctcattggttggctttatagcatcatgggctaactggatttctttggtgacattattgccaattgaagcagttgccgcagttcagtatatggcatcgtggccatggaagtgggctggttttacccacggctttttacatgcagggaggattaccccacaaggactgttagtggtctttgcgtttatcatcatttttacgttgcttaattactggtcagtgacgttgctgacgcgctttaccagttttatttccatttttaaaattggggtaccgttgttgacgatcgttttgctggccttgtcgagttttcaccccgaaaattatgggcattcgttggcaaccttgatgccttatggtagtgcaccgatttttgcggcgacttcggtttcagggattatcttttcttttaacgctttccagactgttattaacatgggaagcgatgtgaaacgcccgcaaaagaatattggtcgcggcatcgggatttctttgcttattagcggaattatttatattctgttgcaaagtgtctttatcacgaccatttctcctgatatgcttgctgcccatggatggaaaggcctgaacctcaactcgccgtttgcggatttggcaattttgcttggtattcactggctgtcggttttgctgtatatggatgcgtttgtttcgccatttgggactggcgtttcgtttgtcgcttcgtccggtcgtgcgcttcaggcgatggtgggcaacaatcacattcctaagtttatcggtaaaattgacgaaaagtacggaactccgcgtgtcgcgatggtggtcaatgctgtcttaagtatgattatggtctctatttttccatcgtgggggacgcttgccagtgttatttcaacggctacgttaattgcttatctgacaggaccggtcacggtgatctctttgcgtgaaatggcgcctaatttcaagcgtccggtcaaatcagcgatgttgcgagtaatggcaccgttggcatttgtgttgacatcattagcggcttactgggcaaaatggccaaccaccgttgaagtcattggggttatctttttagggattccgttgtatctgttttatgaatggcgatcaggttggcgcagtacgtggcagcagttaaaagcctcggcgtggatgcttggttacctggtctttctctcggtaatttcgctgattggcagtgctgagtttaatgggttgaactggatccattatccaatggactttgtcgtcattatacttggcgcggtggtcttctatttttgggggatcaacagtcatatcatatcgaagtacttccgtaaggccgcgcgtgttaacgataaagttaaaatgcctgcagcggaagacatcgagcgtgacaagtaaccccaaaagtgaagatgttaatatgtattcataaatgaattaatagatatttcttcaaaaaagataggttgtaaatgactgattgtcgggatgtttcgcaagcggctgcttaaaaatttacgacttttgccggatgatgttcatctgatggcaaggtaagataattttaagggtttgtgagaaaattgcatttagtcatgcctatctttatacttatactaaacaaatgacgtctggaggggatcaggtgaatatcgggatttttacagacagctattttccgcaagtcagtggtgtcgcgacgtccatcaagaccttgaaggacgatctagaacgtaagggtcatcaggtttatattttcacgacaaccgacccacatgtgccagatgatgcggtcgaaccgaacttgttccgatttacaagtgtgccgtttgtttcttttactgatcggcgcattgcggttcgggggctgtttcacgcttatgcagtggctaaggaattaaatctggatattgtgcatacacaaactgagttctcaatgggttacattggtaagtttgtggccaaacaactgaaaattccaacgatccatacttatcacactatgtatgaggattatctgcattatgtcttaaacggtcatctgctaaagccgtaccatgtcaagcaatttacccgcgcttttctgtatcacgtaagcggtgtgattgcgccgtctgagcgggtgtatgatacgttgcggcgttatggcgttaagaccgacattaagattattccaaccggagtcgatttaacgcaattcgcagagcaaaaggacccgcacttacgggaaaagctgggactggcagatgtgccggtattggtttcgcttagtcgcgttgcttatgaaaagcgaattgataaattaatcagcgccatgcccgcaattttggcgcaaattcctaaagcagttctcctaattgtcggtgatggccctgcacgtgaagatctagaggcacaggctgctgaattagggattgccgatcatgtccggtttaccggtgaaattgaccatgatgatgtaggcgactattatcgtgtcggcgatgtttttgtgtcggctagtgattcagagtcacagggactgacttatattgaggcaatggccgctgatcggaaagttgttgcccttgctggtgattatactgatcaactgttggatgatccggcgttgggaacaacttttacgactgaagcagaaatggttcatcaagttgtgaattatctgaagcatcctaatgcctatgatgatcccaaaccgcgaactgaaaagctggtggcaatttctgctgatcggtttggcgatcgggtacttgatttctatcgcgatgttatcagtcactattccccgaatgaagctgatgaaactgtgccatggaccgatgaaagtagtagcaaacggaccatgaaaggttaactatgatcgttattaacatgttttcttcagccaataaggttgctgggcaaggcgtgggtgcagtttacacagaactgatgggactgttgaaacacgattttgccaatgaatttcaaattaatgtcaatcgttatacgcgcagtgatattagtcattatcatacaatcgatcctaagttttatttatcgacgttctccaaaaaaagaggccgcaaaatcggcttcgttcattttgtgcctagtactttagatgcgagtttaaagttgccgcgagtggcgcggtggacactagaccgctatacgttagctttttacaaacgtatggatgaacttgttgtcgtgaatccaaacttcattcctaagcttgaggcctatgggattaatccggacaaggtaacgtacattccaaatttcgtttctcaacgtacgtttcatccggtttcccgggaaaaaaggcaggcgttacgacatgcgaatggttttaagccggatgattttgtcgtttttggcgccgggcaagtgcaagatcgcaaaggcgtcggtgatttcatcaaactcgcgcaacaaaaccctgactaccgctttgtctgggcgggcggcttttcttttggccgcattacagaaggttatgagcggctcaaaaaggcagttgcaaatgcgcctgccaacctgaactttaccggtattatgccgcgagaaacgatgatcgactactataacatggcagacttgttccttctgccatcttttgaagagttgtttccaatgtcggttttagaagcatttgcaacggatacgccggtaatggtgcgtgatcttgaattgtatcagcaaatcatcacgccttatgcaattacggcggcggatgtggcagacatgcaggcacgaattcgagcattagccgatgatcgcgagcttttggcaacatatgcggccaagagccgtgaagcggcgcaggtgtacgatgaagctcggcttgaaaaagtctggcatgatttttacgtgcaacaagcagcgttgggtaaacactagccgaggagttatatgacacggaagaacaaactggccgtcttcatcatggttctgattggcgccggcatttttatttatgaagcacgtgatcttaatggcgcaaaactgatccatgaacttttatcgcttgatcttaagtggctgttagtggcttttttactgatgtttggttcatggatcgttgaaaccttcgttgtgcagatttttattaaaaacggatcggacgaattagactttaagacagcgttgcgggttccgcttgtcgagcaactattcaacgcaattacgcccatggcatctggcggtcaaccggctcagctgtttgcgctcatgcaaagtggggtggaggctggtcgcgcgagttcggtactgttgatgaagtttgttgtgtatcagtttatggtgctgattaactttgtactcactttacttatcggctttgatcaagtgtctcggcattttggggcccttgtgattttcatcatctttggctttgttatccacgtgattgtgattgtcggcttgctcatggtgatgtactactacaaattcaccaagaagctcgtcagaatcatcatgataccagtcggctggttcgtgaagccggaaaagaagatggcgatgcagcttgatctggatcacaaaatcgatactttttacgccgaaagcctgcacttgaagcgcgaaaaagttcgtgtgattaaggcgtgctttttgacgttaattcagttgctgctttactatgcggttccgtattttgtgctattggcactgggtgtgaatcacgttagcattgttgaagtgattgtgttacacgtgatgattgtgatgattgtcagtctgtttccaattccgggtggagctggcggtgcagagtatagttttaaaaccctgtttgcgacgtatgtggcctcaccatctaagttagtgcttggcatgttgttatggcgctttttaacttattatctaggaatgatctgcggcattgttgcaatggcattacctccaaaaaaagacgcgtaaacgcccttcagccagtcagcttggttcaaggttttctggcggatggatggcaagctgaaattaaattaaatgggatcccggagacagttacttatgtcttcaggatcccatttttaattgatgatgattcaaaacgcgtgcggattctttccgtttacgcttgattagccgatgtggctggccatgaacgcgcgcaatcgcttaacggcttcttgaagatcggtcattgatgccgcgtaactgattcggatataaccttcgccgccggggccaaaagcggtacctgaaatcagagctaacttctgttcatgtgccaaggcgtgcgtaaattcgcgtgagcttagatgcagttgggtcggaatttttgcaaaaagataaaaggcaccatcaggacgagccacgctaaagcccatgtcgatgagggcggcataaacaaaatcacggcgtttaacgtaagctgctttcatcacctgagcatcgtctgcaccgttcgtcagagcttcaataccagcgcgctgggcaatggtcgttgcggcagtcacaagatattggtgcacctttttggcttgcgcgattaactgctggggacccatcaaaaagccaattcgccagccggtcattgcatgtgatttagacagaccgttgacaataaatgtacgatcgtaggcaaattgtcccatggatacatgcggctcaccataagtcagttcagaataaatttcgtcacagataatgtagaggttatgtttagcggcgatgtccgcaatggcctttacttctgccgcccgatacgtgacaccggtgggattgcttggatagttaaggataatgcctttgattttagcatcaggatttgcagtgatggtggcctcaatgagttctggggtcaaaacaaagtcggttttactcgtatccatataaagcggcgtaacgtgattcagcgtcagaagcgaaatgtagcccggataaattggtgacggaaccagcatagcatcacccggatcactgatcgtcgtaatagcggttgccagtgcttcagtggccccgactgtcaccagaatttcatctgtagcctgatagtcagtgccatatttcgttttaaaaaaatgttgtgcggcttcgcgtaactccggatcaccaaccatcccggtataatgcgagtaattttcctgaatggctttgatcccggcttgcttaacatgttccggggtgttgaaatcaggttcgcctagcgtcagtttcaaaataccgggaatatcactgacactttcgtcaaattgtcgaatctcactaacctcgatggcaggtagttgttcgtttaaaggttgcaatgtcatacaaatctccttaataaagtaagcgcgagccaacccgatttctgggcaggagagcgcattatgatgtaaacgcgaaccgatgcggttagaagtcggagttagacggctaccactaaaagattgcctaactgacttttacgccggcaaacgcgttataatagcatgcaaatagcatagtccatttgcctatcgacacgcaacgtcataaaagtagaattcaaagtgatatttctcccacagaggcgacggtttatgctaagctatttcttgaaataggaaaaattaggaggccattttatgaaacaatcacagctcgtggccatcatcaaacgccttgaagccatgcaggcaggcgatggcgaggcacagtcacgccgcttcgaaaaaaatggtgatgaaaagggcctcgtgacgtacgatcccaagaccgaaacttacgaacttgaagaattaggcactcaccagacgttccagtttgataatatcgatcttgcggccatggaaatctatgatctaatggattttgatgaagacgagggcactaacggtactgatagtagcgatcaggctcaagcttgagttctgagtaaagcggacttgcgaaggttcgctttttctgtgtgaatcttttctgatttgatggatcagtagtatgaaatttgactgatgttgagttaaatggcggttgacgcgcaccgccttgctcaaacgcattcaaatgtaggctattgataggctgttgagtagatacctgtatcagtttcaacaagctcgagagaaagactgccacattgcgaatggccgatttgaactgaaaagcgttaggccgtgtttgtcactaaaatgacatcgcggctttttagtaagcgcgagccggcgcggttagagaccgaagtgtaagcggcctcgcgcgtgatggccggtctttggccattgcgcgcgaggtccttacatgcaggtctctgcgccggggagcgcgttaggagataggcggtttacaaaggatcaattttaaaccgttgaaaagatttaaacacttggcaacgagccactaacttgaatgacgtggttttaaggcttctttaagattgcggttgattcgactgtaatcggcattgaaagtttgtcttttaaggaatgagcggttatcctagcgaatgtgctatacttttgacattaaacaatgacttggaggctccacatgaaccagatcggcgctaaaattcgaggatttttcaataccagactcggttttctggtacttgccattgtcttattctgggcaaaaacttattgggcatatcaagctaaattcaacttaggggtcactggtagctttcagcatttaattctggcagttaatccgattccgacaacgctttttctttttgggattgctttatatatgtcgggacgtaaatcgtatgtcacgatgctgattatcgatgccctgacgtcggtttggctttttgctaatgtactttattatcgggaattttccgactttctgacttttgctttaatcaaaggatcaggtgcggtttccaataacttgaacaagggaattatggggatcgttcagccgacagactttcttgtgtttgtcgatgttctatttttgattttactgttagctttcaaggttattcggatggatatccgcccgatcaaaaagcggtttgcactgggagtttcgctgctggcagtgttaatgtttggggcgaatctggctatggcttatagcgatcgttccggactgttgacgcgcacgtttgacaataactacattgtgaaatatctgggtctcaatgcctatactgttgttgacggggtcaaaactgccagcaatagtgcaacgaaggcaaacgctgattcgagtgatgtcaaatccgtactgaattatctcaataagaatcgtgttaccccgaacgcagaatataccggtgtggcaaaaggtaagaatgtttttgtcatccacttggaaagcctgcagcaatttatgattgacttcaaatgggatggacaggaagtcactccgaatctcaataagctctatcatgaatcagacacactatcttttgacaacttctttaaccaagttggtcaagggaaaacggctgatgcggaaatgatgatggaaaattcattgtttgggttgcctgaaggggcggccatggtaactgacgggacgacgaacactttccaggcggcaccagcaatcttagatcagcagggttacacaaccgcttcgttccatggggatgtaccaagtttctggaaccgtgataacacctataagtcttggggatacgactatttcttttctaagagttacttctcaagtgggaaaaattatgatgtcggctatgggttgaaggacaagattttcctgaaagattcagcgcagtacatcgaacaactgccgcagccattttatgccaaaatgattacggtcacgaatcactatccttacacactggacaaggaaaatcagaccatcagtaagaccgacactggcgatgataccgttgatggttatgtccagacagcccgttatctcgatgaagcaattggtgaattctttgactggctgaaggaaaccggactgtacgataagtcaatgattgttctctacggtgatcattatgggatttcaaacaaccataaaaaagccatggccaagttaaccaacattaccggttttaatgactatgacaatgccatgtatcaacgcgtaccatttatgattcacatgccaggactaaaaggcggcattaatcacacatatggcggtgaaattgatgccttgccgacaatattgaacctgttaggcgttaaggacaatgatacggttcagtttggttcagatttgctctccgctaatcatccgcaaacagttgcgttcagaaatggtgatttcgtcacacctgatttcactaaggtaggcagtcaatactttaataccagcacagggaagaaaatcaccaagctatccccaagccaaaagaaaacggttgacgctgccactaaccgtgtgacaacggaactgtccttatctgatcgcgtcatcaatggtgatctgctgagattctacacgccgagcggatttaagaaggtcgatcgtagcgatttttcgtataagctgaccgatacgaaaaagaagctcaaagccgcccagaagaaaggtacaagcttgaaagcagaaaataagggtaaatcggtggcaaatgaatataagaccgatgcgccagagcttaaaagcgatgatgacgaaagtagtagcgaatccaaataagcgactaaaccttttcgacagtgtctttttaggcactgtttttttggactgatatgaagctaaatttaagcgataattggtaacacatgcatttagtgtacttttgaattttgaaattttctaaacatttgtaagtgaaaaggttgtgctaaattagaaaaaagcgtacaattttactagatgataatagttacaaattaggaggctgacgatgaatcaggcagtttataacaaaacaattaacttgctcaaagcaaagcagattcgggtcaccccgcagcgcgaggcgatcatttcctatatgatcgacagtacggcacacccgacagctgaaatgatttatgcaaaactatcgccacagtttccacatatgagtgtcgcaaccgtatacaacaatttacgtctactggtggatcttaatttagttgaggaaatgtcgtctaatgatgcggcgactcattttgatttcccgattgagccacactaccatgcgatttgtaccaactgcggtaagatttttgacttcacttacccaggggtcacggatgtggaggcagtggcagctaaaaaaaccggtttcaaagtcagtggacatcatctcgaggtttacggtatttgtcccgagtgtcagattaaactgggtatgaaataagcctacgttactgttcggatggccacgctttaaaatgagattttatttagacacagctatcaagcataagtgatggctgtttttatttggcgatagacgctgcaaaggataagtcaccgtaatatctaacgtgcaatgatcctgtgctttgagcaacgtcaatcaagcaagacttttttgaaaaaatgcttgcgcctcaaccggcttgctggtattatattattgctgtcaaaaagcagatccctttttggggtaaagataaaaatagtcatgaataaaacatatgaagcgtttttaacaaaaaatgttgacatgatatgctgatcatgataatctatcaaagttgtcttttgacaaagtagtcctttgaaaactgaacaaagtttcgtttaaatgtgcagggtccttgatacttcggtatcgaggcaaaaagtaacatttgcgaagtcaattcgctagaacaacaaatcgagctattcgaacagctcatatttatatgagagtttgatcctggctcaggatgaacgctggcggcgtgcctaatacatgcaagtcgaacgagttctgattattgaaaggtgcttgcatcttgatttaattttgaacgagtggcggacgggtgagtaacacgtgggtaacctgcccttaagtgggggataacatttggaaacagatgctaataccgcataaatccaagaaccgcatggttcttggctgaaagatggcgtaagctatcgcttttggatggacccgcggcgtattagctagttggtgaggtaacggctcaccaaggcaatgatacgtagccgaactgagaggttgatcggccacattgggactgagacacggcccaaactcctacgggaggcagcagtagggaatcttccacaatggacgcaagtctgatggagcaacgccgcgtgagtgaagaaggctttcgggtcgtaaaactctgttgttggagaagaatggtcggcagagtaactgttgtcggcgtgacggtatccaaccagaaagccacggctaactacgtgccagcagccgcggtaatacgtaggtggcaagcgttatccggatttattgggcgtaaagcgagcgcaggcggttttttaagtctgatgtgaaagccctcggcttaaccgaggaagtgcatcggaaactgggaaacttgagtgcagaagaggacagtggaactccatgtgtagcggtgaaatgcgtagatatatggaagaacaccagtggcgaaggcggctgtctggtctgtaactgacgctgaggctcgaaagcatgggtagcgaacaggattagataccctggtagtccatgccgtaaacgatgaatgctaggtgttggagggtttccgcccttcagtgccgcagctaacgcattaagcattccgcctggggagtacgaccgcaaggttgaaactcaaaggaattgacgggggcccgcacaagcggtggagcatgtggtttaattcgaagcaacgcgaagaaccttaccaggtcttgacatcttttgatcacctgagagatcaggtttccccttcgggggcaaaatgacaggtggtgcatggttgtcgtcagctcgtgtcgtgagatgttgggttaagtcccgcaacgagcgcaacccttatgactagttgccagcatttagttgggcactctagtaagactgccggtgacaaaccggaggaaggtggggatgacgtcaaatcatcatgccccttatgacctgggctacacacgtgctacaatggatggtacaacgagttgcgagaccgcgaggtcaagctaatctcttaaagccattctcagttcggactgtaggctgcaactcgcctacacgaagtcggaatcgctagtaatcgcggatcagcacgccgcggtgaatacgttcccgggccttgtacacaccgcccgtcacaccatgagagtttgtaacacccgaagccggtggcgtaacccttttagggagcgagccgtctaaggtgggacaaatgattagggtgaagtcgtaacaaggtagccgtaggagaacctgcggctggatcacctcctttctaaggaaacagactgaaagtctgacggaaacctgcacacacgaaactttgtttagttttgaggggattaccctcaagcaccctagcgggtgcgactttgttctttgaaaactggatatcattgttgtaaatgttttaaattgccgagaacacagcgtatttgtatgagtttctaataatagaaattcgcatcgcataaccgctgacgcaagtcagtacaggttaagttacaaagggcgcacggtggatgccttggcactaggagccgatgaaggacggaactaataccgatatgcttcggggagctataagtaagctttgatccggagatttccgaatgggggaacccagtacacatcagtgtattgcctgcaagtgaatacatagcttgttggcggcagacgcggggaactgaaacatctcagtacccgcaggaagagaaagaaaactcgattcccatagtagcggcgagcgaagtgggaagagcccaaaccgagaagcttgcttctcggggttgtaggactggacattggagttaccaaagttcgacgtagtcgaagtcagctggaaagctgcgccatagaaggtgaaagccctgtaaacgaaacggcggactctccgtccaggatcctgagtacggcggaacacgtgaaattccgtcggaatccgggaggaccatctcccaaggctaaatactccctagtgaccgatagtgaaccagtaccgtgagggaaaggtgaaaagcaccccggaaggggagtgaaacagttcctgaaaccgtgtgcctacaattagtcaaagcccgttaacgggtaatggcgtgccttttgtagaatgaaccggcgagttacgtttgcctgcgaggttaagatgaaaagtcggagccggagcgaaagcgagtctgaacagggcgcttcagtaggtagatgtagacccgaaaccaagtgacctacccatgaccaggttgaaggtgtggtgaaacacactggaggaccgaacccatgtatgttgaaaaatgctgggatgagttgtgggtagcggtgaaattccaaacgaacttggagatagctggttctctccgaaatagctttagggttagcctcggaggatggatcatggaggtagagcactgtttgaactaggggcccgtcaagggttactgaattcagataaactccgaataccattgatcttactccgggagtcagacagtgagcgataaggtccattgtcgaaaggggaacagcccagatcaccagttaaggtccctaaatttatgctaagtggaaaaggatgtggcgttgcacagacaactaggatgttggctcagaagcagccaccatttaaagagtgcgtaatagctcactagtcgagtggcactgcgccgaaaatataccggggctaagcataataccgaaactgtgggtgcacccgtcagggtgcgcggtaggagagcgttctaagggcgttgaaggtcgatcgtgaggacggctggagcgcttagaagtgagaatgccggcatgagtagcgaaagatcagtgagaatctgatccaccgtatgactaaggtttcctggggaaggctcgtcctcccagggttagtcgggatctaaggcgaggccgcaaggcgtagtcgatgacaagcaggttgagattcctgcactagtttattttgtttaagcgatggagggacgcaggaggctaaggaaagcgcacggctggaaaagtgcgtccaagcagtaagtccggtagcgagtgaaatgcttgccgccttaaggacaagctgtgatggggagcgaaattaaagtagcgaagttcctgatgtcacactgccaagaaaagcttctagtgagaaataaactacccgtaccgcaaaccgacacaggtagtcgaggagagtatcctcaggtgagcgagcgaactctcgttaaggaactcggcaaaatgaccccgtaacttcggaagaaggggtgctgaccgcaaggtcagccgcagtgaataggcccaaacaactgtttatcaaaaacacaggtctctgctaaatcgtaagatgatgtataggggctgacgcctgcccggtgctggaaggttaagaggatgagttagcgcaagcgaagcccagaattgaagccccagtaaacggcggccgtaactataacggtcctaaggtagcgaaattccttgtcgggtaagttccgacccgcacgaaaggcgtaatgatttgggcactgtctcaacgagagactcggtgaaattatagtacccgtgaagatgcgggttacccgcgacaggacggaaagaccccatggagctttactgtagcttgatattgagtgttggtaccgcttgtacaggataggtaggagccgtagagatcggaacgctagtttcgatggaggcattggtgggatactaccctagctgtatgaacactctaacccgcgccactgatcgtggcgggagacagtgtcaggtaggcagtttgactggggcggtcgcctcctaaaatgtaacggaggcgcccaaaggttccctcagaatggttggaaatcattcgcagagtgtaaaggtagaagggagcttgactgcgagactgacaagtcgagcagggacgaaagtcgggcttagtgatccggtggttccgtatggaagggccatcgctcaacggataaaagctaccctggggataacaggcttatctcccccaagagtccacatcgacggggaggtttggcacctcgatgtcggctcatcgcatcctggggctgtagtcggtcccaagggttgggctgttcgcccattaaagcggtacgcgagctgggttcagaacgtcgtgagacagttcggtccctatccgtcgcgggcgcaggaaatttgagaggagctgtccttagtacgagaggaccgggatggacgttccgctggtgtaccagttgtgccgccaggcgcatcgctgggtagctatgaacggaagggataaacgctgaaagcatctaagtgtgaagcccccctcgagatgagatttcccattcctatatggaagtaagacccctgaaagatgatcaggtagataggctggaagtggaagtgcagcgatgcatggagcggaccagtactaatcggtcgaggacttaaccaagtaagagcgcgagcagtcgcgattagaaaccggagcataagcgggcctgagcgtgatggccggtctttggccattgcggtcagggtccttatgcggaggtttctgcgactgggagcgcgtttcgatgaacaaatacgcgtcatcggcaaaaccaacaacaatgatagccagttttgagagcgcaaagttctcataagtgtggtggcgatagcaagaaggatacacctgttcccatgccgaacacagaagttaagcttcttcacgccgagagtagttggtgggaaactgcctgcgagggtaggaagctgccacgctgtttattccggtttagctcagttggtagagcacctgactgttaatcaggttgtcgtcagttcgagcctgacaaccggagttttttatggagagttgtccgagaggctgaaggagcatggttggaaaccatgtatacgggttttgcctgtatcaagggttcgaatcccttactctccgtttttatgcttctagatgctttctatagcttcccgtaatgctggtataaaggcattccgggatttttgtttccttttattttcggttgtttttttactccggtgcacaaaatgtgcacaagctaaagtctcgaaagtgcttgtagtgtctgggatacctgctcttttctttgatcttcaagaagatgagcgtagactttttgagtgatcattgtattggtatgcccaagtctttttgaaatatagttaatgtcaacgtgattggcaatcaaataggaaacgtgagtgtgtctaagcccatggaaagtaatcgcgggggaaatgtcgagagtcttctcgatcgtccttagatccttattaattgccgtgctcgatagcatgttatgccgtatgctacgaaataatagttgtttgctatcacgatatccctgagcaaggtagacctcttgctgttctttcttgagacgtaaaagcaagtctgcaagttctctcgtgatgtcgatgtcacgtacacttgatttgttcttagtagcagcaaagccgctgccatatctgtgatcccacgttcttgtaatgtgcacaacgcgctttttaagatcaacacgatcccacgtgatcccaagaacttcagaatacctagctccggtcagtgccccggttgcgatgatgtagtaagcaatatgctcgtagtctgcaaattctaggcagtaattgacgagcttgcgtaaatcctttacttgcaaatatttgatgattcctgcttggccttcattaccagtgaggacaacgttatgagtgaagttagtatatattatttggtcatcgacggcagaatcagccattgagcgaacatagccattcaatttgctgactgtatctttagccctttttttgccaaactcattgataaatgcctgccagtctgattttgaaattgattttagttcacggctttcaccccaataggctaataactgtttacgaattgttttataccgggcttcggtgatacgagaatgcttaccagatttgtatagctcaatccatttgtcccagtagtcgattaacgttatcttgttaagatccaaatttgcaccgcgattatgctgacgttcgacttcgattgccgctatatcagcagctttttttgaggggaagccacccttgttgacatacttgcgtgttccatcattatccttgtaagagacacgatattgccattttttgccacgtttactaatactggccacatttacacctccttgtgctacaatacaaacgggtgctattgcacccaccacacattcacgttcttttaggcgtctacccattcactttagccagtggggtaggcgttttttattttttatcaagccccactctccggcttgcacggggacgccgctggcgtggggaaagggactaatcaccatagtcgtcgggagcggttccggcgtcatcaatcttcttggccaaagccaatggaactgtgattttgccacccatggtagatttgtaagtggtggtacccaagctttcagcatagaaggtgatcttgtcattttctagaatgcgagagccgttcataatatctggatcataaccgaccataattacattgtcataattaccatcaactgcaacacgcaaatcagtttcatcgtcaccctcaacaacttgaataacttcgcctgttaaagtgatgttcttgcccttgtagtcgtctggagtccgtgccaactgttcataagtgatcccagtgttgtagtcagctgcgttgaatgtttctgtgcttgatgattcttcatcatcagagtcatcgctatcagtgtcttcgtaactgtcatcatcatcttgtgacgactcgacctttgacgattcagcttttgaagacgaactagacgcagctgacctcttgctttctcccgaataggtgccaatccaaaaaaagattgcaacaaatgctatcgccgacaacgcggtaataataaggttccgttttagttttctcgaatcctttcgttgaactatagacaatgtgccaaatattgcagccaataggagcgatcccaaaaaggcaattaagataagtagtttcattattcccctccaaaaaattcagcttttaacgtcgatcagggtttggacgtaagattatttaaatgcgtatgatccgacgactttaccaatcacttcaatattgtctgtgtcgtcagcgtagaagtccgggtagatacgttcgccagtttcttcatctacgtcatcattcaatgaccgaaggcagagacggttctcttcaaaaataagtttcttgatgaatgtcatatcatcaatgtcaactacagcgatcataccgttagtaacatcttgtgttttctgaacaaagacaaattcgccatcctcgtagtagggagacatactgtcaccgacaactttaaagcagtaatcgtagtgagacggaatagcactatctggaatcttaactgtgtccattggttcattacgatcatcattaaaggcaccatatccagcggccacaataccatcaacctcaacattgaactctggttcatcgagattacgttctacacgcgcttcatctaagctgacaacgttgtctggattttgctgttcattgagctgcttttccgcgtacgtgtatactttttgctgacgttcagggtggagttgaaccaccgtgtcatgaatcttatccacaacggtgtctggaatttcatcatctggatcaataatatccatcggacttatttttaacactttcgccaaagcagcgattttgtcacgtcccatgttcccaattgacccagtttcccactttcttacggttgatttgccgacaccgactttgttaccaacttcttcaagcgtaagtcctaggcttattcttctatctcttaatgagattgacataaacgttgcctcctatctatggatacacaatatcacaaatgtgtcttaaaatacacataaataatggagaaagaaaaaaagtttctttttagacacttttgtgttgacaccagcaccttttgatgttttaataaaagtgtcctaaaggaaacgaggtgattacatgaataaggatcagcttcttggcactatcaagtcaaaagggctaacggtaacagcagtacttaaaaaagtaaatgatgatggcattaatttagcaccatcaactttttacaaggggctgcgagatgaacgccccttcaagacaaatgaaattaaagctttagcaaaagtaattccgctaacacgatcagaaacaatggatattttttttacaatcgaagtgtcctaaaagacacgcaaaggaggcatcgtgatgaacgaattaaaagtgattggccgtgagcatatcggccgcattgaattcaccggtatcgaaggcgggttcggcaaagacaaaaaggcgatgttggttaaggacatcgcgttgattcacagcactacaatcaagcgaattaacgagcttatcaatcggagtcgtaaacgttttaaagatggtattgatgttatcgacctgaagtcaccagattttaaggtcgttctgaacgaccttaactttggaagcaaagaaatcagcaatgctaacaacatctatcttctatccgaacgcgggtactccaagctgctgaagatccttgaagatgacaaagcttgggaagtatatgaccaacttgtcgacggttacttcaccatgagggcagaagccaaggtaactaaaccgcgtatcgattccgacaagcggcttgaaattatgagcgaaaatgcgcaaacacgcaagggaacattgctttaccggattgcaatgcaaacaaaatcagagtcggctaaacaggcgttgcttgcgaaagcggctgaatcaatcactggcgagatgactattccggtactactgaaaaaggaatacagcgccggtgaggtagccaaaaaggtgcatgcatcatctggacaaatggttggccgcattgccaatcggctaggaattaaagccgagcagccagggcaaaacgaatatggccgatgggctaacagcaagtctcaacacagcgacaaagaattccctcaatggatgtacttcgagcagggcgttaaggctattgccgatgagctgaagcgagctaaggggatgacagtatgaacgaacgcaatacaaaaaagcaagcaccttatgaacaagagatgcttgcacaaatagcattgagcttaatcgctagtatgagcgaaatgtcgctcgatcaagaagaagcagctctgaaaaccgctttgtcactaattgggcgttagaatccaaactctcctgattctatcactagataacttgattatctgacaaggagagatcacaggaaaggaggaaatgccatgccactgttgcaggttgttgaagatgatcagatttcaagcaaaaagtatttagcggttgatgaagaagaactggcaaagatgattgaggagaaccaagagttaaaacgcaagctagcagcacgaggcatgtggacgctcaccaccgcaacaagctatgtcgaaggacataacaacacgtgggtagttaacaatatcttgaacgtcccacgcttccacaagttcttgcaagataccgtggtttcatatccaccgcctggcaaaaaggggtatctgtttcatccgaaaccatggctcgacttcttagataaatggttcccagagatttcaaggtcacttagagagaagggcaaataatgattggttatttactaattgctggcggcttcggcgtgatcgttggtcactgcttaggccacagcggaaattggaggcagtggattgaatgaagcggaacgaaccattggtgatttgctgaaagagcataacagattgacgttagacgtcattcacggcaaccacacaccaattgcaaagatgctacttgccgagaacgagaagctacgtgcacgactagcgaaactaaggggatgacgtgatgactaatgaggaatacgaacgaattctagccgaagcgaaccgccagatcgcggcatatcacaaggttgctaccgactatggccccgacaatactgatttccaccaaacgtatgcgatgggccaagaagatggcgccgacacaatcctattcattatcaaacaagtcatgaaaaaagccgctggcccgcatgccaacgactgatagaaaggaaattcataatgcaaaataacacattgtcacttactgacttcaaagttgattataagccatcggtgctgactctacaacatgcagacgagcttgcggccaatatcaagctatatgccgaaaaataccgtggacttgtaatcactgaaggaactttgaaagaggcgaaagcgtctcgttctgacttgcgcaagctgtcaaaagcgcttaatgacaaacgtattgaaataaaacgcgaatacaacaaaccatacgatgcgttcaaatccgtgattgatggcatgattagcgatatttcagcggttgaaacagccatcaacgatgggatcaaagaacaagaacgattagacgccgaacaacgcaaagagcaagtacttgatgacattacagaaattgcgcagtcacgtgggattgacccgaaagacatcgagttcaacgacaagtggctcaacaaaagcctaagtaagcttgaacgcacgcggcaaatcggagatgcagctgattatattgtcaaacagcgtgcagatcttgcagcagccaagaaggctgttaccaaatatgcagaagccacgggcttagatgctggtgggtgggttgcacagattgatcaaggggcttcacagttagatgttatggctcgcattgatgcctatgttgagcggcaaaagcgtgaggctgaacaagcaaaacagcgtgccgaagcacaagccgctattgatgcgctgcatcagaaaaaggttggcgacaaagttgttgataccaacacgggtgaagtggttaagcagccagaagtcaaacactacggattcgaggttgttggcacttttgatgaagctaaaagcgtagcggattttatgacaaaacaaggcattgaatttatcaccatggaggctaagtaatggccgagaaagaaaatgacacggtaaaagacagtctgtctcttgttgaccgcattttgatagcccagcaggctgttggtgttatcaagaaagatggtcagaactcgtttcaacattatagttttcagagcgaaggcgccatcaaagatgctgtgaaaccggcactgatcaaagccggtctggtcatcaaattcagttatgagattgtcaaccagtatgatcgcacaacgggcaaaggtggcaataatcactttgttgatttgatgggaacattcactgtcactgatggtcatgatgagatgacatttaccatcccgggcagcggtcaggacactggcgaaaaagccatggtcaaggccagcacttcagcgcaaaagtatttttacaagcagatgtttaacattactgacaccgaagactctgaccctgatgcaaatgatagctcagcaagcaatggtccaataaccaaaaacaagcagtctattcggccaagtgccattcttgatcacgcaaccgttaaagctatcaaagacatgatggttcaacagtttaaagctttgccggccactaacaaaaaaggcgagccaaagccaaaaacggttaacgaacttgctgaaatatggataggcttagcaaatgcaaaattcggcagcaaagcaacgagtgttgaaacattaactccaaaagccgctgctggtgtcaaaaacttgcttgaagcagaactcagaaagttggtaggtggcgaacgtgaatgagcatgaagataaacggcaggctggataagctttcaggccagcagattactatcactgctgatgactctgtgagcttgtatacgctgtctaagcttgccgcgggtaaacgaccatcgattgagttagaagtcgaggacgggcgccatataagcccagatcagcgcaaaaagatatttgcactgatgcgcgacatctccgactggaacggtgacacggtggacatgatcgaatgcctcatgaagtcgtatacgcgtgagatttttgcaattgaaccatattcgctgagtgactgttcgatgacaactgccagcaacatgatctacacgatcttagagttttgcttccgcaacgatgtgccattcaagacgaagacgtgggacatgataccaaacgactatgcgcgccaatggttctgcctccgtttccgtaaatgtgttatctgcggaaagcccgctgacttggcacactatgaggcggttggcatgggacgcaatcgtaacaagattgacgagagccaatatcactacatgtccctttgccgcattcatcatgtcgagcagcacacgatcggcctcatgtcgtttatccaaaagtatcacattaaaccaatcaagctgacggctgacgaacttaaacaaattcagccacattacaaaacaagtaccgaataaaaaggagactaaaaatgcttaattcagttgctttaacaggcagattaactaaaccggttgaccttcgctacacacaaagcggaacggcagttggttcatttacgattgctgttgatcgccaatttcgcagcgcaaacggcgaacgtgaaactgacttcatcaattgtgccatctggcgtaagtctgctgagaactttgccaacttcacgcacaagggttcacttgttggcatcgaaggccatatccaaacgcgtacgtatgataacgcgcaagggcagaaagtattcgtgaccgaggtaatcgttgagaattttgctttgcttgagccacggcaagcgtctcaggatggtcaacaacgatcggctaataacccagcggccgcaagccaaggcaacagttttgccaacaatggtcagccagtcgatatcagggatgatgatcttccattctaagaaggcggtgacgatcatgaatgaaagccctagttactatgccatcattccagcaggtgtgcgctatgacaaacagctaccacaaggatccaagatcttgtatggcgagatcacggcactcagcagtaagagcggctcttgttgggcgagcgatcaatactttatgactttgtacgaggtaggtcaaaccactatacaaagatggctacgtgctttagaagacggcggatatattgaacgtcatgtcaaatacaaagacggtaccaaagaaattgaaaaaaggtatatcaaaattcgtacagaccctatgcccaaaaatggtaatacctatagccaaaaacgggtataccctatgcccaaaaacgggcaagagaataatacaagtattaataaaaacatacgtgcatccagcacgttagagagtgactttgaaaagctatggaaactgtatccaaagaagatcggcaagaagccggcgttagctgcttacaaacgggtaatgagtagaaagaagaaccctgctaccaacagacaaattcaggatggcattgtggcttatcgacagctaatcaatagcaaaggcacagagaagcggtttgtcaaagacggtagtactttcttcaaccaagaggcatggaacgattaccttgaggtcgtaaaggaagaacgagatgagcaggaagctcgaaagccgaagtttgacccgcaacaaacagccatcgctatgtaccttgattacaacagcctagatcgcgtgcttgaggaaatcaaagcgcagggtattccgatcgatccagaagatgctaaacgttacattgctgaatacgatgaacggaggcaacaagcttgacaaaaaaactttatgaccctagcaatcctgaaccacatgtcatgtatggactatatacgaagccggaactcatcaagtctgaatggattgatcctaaatggtttaacagccagcaatacgctgcagtagttgcctacatgaacaagttgccaggtgacgtcgatacgctggaattgcaggatggtttcgatacagctcatcccggcgtgatgtcagcagcagattggcaatacattatgaccagtgattttggcacctcacgttttgactggtgggttggcaagctaaagcgggactatttccgtagtcagctcattaaagcagcacaagcgtactcggaagaaccaagtgaggacaatcttaccgcgatgatggttgcctcacagaatgctactgctgccagtcagacggtaactgaaagtaccattgctgatttggcagcagacatggaagacaaaatgatacacggtgccgctgacaatgggattaaaacgtacttcactcttaacaatattctgggtggtggcttgatgccgggacgtttgttgacgattggtgcgcgccctggtgtcggtaaatcagcattcgcggttaatctcatcgttgaggctttgaaacagcaaccggaattgacagttgatatgttttcgcttgaaatgtcaaatgcagaaaactacaaccgcttgttggcctgcaagactggcatcagtgctggtaaatttatcaacccacagaaaagtctaagcgatgctgagaaggttgaggttgaaaaggcgggaaacgtccttaaagactatcacttgcagctttacgacaagcaggtggaattaccgcagatcgtcaaaacaatgcggcagcgagccgctgatgcagataaaggataccttgcgattgttgattatcttgggctgattggtgttcgtagccaatccgatcgccgtctgcaaatcgaagagatcacccgtcaattcaaagtgctgaccaacgagcttggtatcccgattgttttgcttagtcaattatcacgaggtattgagaatcgtcaggacaagcaaccggtactatcagatttacgagagtcgggatcaattgaacaagatagcaatgcggttggattcctttggaacagtgatcggcagaacgaaaaatcagatatccgtactgtgactttaacaattgcaaaaaatcgtgaaggagcacttggcagcattgattttcgttttttcgcaccaaagttgcagttcaaggtggcgtattgaaatggcttatccaactatgacacttaaagagttcaatgagtacatgcaggagggacattatcaatactcgctgttcgttattctgcagcttgatgaagccatggaatatttaaaaaaggcgcagcaagccgatactgctatgaagaagttttggtacaaatgggcgtacgtgacattggtcgatgcgttagagacggctgagtcagaatattatggagaaactagtgcttatcttcccacgaaagaaacagatccggtaacacgagcctactgccaaaacacatacgacatttggcgaggatatctgaaaaagctaaatgtgaacttaccgaagcaaaaattttgaggaggcaaaagcatgattgagcatgaggaagaaactaacaatgcaggccaagattgggcacgtgaacgacttcgcaactttcttgacgatcatcccagcttgccaatataccgctttgctttgattgctggcgttagtcgcattacagttgctagttttcttagtggtaaagaggtaatgatgatcacacttacaaagatagctaaagccatggggatatcgctagaaaagctaaaacagccaattagcaaggaagaatacaaggaactacaggaggaatcttcaaatgcaagcaattaaaacaaaaatgatggtcggtgatctggttgtggttcctgatctagtattcatgggcgtgcgtgatctcggcggtgtggcacgaatcatcagaatcgagcgatacaacgccagatgtgcaagccaagacatcaacaagccagttgcttttgatggtaaggcacccaaagagctaatcacaacggttgagatgattgacggcaagcaacgtcaatactatctgaaggacgtgaagccagcgtgaacaggattattattccattgcccctcatgactcttaaccagtacatcaaggttgaacgaggcaacatgttcggcggagcaaaagtcaagaaacaagcaacggaaacggtaatgttggctgtgagaaaagcgatgaatcagggcgtgaaatttcaatgggggaaacctctaagcttcgactggtactggtatgacaagcgaacagacccggacaacatcgcgtttcagcacaagtttatcttcgacggcatgcaaaaggctaaatttttagaaaatgataattgggatcacattgtagaactgcgagatcggttctttattgacaaagctaacccgagagttgaagtcgaagaaatcgattgaagggggccaattaatgagatcgctagagttgtttgcaggaattggtggcatcgcattggctgaacaaatggctggcattgaggtagctggcttgtgtgagtatgcagactacccgcgcatgattttgaaaaagcactggccggatgtgccactttttaaggacgtgacaaaacttgatcgagaagaactcacaaatgcaggaatcgaacccggctcaattgacattgtttccggaggttttccttgccagcctttcagtattgccgggaagcgaagaggcacgaaagatgaccgcgacctctggccagaaatgtttagaattatcaagcaaatctggccaacttgggttgttggagaaaatgttgctaacttcgcaaatatggaactcgacagaacgctttctgacctggaaggcgcgggataccaagcacgggcatttgtattaccagcttgtgccgtcaatgccccgcaccagcggctcagaacattcattgtggcccacgccgacagcaagcgatacttttaccgcgaacctgaaaagcagccagcagaggataggcagtcgccattcagtaacgttgccacaagtggtgagaatgttttggctaactccgacggcaacagatgggaaaagagcaagccagttttcaagcaaaagtttagccaaaggaaaagtgaacgggaacctagcacaacaagtagcacaccagcaaaatggcagcctgaacccagcgtgggtcgagtggctgatggggtacccaatcggttggacagaataaaagcgttaggcaatgcagtagtcccacagcaaatactgccaatatttaaagcaatcgttcaaattgaggacattaaaaatgactaaaaaaatcgtgtttacggctgatgtcgttcacaaactgttaggcgttcgtgaggcacagcaggcaccagcagcattgatgaagattatcatggatcagcaaaagcgtaacgagctttttaagcaattcctagatgttagcactgacgtatcacatgactggttctcacaatatttcatgagcgttcaagctgatcgtaaagacaagaaacaagatttcacacctgaaagcatcagcaagctcgcgaacatgctggcaggctcgcatgacagtagcgagtattacgaggttgctgctgggactggctcaatgatgattcaacgatggcaacaagaccgtttgaagcacaagccgtgggactaccggccaagcatgtatttttatcaccttgaagagcttggcgacagtacgttgccgtttctaatattcaattgtgccattcgcggcatgaacgcaacaattgttcatggtgacagtctgacacgtgctgctagacaagtatatttcattcaaaacgatgaagacgactatttgcatttcagcacagtgaatgtgatgccgcatagcaaagacgttgaacaagaatttgatattcgacaatggctagagcctgaacaaaatcacattgaatcaacagagatacccgcaagatacaacgaagccattcagaaattagcagcgggaaaggagcccgaccaatgaaaactggagacgacacgttcgatgacatctacatcagcaaagcaactggcaaggttgtaggcgtcaagtatgaagatgtggactacaaactagtgccattaaataaatgcgatatcccactgggacaattggccaatcatattaataactatgtatatcgaaaagaggacgaaaaatgagcgaagaaaaactgtacgcggttaagaaccgcagtggtgaattttgggacttttcggatagttccggtttctggtcattagccatctcggatttccctacaacgcctaataagaaacaggctgaactagcggctaaagatcatggcggtcacgttgtcacgttcgttgaggagcctgaaaaagtagtgctaagcgagaaacaggcaaaaatcgttgaaggtgcaaacaagtctcaatttccagcatcctatatttctgaccatactggtagttcctattgtttggagaagctactgatggacgcttatgccaatggatacaccgtggcaaaggagaagaaatataacgtcaaggtgccacatacggacgacagctatttctataaggttgacgatgaatattgcaacgcgggtgactcttactacctagaaggcatgaccgacaagaaatggttcactgacgccgagattgagcactacggactgggcgactgcgagaaagtctggtgtgatagcgatgacgactaaagctgacatagacgcggcgcaaaaggctatcgatgccgcgaacaatgcgatcaacaaacttgatctgtgtggcctgtatgattgcgcgtggcaggcgaacaacaactataaacgcatcatcgattacaacaaggaacagttggaggtgactgacgatgagcaatgagacgaagcaagacgtgttcaacgcattaatggctgacatgtcacacggttcagaacaatggcgttccagatatgacgccgcgtttccagataatctgccggttattccgaaagcggtaggcgatgtgattgtaaaactcaaacacaaaaaattctctctatccggagcaatgagctacgccgcagtagtttctttatctccatggatgacgtttgaacatgaggacaccttcgcccttgcatgggtgctaggcgcttggaaagtagaggaaaccggcgaaattgtgaaattggaggcggagaaatgagccaactggagaggacggataaaaaaatgaaattcaagattgtgggccgcaatggcgaaaccaaaatcaaggaattcgagtctcagtacgaagcagatttatactgcgagcgtctcaactatgagcggttggaacgccttggcttgattgagcacctgaacatgccagcaatcaaatttgattaggagtacatcaccatgaaagaaatcgtgaaattggaggcggaaaaatgaagttagttaaaggcgacatcattcgaaacccgtgggtgagcgacccaaaatggcgagacttcattttcattcggcgcgggaagaaatatgtgcacactttgagatctaatcgtggactaattgaagacgcaatgtttgacaaaaaagacgtggacgagcgtttcacaaaagtaggccattcagttggattcgacaccatgctgcgagaagtttctggcgaggaggcggagaaatgaaacgagagattaagttcagggggaatccggagctactggagggaaagcaatgaaaaatgggcattaccgtttcatgtcatggcttgggttcattttatgtattgtggtttcatttatgcctgagaaatatttggcatacggatactataaaacatatgtttttctgacattgtcagcaatcttgtttgcgctttgggacattgcggattcaatcagggagaagcagaaatgaaacagatgattgccgtcatgctgctaatctcaggtgctgcaatgcgggcgtgggttaactgggaaaggagatgaagaaaatgaatgatcggcatcgagcggtaatgcgagcacgtattaggtatgagcgtaggaaacatgagcacagcatggacggattcgtaaaagcactttatccagtctttaaggcggccgctaccacgattaaacaatggtctgccgcttttcagggaaacaaaaagcgcgtctgatgaaggacgcgccggaggccaaacgtacgattgagagtgaatgaaatcaaagattaggagttggcctccaacgacagtatagcaaacgcacatgttgaacgcacgtttaaggcatcaaaaaagcgcaccacgaaggcacgcttatccccaaaacttttacaaatttaattataccataaggagtggacgcagtggtgcgagcaacgagatattttagcccaattgatcatgacaaaacaattgaaaacgccaaagaggtcttggggaactactggcatcacaagcggctcgctcaacgcaccaaaatagcgctaagaagccccgtgatggacggcatgcccaagtcaccaagctatggcaacaaagccgaggacaagctcgtatcgcacgctgacgagctgtactatatagcgtgctgtgaaggtgccattgaatctctagagaatgaaaactaccggatcattttagttgagagctatctgactccaaagacgacacgtaaatccagccttcagttagccgaccacttgcatgttgaccgaacgaccctttggcgacaaacacaagaagctctctatgcttttgctgaaatatgtccgctagtgaaactagttgcaacatccgtgcaacaatgatgcaacaaaaaacacgcttttccgtcatatgatggtattgtgccaaaggtgagaaacctgagacaccgcatttttcctccgagccatggtgatgataaagctgtggcaaggcgtggcaatgaggactgactgcgatagtcaggcgggttcgattcccgcatgccacattgcgctatcaaacgtgcaccagattggccggcggaaaacggctgcgcagtgctcacttaatcacctcaatgtagtattccagttcatgctggggtactatttttgtgaggtgatacgaaatggacaagaaagcggaaattcgggccatgattgagcatccagaatatcttttgcatgctgagaaaatgagcttggataagagaatagagcagaaaaagcttgatagtaaggatgtgaggtcagcagtggtcgatactgccaagtcgaaaggaaagcagctggcggtagacgtcttaaacggcaaatggggagatctgatccttgatcttgtggatacgggggatcatttaaaagaccgtttggatgacatgaagaagactttgcttttggcagaatatctacaaaagaccgatgatcaagagcagggccttcacaggttgagttctctcctcacaaatccgtacggactgagtatctattcgaaaatagtctccctactgtcagatgctccatcagatgatgatatgttggatattatgtctgattatctgggtaatcttgcaaatgaaaaagattggggaagcactttttctaagaacaagagcattttgaatttaatagacagaagttctccgctagctctaactctgcttcggaattcagaccattggccgttagttccaggaccaaaagcattcattgctgtagatggtagagtgcagggagacaatactggatgggtagcaaccgcatttagcaaagtgccagttttttctaacattgagaagacaagcatccagatggcaatcgttgatttagaatcaaataagttagctgaatttatttcgggaacgctgaatccaccatacgctaatcccaataatccttcagagttaatttatgctgaacgtccgaccgatgctgggaatatgcttaaggcagccgtttcgaaatctagtgctacaaaccaagagagctaatatgacgctttggcatctttttatttactaaagcactccgccaaacggtgaggtgctatttttgtgcaacaaaaaggccctctgagcgattaactgagggcctagctaccggtgtttactgaggtgaaacaacggtaccgaaaaagagtataacacatgtagcaataaatcggattaaaaaagccctcagagaccagtccaagggccaaaagaatgaaaaaacggaatacttgtgtgagcagcagcggttgacttggaggagaaaggccactgctcacatatatatattagcacattccttatagaagatactaaaatagccctcggttgggggccgagagcctaaagaaagggtattacaaaggagtgaaaatgagtatctgttgggaacaatttaattctaactcatcgaaattttttaagcaacaaaaaagctttcggggcctaatccgagggcttaagaactcgggaagttcttcatgagaatgtgagcagcgtcatcaaactgctcacggacattatattttcggaggcgagtagatgcagtggacagatgaacaaatcagtgacattaggaagctcgcctctgaaggctttaccagacgagagacggcagacaagctcgggattagctatgatgcgcttcaaggtaaagcaaaacggcttggcatcgagttccaaaaaccgctaaagaatgaatacgattcagacggcacacagtccagtgaaaccattctaaaagttgtcaggggtcacaaaatgacgcctagagaggttttagaagctcacgggtatgattacaccaagtgggagcttgtacgtgccacaagcaatttttggaagcagacgcctgaagcgacattgtatcaaagcaagatacaaatcaggccgttgattgaagcaggacaatacgaatcattgatgaatgacatcatcacacacaaggagccgtatcaagccaaggctcctatttttgtggaatcagatcgctatttagtcattcctgcgtttgatacacacttcaatggtcacacgtttgatgtctatgccgagtcattgaagcgtcagctagagatcattcagcgcggccattacgccaaaatattgctcattctgggcggtgatctggctcatgtggataatatcaactcaaccacagcaaagggcacacagctcgaaacaaccgacctaggcgagactgtgaacgaaatggagcaatacttcgagacactgattgaagcaatcattaagaacgccaatgagtgtgaggtcatgtatgcgccaggtaaccacgatccgtcagttggatatatgtttgcgcgtttattgaaacgtgcctacagcaaccagccgaacatcacttgggatatatcgctgaagcattacaaaggcacaatgttaggccgcaacttcattggtgccactcatggtgataaaggtaagaacaactaccttgcaaaatacctcgatgagttcggcttcatgttaggcacagcgcagaatcgcgagcttttcaccggtcaccttcatagcgagatgagtaaagacttgggaggcttcgttcagcgtcaagtatcaactaggaaaccaactgacaaatggactgatgatctcggagttgttgctcacaaaacgtttgagctggtcgaatattcggatcgtgatacgagggcgatttactatgtttaaagaagaacgtgagatttggaaagatattgaaggatatgaagggctatatcaggttagcaatcttggccgagtgaggagcttggaacgcatagacgcaagtgggcaccacaggaaggggataatgctcgctggccgcacagtccgcggagggtatctcaatgtccgcttatatcgatacggaagcgagaaaaataaacttgttcaccgcatcgttgctgaaacgttcataccgaaccccgataatctgcctcaggtaaatcacaaagacgaggacaaaactaataaccaagttgaaaatctcgagtggtgtacagccctttacaacaacacgtatggcactcgcgtggagcgtgtgacgaaagcgagagaaaaaccaatctacgccatcactggcttgggaaatcgttactacttcagcggtgtaagcaaagcatcgaggctacttggactaaaagaaggccgcacatctgattgtcttcgcggcaagtgcaaaactcaccacggttacacattcgagtgggcggtggcgaaagcatgacaggcatgaaacgcgttagctacggctatgtttcgcaaaccgagaaggcaattattgaacatctttcaagggaagaagcacacatgcaagcaattatctacacaaggcctggctgtcaaaagtgtcgccacacagcgatgaagctaaagcaggtcatgccggtgtcaaccatcacagcagacgcggacgactacgagcggttccgcaaactaggctatcgatcaatgccagtagtaacaatttacaaggcagacggcacacatgatgaatggtgcgacttgcgggttgacaagatcaaacaatacacggagatgatttagcatgtgcaatttcctattactgctcacactaatattcgtgctggccaagctattcggcttgatcgcatggagttggctgctagtattcgcgccactaatagtgattatttctgtgccggtgttgtttattggattggcaattgtcattagattatacgtggagtgatggtcatgactaacacatcgtatacgggagatatctatgccaagtaagaagcttgcctttataaatggcagaccacaattggttgatgccaatgctcgtgttagatcggaggcggataggcagtacaaccgtgtgcggaatgagcagcagtcggactaccttaggttctatcacagtaatgaatggaagcagctgcgtgagcagatattgattagagacaacagtttatgccaacgctgtggcctgcaagcctcattggttgatcatattgttccaagcgaagatgactgggaagaccgcacgaatgcggataatcttcaggctttatgcaaggactgtcactattggaagacgagacgtgagacaaccaagcgtaagaagggacaacatcgagccatgaagattacagtaatcgttggctatccagcaagtggcaagtcaacgtacgtcaagcggcatcaaggacagcatgacctcgtctatgattacgaccatatcatgacggcgttaacaggcctgccattacatcagggcaatatagacgccaatgattatgtgcagctaatctatgagctgatactgcggaagcttaaagcagagcagaccttcgaccatgtatggttagtcatgacatatccagatgagaagctagacacgttgcttgctagtcgagatgtcgaacacatactcatcgacactgaccgagacacatgcatgcagagactgtctaagcaaggtcgagatgtgagtcaactcagcaaagcgatgaacaaacttgacgaaatgaaatcagaaaacaaatttgcaaaattcaagaaaataaaaaattaaaaaacaaattttcgacaatttatcgggcgactacacgggctggaaacggctagaccccccttccatttttatcgggggttacatttcttggaacagaagaacggtcggcctcttttttgcaccccaaattgtaacgatttttaaggcggcaggggtaaactcagcccattttatatagatattaggaggtgaagtgggaaatggctggaaaatacaaagtgttgcaaatgtctaagggtgatttgaccaaagaacggcaagaagccaagctacatgcggaattaatggccaaagatggcattccaaaacttcaggtaacaccgcctaatcatcttgacccagtcgcaaaacaagaatacaagcgaattatcgaatctttggggaccttaccacttagaaatctcgatcgcgccgagttggaaaactattgtacatggtattcggtttacaaaaacacatcggtcaacatgaaattggctttaaagaatggagatcaagatgaatattatgcgtacattagcaccttgaataaggccaccgcaagcattaagagcctcgcgagtgatctagggttgaatgttaacagtcggatgcaaatgaatatgcctaagactgaagcacagaagaacgattcaatcattgatacttttggctgactgtgatggaggtgatgctgattgtcaaaatttaaggatccaatgcctaatttcataaaacgtgtgctagacggtcgtcttattacttctaaggcagttaatctcgcggtgaaacggcatcaagaagacttgaaacgaacagattggcgatggcgatatgatccaaatctagcgggaaaagctgttaaatttatggagattctgccagaaccaaaaagtggaaaaccacaaccattagcaccgtttcaaaaattcattattggcagtatatatggctgggttgataaagatgattcaaatataaggcgatttaccgatgtgttcatttcgatggcacgaaaaaacggtaagtcgcttttgatttctggagtcattctgtatgaatttctgttcggaaagaatccagccaacaaacggcaattatataccgctgctaatgatcgcaagcaggccggcattgtattcggaatggttaaagaccgactacgtgcgctcatgcggaaagaccctggtatcaaacgaatggttaagattacgcgagatgaacttgtcaatttagacgacggatcaacaattcgctcattctctcgtgatacaggacttgtcgatggctatgaaccccatgttgcggtggttgacgaatatgccaacgctaaaacaacagatatgattgaaactcttgcctcagggcaggtgttactgcctagttatctgacgttcatcatttcaacggctggatttgacatgaacgtgccgatgtttcaacaaaattatccatatgccaaaaaggtgttgtccggtgaagaaacagcagaacgctattttgcatttattgctgaacaagacaacgtacaagaggttgatgaccccaattcttggatcaaatcgaatccgctacttgacgttgatattgtgcatgatcagatcaccgactatttgactacaaaactatctcaagcacatgctgatggcagtttaaatgcaaaactggtcaagaatttcaacatttggcggcaagcgactgaagatagttatttagacttcgatgcttggaaggatgctgaattgagtgaaaagcctgatattcgcggcaaaagagcttggattggtattgatgttggtcgtacaagcgacctttttgccattacttggttaatcccgcaagaaggctggtggtggctcgatggttatgcatttgtcgcttctaaaggcggaattgataacaaaatcaagacagatcggattgactacttggctgctgaacaacacagtgaaggcgagatcagcagcttagagtcaggtatcattgacaacgatcgggtatatgaatggctcgaagacttcattgaacgtaatgacttggatgttcaaggtatcatgtacgacccttatcaatttggaccaatgctaacggcaattgagaagaatcatcctgagtggccgatggtacaggtgcgacaagggacgctaacgctgtcaatgccgaccaagcagttccgcgatgatgttataggcggtcgcataaagcattcagataatcgcattatgcaggccgccgcaatgaacgcggttctaatgtctgacaacaacggcgtccgtattaataagaataagtatgctaacaaaatagacatgattgatgccacgcttgatgcttatgccatcgcgttcaaggaagacttggacaactatttggacgacgaccgtgtgtttagtgacgactttggcttttaggaggtgagaatgtgaatggaaaactagctaacttttttagaattcttggcgcaaatatggctggaattgccactgttttaggcttcattttagctggatatggggcttttttgatcaatagacctactggattcatggtttgcggcggcttgttgtttgttctcgcctttattctgctgcttcctgataacgaagggaggtgagatgaatgaagctatttcgaggattggcaaccgaagtggaccctcactgggcagatcatttgcttgattctggggtaatcccatcatttcgaggtggataccttgggatttctgcattacggaattctgatgtgcttacggctgtatcgattgtttcgggtgatgttagtcgttttccgctagtaatcacggacagctcaaccgatgaggttgttgacctagccaatattgaatacttgatgaatacaaaggtaaacaagcggctgtcggcttatcagtggaaattttccatgatggtcaatgcaattttgactggcaacgcttattcgcgtattgtgcgcgatccgataaccaacgaaccagctatgtttgagttctatgccccatcacagacgcaggtggacacaagcgaccccgataacatcatctaccgtttcacgccttacaattctagcatgcaaaaaatatgtggatttgaggacgtcattcactggaagtttttctcatacgacacaattatggggcgctcaccgctgttgtcgcttggtgatgaaattggactgcaggagtcaggcgtttcaacgttacagaagttcttcaagagcggcttgaaaggctcaattatcaaagcaaaggagagccgcctgtccgccgaagcacgccagaagattcgtgaagattttgaaagggcacaggcaggtgctgatgctggatcgccaattattgttgacgcaacgatggattatcagccgttggaagttgataccaacgttcttaatctgattaacagcaataactattcaacagcgcagattgcgaaggcattacgggtgccagcgtatcgattagcccaaaatagtcctaaccagtctgttaaacagcttgctgatgactatattcgcaatgatcttccattttactttgagccgattacaagtgagtttgaattaaagctgcttgatgacgcgcaacggcaccaatattgcataggattcgacacaaaatcagtaaacggattgccaattgctgacgtaaatacagcagttaatgggggactgtggactggaaacgagggacgtgcggagcttggaaagaaaccgttaaaagatccgaacatggatcgtattcagtcgacacttaacacagtgttccttgatcaaaaggaagcttatcaagctgagcatgcagcagaattgaagggaggtgatactaatgccaaaggaaatcagaatggcagcggcaccaatgcaaattcgtgatggtgatgatgatcatcctgccgttattgagggctatgcccttaagttcgacagacaatccgagattatgggcagtggtgagctgagtttccgcgaacacattgacccacacgcactggacaatacggacatgagtaacgttgttgcgctatttaatcatgaccagaaccaagtattaggccgcacgggagtcaatttagagctgacggttgatgaaacggggctcaaatatacgttgacacctccagatacacagcttgggcgtgatttgttagaaaatgttcgtcagggaattatcagccagtcaagttttgcattcacgattgcaccagacaaagatgcacagaagtggcaaaaatctaatgaacgtggtgtgaagtatgaccgcactattaacaatattgatcatttgtttgatgtctctccagtaaccacgccagcatatccggatactgaggtaaaggtcggagcacgatcgttggagcagattaaatcgctagatcagccgctagaatgggaacttaagcggcgtaaaatgctttatcaattgaataaagaggacttgctcaaaggcatcgaataatcggtgcctatttttatacaaaaaataaggagggtcactagatgactttagatgaaaaattagctgctgttaaaaagcaacttgatgaaaagcgttcagcgttgccagctatgaagacagaacttcgttctttacttgaaggtgaagattccgaggaaaacctgaagaaggcagaaggcgttcgtgccaagtatgataaagctgacaaagagatcaaagatcttgaagaaaaacgtgacttatacgaggctgcgttgaaaggcaatgaacagccgagtgggaagaaacccgatcatacggaagagcatagctatcgcgatgcactgaatgcttatttgcatactcgtggtcgtaatactgatggcgtcaattttgaaaagacagaagctggtgaatttgcgatttttcgtggcagtcctaccgatgccagtgatgctgtaaatgcaggtgttaaggctgcagatgcggccttgaccattccagaaactattagcaatacaccacagcgtgaattgcagactgttgttgatctgaaacctttcacgaacgtattccaagcctctacacaaaagggcacttacccaacagttgcaaatgctacaaccaagatggctactgttgccgagttggaaaagaacccagcaatggcaaaaccgaacttcaaatcgatcgactggtctgttgaaacgtatcgtcaggctcttccagtttcacaggaatctattgacgactccgcaattgatttggttggcctgattgcccagaacgcacaacaaattaaggtcaatacgaccaacggtgctgttgcaactctgctgaaaggcttcactgccaagacgatctctagcgttgatgatttgaagcatatcaataacgttgatttagatcctgcatattctcgcgtaattattgcttcacagagtttctacaatttcttggacacagttaaagatggcaatggccgctacttgctgcaagacagcatcttgaccccgtctggcaagagcgttcttggcatgccgattgctgttgtgtctgacgacacgttgggggaagcaggcgaagcacacgcctttttgggtgacatcaagcgggcaattctgtttgctaaccgcgcagacttcatggttcgctgggttgatgaccagattcacggtcaatatttacaagctggtatgcgctttggtgtatccgctgctgacaaaaaagctggatacttcctcacatacaccccaaaaaagtaacgcctgacggagtgactttgagccagaaaacgctcacgggtgctgtcggttccacaaaagacatcacggtgacagtcactcctgatggcgctcctcaagcagttaaagctgtgtcgagcaatgaaaaagtcgctacggttgttaagaagtccgatggtgtctacactattaccaatctgacagagggcacagcgacaatcacatttagcactaatggcatcagctcaacgcttgctgttactgttaacgccgggtaggtgactactattggaagatactacgcttggcaaaagcccactgactgatgaacagtttcaggttctgaaaatgtacttgaaagttgatcagacaatcgaagacccaatgattatgcaactggtgcatgacgcttgtggtgaaatcagttcggctattagttttggatcaaatccggaacaatttctaagcaatccagaaactcgggatcgtttcttcacagcgctcatgaagcaagtgaaggaagactatgactaccgaggtatgggtgctgaagtcatgcgcttcccgttgcaaacatcaaccacaaatatcatcaatcagcttcgctcagaattgccggaagaggatggtgatcctgatgcgcactaatcgaatgactgaaagaattgcgttcgtcagctatgagtcaaaaaaggttaacggagttccggttggtggtgtgctcgttaagcatatgacggtttgggcggaagttcctaaggtaccaatcagagaagcaaatgatccacagacgaagttgggcactcgcaaagacagcccgacttttttagtgcgatttttgaccgcagaggaaatccaaccaacttggcgaattcagtggcgtgggaaggaatatcaaatcacgggtcttgatcctgattacgagaggcgcgatctgacaacgattacggcaaaggtggtgagctgatgggcgtaaaagtcacaggggatgctgaactgcttgctaatcttaacaagctccaatttggagttgcaaaagaagctcgagcggctgtccgagatggcgcacaaaagtttgccgacaagctaaaaagcaatacgcctgagtgggacggcgagactgatatgagcggacatttgaaaaatgatattcagctttcaagtgtccgtgaaacgagcggcttaacagaagtagacgttggatatggtaaaaatactggctggcgtgctcactttccaaactcgggaacttcaatgcaggacccgcagcatttcattgaagaaacccaagaagtcatgcggccagttgttatcgctgccttcctaagccacttgaagaaaggcgggatgtaatggcacctgaaaaacgtgtttatgacatcctgtcagccaaattggatattgctgacaaggtgaatataggcactccagacttcaataaccagactagtgaaactcccgagagtctagccccatgggtgagaatcacttcttttcccggtgatgctgctgactatgctgacgattctaggattctagagtatccgaaagtacaagtagatttttgggtggataaaacggactgggatcaacaagaaaaaatagaaacacagatatatcaagcactacatgcggctggctgggaaaggtattatcgcaactcctacgttgatggtgataccccatcccttcgcatgacaacaggatactttcagtttcaaggactgccgattggctagtcctttttattttcctaaaggaggattttaaatatggcagatactggtgcaacaactaataagaagttagcaaaatttggggcttcggcctttgaatacggggttgtcggtgatgacgactttgtacaaaaaacacgaaagattcaaggcttatctagtgtgaaattggatattaaaacagagcaaaagacgttgtccgctgatgacggcccgtacttgattctttctggtggcatcacagaagcaaccgaaacaatcgaaatgtacgatgttgattccgttatgaagtctgatttatttggcattaaggttgttaatggggttgaagtatatccaaagaatcttaaccctaattacgtcgcgactttgttccgcacgaagctttcaaatggcaagtacgtttgggttggtatgctcaagggaatgttctcacttccgaacgttgataccaagactgttgacggcacaccagatccgagcgctgacagcatcgaaggctcatttattcctcgtggtgaccaagacactggcaatgttgtgttgattggtcgtgaagacaacgatggattcaaatttgataccttccacggctatgtattccctaaggaagctaaagacgcgactattgtctcaactactgtcccaaaagtgtagtcggtgtcagctttgagaacagttcgattaaccttgcggttggcgcatctacagcgttgaaagtgcaaattaatccggctgattccgcaaataaacaagttactttcaaaacgtcagatcccacagttgccaccgtttccagtgatggaactgtgaccggcgtgaaggtgggatctgcaactgtaacagttacaactaacgatggtggtaaaactgccaccgcaactgtaactgtggcttagcaatgaactcgtcgccttgtaaatgcacaatacgcgaacagcgggcggcttatacctaaggagattaagcatggcatatcaaattaaactaaatatcaaaggcgaaacgtgcgtgttcacacgaaatggagagccaacattacgtgatactacgaacgccttaaaagtgcagcaacaacagctgcgcatgctaaaccgtaaagatggcccttcaaacgatgattacgacgagaacgagaaaaacttagccaaatttgcggttgatttctggaaaaaccagtttactaccgatgatgttattgatggctcttcgatttctttgaaatcgctggattcaatcaatgatgccattggcgattctctaagcgatggcgaagaggataagaaggacacagcaaaaaaatcaccgaagcggacgtcaaagaagccattagcaaccttgacgacttctacaaagcaaggctatctgaaggctaccgattagctgacgttgatgctatgacgctccgcgatattgaaaaacttaaccagatttacgaggaacgggagaccacgatcgacaaggcctttccgttccttttctagttctatgaaaggaggtaaaacatgttaggaaatctcggacaaattgcggctaccgtaagtttgaacattgatccgtttcaagtgagccagcgagttttgaactcttcaattaaagcaactgccgctgagttgcgggctcaagatgctgcgtttaagggatctgaaaagtctatcaacaacatgcgttcaacctatgacacattgagccgccagtcaaagaactaccaagctcagcttcagaaacagcgagaacggtatgatgaaaattcgaaagcggttgaaagacttaataaaagtgagactgcatcgcaggaagaaattaatcgtgcgacaaagctgcaagctaatgctgcatcacagtataatcggactgctgccgctgctgctcaaaatgaaaatcgaatggcggccttacgcaaagagattgcgctgcaaagtgacggctggactaaagtatcaaacggtgcatcaaagtttgcatctgttaccgaaaagacaagctctaagctaactagtttcggatcaacgatgaccaaggcagtaactgctccaattgccattggatttgtagcagccgctaaatctgctattgatttcaacagccagattcaagcaatgggacctttgctaacaaatgggggtgcgattactgccaagtatcgtgcgcaacttgatcaactagcatcggcatctaaaaagtggtcggttgaatatggcgtttccacggctgcaattaacgacggcatgtcagaaatgatcaaacgtggctataccgctgcgcaaacattaggcgcaatgcctgcagttctcaatgcggcaaaagcgtctggcgatgacttcaacgatgttatgcatgtttctacatccgttttggagcaatttggtctaaagacagaatcaacaacgggcatgcttaaaaacacgtctcgcgttacagatgctcttacctatattgcgaacgctactgcagcaggattccaggatatgggcgaggcaatgacatatgtcggcccttctgctcatgctgctggtatttcactcgaagaaacagcggctgctattggtattatgagcaacaaagggattgaaggatcagttgctggcacagcattacgtggtgctttaacaagactgttgaagccttctaagcaaaaccttcaaggatttaatgaattaggcatatctgttgctgatttcaaaaaaggaacgctaactcttccagagattcttgacaaaatcaagaataacactaaggggtggacggaccagcaacgtgcttctgcagtagcgttggcttttggcactgaagcgcaagccggcatgaatgccttgattagtgcaggtggcggtgagctacgcaaatataccagtgaagctgagcatgctagcggaacaactgccaaaattgctaaccagttaaacaatacggatgccgcaaaattgaagagatttcaagagtcgattcatgttttaggaattgaagtaggtcaaaaacttctaccgacgctgactcctcttatcaaaacagcaaccgatgttgtcaatgccttttcaaaaatggacagcggtacgcaacaaaccattatcaaatttgcagcgtttgcggcagttgtagggccagtgagttctcttatcggtggagctcttaagccggttgttgctttgagcaaaggaatatctggaattgcgggagtcattgggagagcatccgcagccgcaaaaattggcgggactgcaatggatgtgctcaagtctgggtttagtaagacagcttttgaagcactgaaggttgcacctgcagcggctgcggcagcagatggtgcttctggaatgggagcggccatgggcggagccgcagcgagcggaacaggtttgctagcggcattggggccaatcgtcccagttgttttaggcgtgacagcagtcgtcggtgccggtgtagccatctgggaattgtggggcaaaaaggctcttgagtctgccgacagaacttcacgatggggcacggacattggcgaagcagcagataggtccgcaactaagatgcgagacgcttctggcaagatcagtggtgctttcactgacactaaccacactgtcaaagaaaatgccaaaacgatcgccaacagttttgatgatattacgaaggctgctaaagaatcgtccaaaaatagccaaaccgcactcgacaagttggcaaagcaagtcggtggatcggctgctgatcagattcgtaaagatgcagcagaaatgaagaaggccgacgatgcacgcatcaagcaaattgaggctaatgccaaacaagctaagtcaattactgaatctgccagcaaagaacatgtcgaatttactcgagatcaaattcagattctggataatttgcgcaagagcagtgcagccgaggccgttaagacacttagaatttccggtacccaacaagcgaatgtcttaaaggctattaatggcgaaaagattcggatgagtcaagcagcggccaaggaacagtacagccagatgcaacaggcatttgctgacgaaactgatacttatggcaaacattatgctgccattaaaaactctgctgagttgagtacggctcaaaagaataaagatcttgaaaagcttgaaaaagatcatcaaagcaacatgagcgtgatttatgccggtgcgatccaagcaatgaaagcgcaaggactatccaacaagacgattcaagaacaacttcaaacagagtttggtgcgacggcgtctcaagctaaaaaagcaatgagcgcttattcagaggcaatgagtaagggtgtcaaagatagtaagcaatttgcggccgccgttaattcaagtatgagcaagagtgttcagaaggctggtaacgattggaacagccttgtgctagatcctaaaactggtaaagttgtcaccaatctgccacaagttctaaaggataccgcaagcacggaaggcggttggaaacgtcttaaatttgacctaaagaatgccaagattagctcaaatgctaagcaaatgattgtcgaggcgatggcctctaccgacaagtggaattcgctgaccgttcaagagaagacagctctagtgagggcgtccggtaaaaaagaattagctaacatcataaccgagtttgtttcatggaataagttcacgccaaaagaacaacaagccatcgtcagtggagattacacaccgcttgtcaacgcactggttaaaatgggttactggaatgaattgagtctcaaagaacagcaagcgatcgttcatgacaaggctactttgccactcattgatatcttgacgcagtctggcaagtggcagggtttgacacttaaacaacaaactgcgttgatcaatgccaagggtaaagacgaactcaagggcgtcttattcaacctgggcgtgtggcagtcactcgatcccaaagatcagtacacaacgctaaaatccgtgggcgagggtaaactcgctgacatgcttgaccagttggacctgtggaacaagattactccgcagcaaatgcaggcggtggttaaaggcgattattcatctctagtcacggcaattgatgaagttaacggttggaaccaactgacacctaagcagatgcagatgattgtgcaagataaagcaacagccactttgattcaaggcatgattgaagcacagtcttggaacgggttgtcagtcgaggctaagacggcactgattcaggccaaaggcaaggaacagcttgctgatgctgtgaccaagtttggtttgtggaatcaattaccgtcaaagaccaaagaattattggtaaataatgctgatgcccgcgccaaactagttgaggcaggaattgatgtagatgcatacgaggccaaacacccgagaccgaaagagttgacggctaacgtcaatgatttactgacgaagacttcgcaagctaaaggagatctaatctcctatgattcttacaagccggggatgaagcaattcactggcgactcttcaaatgtcactcaacatgctgaacacggtaagagtgaggtcaatacctttaacatgactaatccgttggcacgttactttactggggattcctcaaacgtgacggcacatgctgaaaaaggtaagggcgaagtcaacagtttcaatggaactaacccatcaatgcgttacttcatgggtaatgcttcaagcgttgtgggggctgccggatctggtaaaaacagtatcggaagttttaatggaacaaatccgggagataaatatttcaaaggccatgataatacgacaggacccgcaagtgccgccaaacgtgcagttagcgcatttggtgggaatgaagtcatcacgaagactttcaattttgtggctaatatttcggacagtattcggaggcttcttcacttgcagcacggaactaatgatctccgaacgagttcactggcgatggtgaacgatgcccccggatctaactatcaagagcctattatcactcctaatggcagcatgtttatgttcaaagaaagaaatgtggtttttccgcttgctcgtcactcaatggttattcctgctgataaggctcgtcgaatgaacattccacgttttgctggtggcaccacagacttcggaggcgctgctaatagaataaaccaattgaatccgcaaacctttgttaccagcatttctagtggtagcaatagtcgtgttgaggatttgcttgcaagactgatcgaattaacaatttatcagattaatcatacacaacgtactgaaggcaaagtagtgcttgaaaataaccgcgaaattggcaaatggttgtacccaacaattaatgagctggataagcaaaacacaatcagagaaagacatggaaggggtgtttattaattggcgaacttgatatttggaggacataagattggtagttccgttctgcagtttagtgctgctaggggaattacatcagagattgaaaacacttcccattctgttggaattagcgatggtgagatgcttatcaatagtcgtcttaagtctagaatcattccagtaacttatgattttgtggcgctatctcgtcgtgaatttgaacggcagttagcgccactactttatagcactgatgttcagaagctaatcattgatgatcgccctgatgaattttggtatgcaaaagttgatggcaagatcgacatggaccgagcttattttcttggcactggtactattaattttctggttcccgatggcattgcgcactcggtagccacgaagacgtttgacaacatgccatacaaggacgtgccagtgaacctgcttaaagggacatcatcgaacaacactggcgttgttaaggcgaatgctcacggaattgatggtatcactctgaagaaagcaccagtcgatggtggccagacatatgtttacaccattacttttggcgatatgggacacactggtcattcgtcagttagttggtatgatgcttccaataactggatatctagccaagctggtccggatataccttgggtctctgaagggggacggttctcaaccgtatttacggctcctagtaatgctgcttatgttgagctaaccccaagatactttagccaaactttccccacagacacgtctgtgtcttggacgcatgagaaactcgaactaggcacttctgcttctccttggtcgcctaacccagctgatcctgaatactatgccgacaccatcacggtacacaatggtggtacctatcctgttgaaccggttattacggcaactatgcacgctgataatggcatggttgggcttgttaatgatcgcccgggtattctccaattcggcacgcaagaaattgatggtttcatcaccgaagaaagcgaagtagcacttaatttggcagccgtgcaaggctcacatatggataatcaagccgccacaaacaatccctattggggtggtgatcctagtatgcctaatgaacaggttggcaacgcgatttggactcatgacgattatgatggctggaaggttgagcctaattggcccagcattactggcgaccacaagtattggaatggtccttcaatcaagcacaaccttgctcagacacataacggtaactttaagagcaatctcacatgggacgttatgacacgcttccaaactggtgtatcaaaggttggttcactcgaaacaacgttagaaagtgacggcaagccaatctttcagatgatactgaaagacaatagtgcactgtctgaccaaatatggtggatgtgttactacaaaaatcaactagtcgtcaatgaacagttggatcgcagcattttcactaatgacaagttcattcagttggaattacagaaatttggtaattcagttgttttccgagtgtccccatgggttggcaatcaaggacgagagacgactattacccgccagtttacctttgcggatgctgctagtgtcgagactaagcaattttccgcgtggttcatgcgtgacaagacgtggggcgaatcgaccatgtatctgattgcgtccaccgtcaaatggcagaacgttagctggtatacgaatatcaagaatcgtttcagcgatggcgatgttctcaagattgatgtggcgaacgctaagacgtacttgaacggttctcttgatccaaccatgcacacgctaggtaatcaatgggagcaattcaaactgccgcccggtgatacaaagatttatctttcaccttcgagctgggcacaaccatttgcatgtgaagtcgagataagggaggcctggctataaatggagtattactttgcagatcgaaaatcaaacattttgggtgttgggtcgactgatggcaaaggcgaatggcgaattgacaacgatatcgaaacacaaagtgttgacaatcgtcctgcggtcgagctttctcttgatattcacttcacgactgatcaggaacaagcagtcaatgagatggctaaagcaaccaacttcatcatgtatcaagatgaagaaggcaacgctcaccaaatggtgattgaatcggttgaccatgattcactaggccatattcactcaattgttgccagcgatgcgggtaatgacttgattaacgaaaccgttggcgccttcaaggccgacaagccatatacgattgctgaatatatcctcatgtttacaaatgattctggctgggagattggcatcaacgaatttcctgacaatgttcgaacactcgagtggactagtgaagaatcatcgttggctcgcattattgccgtggcaaaagattttgatgcagtgcttagttttggctttgagtttgttggaaccaacttggttaagcgtgtcattaacattcggcatgaaacggccggtgacagcttgatttcctttgaaatgaataaggacatcaacaatatcgtcacgcatctcgatacctatgacatggaaacatctatcaaggcttatggagcggtgccagaaagtacgaatggatcaactaatcaggacccaatcaacttgatcggctacaaatggactgatccaacaggacagtttgtgcttgatcagtacgggttcttgcacgataccattgctgtgcagaaatattcacgtttgttaagcaacagcaaccctaacccaacacagtctgactggaatcgggttaaaacgtttgattcaaaatcgcaggcggaacttttgcaagcggctttggcagacttgaaaaagtataaccacccaaacgaaacgtacgacattgatttggttaattcgccatacgtaccgcttaatcaaaccgtccacattgccgatgagaatcaacagctattcctgtctgccaaagtgttgagcattcagcgcagccgtgctaaccactctgtcaagcttactttgggtgagttcgctcatgaaacagtcagctttgaccaacgcctcagtgagcttgccaaccagatgtcgaatatctcaaaaaccgttcaatactatccttggctccgctatgccgatgatgatcaaggaacaaatatgagtgccttcccaactggtaagaagtatatggcaatcgtttggtcaaatgagacatccgttccaagcgacaatccatctgattacgctggccattgggcactgattaagggcgaagatggcgccgacggtgttccgggtgcaaaaggcgctgatggccgtacaagctattttcacactgcttgggcagatgatgtaagtggccaaagtgggttcacggtgtctggtggcgatggaaaaaagtatattggaacgtacagcgacttcacacaggctgacagcacgaatccagctgattacaactgggcgctttttaaaggtgaagacggggatcggggacccaaaggtgatcaaggcttgccaggggaaccgggtgctgatggtcgtactgcttatgcccactttgcttacgcaaacagccaagacggccagaccgacttttcaactactgcccctaaccgcaagtacattggcttctacagcgacttcacatctggcgatagtacgaatccaagcgactataactggtcgctcattaaaggcgcagatggcgcggatggtaaagatggggtgccagggaaaccgggtgccgatggtaaaacaccatacttccatatcgcatacgccgatagcagtgacggcaaaacgaacttttcgctcgatactcccggctctcgcaagtatatcggtagttatacagactttacgcaagctgacagtactaatccggctgtttatagttggcaactagtgcaagggccaaagggcgacactggcccacagggaccacaaggacctcaggggccacaaggaccgcaaggtgttcccggaagcaaggatgtgccatacacatacattcaacttggtacgcctgctagtcccaagaaaggtgacttatggtggcacgggacaacgcttaatgatgccacagcattgcaatactatgatgggtcaacttggattgaccaaagcattcagcaggcagtgcttagcatcaaaaagctacaatcaattgaggttgacagctcaacctttaattctcctgacattaattcgcctttcagccatgttcagattgacggtgccaagagttctggcaatcttgaactcaaagacgcaagtcttagcatactgggcaacatcgaagacaataatggtaatcccaacggtcaatactacaaatcacttttgagcccaaatggaatgttcaactacatcacgacacccgatcgaaaggggagcgtgtcgtcagttgcactccaacgtggtgcacttcagttacaaacattgatcagcgaccccagtgccgctacaaaaaaatatattcagtctgaattcaaatcaacagacaacgtgacatttttctacgtcaatacaaccgcgctaagcaatattgatattgattgggcatatatttactacacaagacgtggcaatttggtgaccgccaactttcaaattcacacaatagctaatcagtacaatttcttgaggctcgcagatattagacccggttacaagccttatttgacaaacaagattgttgcaagctgcttgagcttttcagatcccggacaatctaccgctatgtattcaagtacgccaagcggaggaacggtcggctggtatagcaacatttccaaagcttctggtagttatggtggctcggtgtcgtatctaactcaggacgattatccgacgggtgattcatattttgcgtaactgggagatgacattatgaaaatcaaagtgtggacggatagcaataatcggctgcttcattgggcatatgctgatgaaaacagaccagtagggccaaccgatgaaggattcgaggttattgaagttgacgatgctgttggcttgtatgagaaccatgccagcgttattgacggccaagtcgttcctgatactggctatgatccagacactgccagtcctacacctgagccatctgaagctgacttagcaaatgctgaaactatgaagacggttgctagtctaactgtgtcaaacgcagctttgataaagcaggtggcaacattgaccaaggaggcaaaatcgtgaacgcatataaaccattgattatcagttactatcagcaaggaatctacaacaaggatgacttagccttattcgtgagtgtcggatggattagccaagcagaagtagatgagcttgttaagcaagtcgccagcaaaagctagcggctatttttatggaaggaagtataaagatgtggatttcaagagttggatagatatgtttgtggagttgggtggtggagctttgtttggttggtttgcaagccaatggcgcatgcatcgaaagcatggaaaggcaattgattcaggccttgtcggtttgcttcatcatgaggtttacatgctgtgtaaccatcatatcgaggttgggtgtatcagcacggacgacttggacgatcttaattaccttttccgcagctacaaagcactgggaggtaacggaacgggcgaagcgctatataacaaagttttgcaacttcggattaaaaactgaaaggaatgttcagtatgaagattaattggaaagtacgagtattaagcgtcaaattctggctggcattagtgccggcagctttgttggttgtacaaacagtggcagcggttttcggttacaactgggattttgccaacttgggcaaggagctcaccgcagtgatcaatgcagtatttgcactgttgaccattgtgggggttgccgttgacccaaccacagagggcgtcagcgacagccaacaggcgttagcttacccggcactcattaccaccaaggcagctaagatcaaggccctagaggatcagattaaggcgctgcaagcggataaagagaccgatcaggcagctttagaagctgctagttctgcggctccagctgtcgctccggcatcttcagcagcaccagaaccagcatctgcagcaccagctgaatcagcaccgacatctgttgctccacagcaataaggagggcaccatgaaattaaaaactaaactcatcaccttggtagtcgccttcttggcggctatttcttttgccctgccatcgcaagtgaacgcagctaagggtgatatcggtgttgattgggctaagtatcaaggtgcgtcaggaaagtatggcgccaacaacaagtttgctattgcccaaatcggtggcacttatggtggcacattaattgatcagtggacttacggcggtcaagtacaggctgccaaaactaacggccttcgtgctcacacctatatctggtatggggtaggtggcagttctgacattggtcggcaagcacttgactattatctgccgcgtgttcagactcccaaaggttcaattgtagcgctggactatgaggatggtgcctctggtgacgtgcaggctaacacagatgccatcatttatggcatggaacgaatcgccgctgctggttatacgcccatgtattatagttacaagccatacacattggctcatgttgactacaagcggattatcgcggcattccctaactcgttgtggattgctgcttaccctgattatcaggtgcgttcggtaccagactacaactggttcccaagcatggacggagttgctatttggcagtttacctccatgcatgtcttaggcggcttagatggtaacgttgatttgcttggtgtcaccgataatggatactcgaagcagccagaaactccgtcagtgcctgtaacaccggcaccaagccagccagcaaaatcaaatgcagccagtgatactgactatgcgcaaactggtgttttcaagccttccacgactgttaacatccgcactggtgccggcaccggttatgcatccgttggtagctatgcacccggtgaaagtgtgatttatgatcacgtgtatatccgtggcacatatgtttgggcacgttatctcagctactcaggcaggtatcattatgttgccttgggcgtaaatggtggtgagagctatggctcgcgttcgtctggatacacctcaccggtaagccacacgtattatacggtccgctctggtgacagcttctggagcattgccagaaagtatggcatcagcatgtacacgttagccgctaacaacggcaaatcaatctatagcctgatttatccgggcgaaagcctgtatatccgataacaaaaatgcctcctaccagtaatggcgggaggcttatttttgtgcacaaaatatgcacaaaatgtggtttaatactattgtatatacgtttattttcgcacttactctccgttttattgtctctagttgctttccatagcttcccaaaacgctgatatgacagtgttttgggatttttattttctcttgtttttggatgttttaaaaattttgagactaaattaagacctgctggacgagactagatctttattcttaaagcctatgctacaaaagtaaaattgacgctaatttttatttgtaataaatgtttaaagtacttgccattcttggctgtctccggtagtcttgtacaagtagtaagtaatcgtcatggaggattagctcagttgggagagcgtctgccttacaagcagagggtcacaggttcgagccctgtatcctccatcagtttacgtccgctgtcactgcgggcgtttttttgaattgttaagctaattcaacgtctaaactttgattgtgacatcgtgaaagttaaaaaaatcctccctaaactgttgaattaagggaggagatttagtgttgacggtggtatttatgctaaccatgcatgcgtgctaagtagagtaaaagggtcatgattaatggactgaattgataaatgtaacgaggcaatttaaagggacgacgactgttaatgacggtgacaatgatgaacatgccgccaatggcaatgaagtttattcgttgctgtacatagccaaggatggcaacgaccagtagaagaatcagatcggtccacttaggaaaacggttggcccaaagcccgatcagcgcaggtaaatagagaagcgctaggtctagtagcatggtgcgattgaagaaatgcaggctggcatagattagcgtaatttgaagtagcagggcctgaccaaaaacgacagtgtcaagccagagcgcaggcattttttgcgtctgtaaaagaaacgcaatgacgatttgaacaataatgagtggcagtagcagccattgattgattgtgccgatgataccgctaacgcctgctatgagcagtaggagcataagcttgtttgaactgacgagtgttgttccagcaagacatattgtcataaacagtaatgcgacaagttgaaaagtccagttgacttgcagcgccatagcaattaaaaatgggtaagcaagtgcctggcctaagaatgcgattgcgtaggcgctttgatcgatttttttcaagatggatgtcctttctatatagcctcattttacaaaaccacgttgccagagacaaagattttcggaatttttatattttttatgttatgctactagagttgcaatacattcccgatggggttcgttagcgattaacgaacatgccttgtaaccgaaaatcatgagggggaaacaaacgatgcaagaacgccatttatttacttctgagtctgtatcagaaggacatccggataaaattgctgatcaaatcagtgatgccattctggatgcaatgctcgaaaaagatccgaattctcgagttgcgtgtgaaacaactgtgacgacgggattggtgttggtggtcggcgagatttcgaccaatgcttatgttgacattcagtccgttgttcgtggcacgattaagaaaattggttatacaaaagagtctgggtttgatccggatagtgtcggtgttttggttgcacttgatgaacagagcccggatattgcccaaggtgtggatgaaagtcttgaggcccgcgattccgataccgatccgttagataaaatcggtgccggtgatcaagggatgatgtttgggtttgccattgacgaaaccgacacctatatgccattaccgatttcgttggctcatgccttgatgcgtcaaacggataaattgcggcacgctggcgaaatcagttatctgcgcccagacgcaaaggcccaggtaacagtagagtatgatgataatgagcagcctgttcgggttgatacagtagttctttctgttcagcatgatcctgacgtcacactggaagaaattcggcgtgacgtagaggctaaaatcattcggaagatcattccagctgacatgatggatgatgacacgaaaatttatgttaacccgaccggtcgctttgtcttaggtggtccgcaagccgattccggattgactggtcgtaagattattgttgatacttacggtgggtttgcccggcatggcggtggggccttttccggtaaggatgcgacgaaggttgaccgctctgctagttatgcagcgcgttatattgctaaaaatattgttgcagccggcttggctaaacgcgtggaagtgcaactggcttatgcgattggcgttgctaaaccggtgtcggtatctgttaacacatttggcaccaacgttatttctgaacaagtaattgaacaggctattcgcgagaactttgatttgcgaccagctggtattattaaaatgttagatcttaagcggccgatttatgaacaaacagcggcttatggtcattttggacgtacagatgttgatcttccttgggagcacttagataaggtgcaagcacttctcaagtatcgagattagcgagaaaagaggcggccttggacgggcgtattcccatccgggtcgtttttttatgctttggtagtgtgagattagcactggcatcgcgccggctcgcgcctcacctaacgcgctccccggcgcagaaccctgcgtgtaaggaccttaggcgcaatggtcaaagtgtgaccagcacggctaaagacggcttgattttaagaaaataggcgggaggacgggaaagttttctgatttaggcgattaagggaactgacattgcgttctataacacgctccccggcgcagaagtctgcgtgtaaggagaccttaagcgcaatggccaaacccgggccatcacgcttaaggccgcttacactccgacttttaatcgcgccggctcgcgcctcaccataacgcgctccccagcccagaaacctgcgtgtaaggaccttgggcgcaatggtcaaagtgcgaccatcacgcccaaggccacttacactccggtttctaaccgggctggctcgcgctcacattttttaaggagtaatttatgaagcagagaaaaacaaatgttgctgttgtgacggcggcaatttttatgggtacttttatgaccgccatcgaggggacgattgtctcaactgcgatgccgacgattattggtagtttacatggcgtgcatcttatgaattgggttttttcaatttttcttttgactaatgcgatggcaacgccgatttatgggaaattaagtgacaaaattggccgtaaaccggttttcttgattgggctgactatttttgttatcggttctttgttatcgggtttgtcgcagtcgatggtgatgctgatcgtctttcgcgcgattcaaggggtcggtgctggtgccattatgccggtgacgtttaccatcattgctgatatttatccgtttgaaaagcgggctaaaatgctggggtttaatggttcgatgtgggggattgcatctgtcattgccccgttactgggtggcttcatcgtggatcaattgagctggcattggatcttcttcattaatgtgccactcgggttaatcacttttggtcttgtttggttctttttgcaagaagatcggcgtcaggtacggcaaccgttggatatgcgcggtacggtctggcttttggttgcgttgttagcactgatgtacggattccagacgcttgctgaacccaatgcgatttggcagttagcggggatggcacttattgccgttgttggcttttggcgtttttggcaggcagagcggcaggcagttgatccgattattgatctaaaactctttgaaaatcgcacgtttatcattcataacttgattgccgcgttgatttcagggtttgtgattgggtttgaagtttatatgccgatgtggattcaaggcattcttggcatggatgcatcacttggcggttttgccgtaacaccgagttcgttgatgtgggtggtcggttcgttttttgccggtaagttactgggacgttttcaacctaaaccgattctgacaggggccatgttttggctacttgggggaagcttggtcttagcgctggtgccacagtcaacgccgtattttgtcttcctgctagttgctggctgtcttggcttgggatttggcttggtcattacgatcacaacggttacagctcaggcggtggtcagccctgatcaagtgggtgtagcgacgagttttaatacgttatcgcggacgctggggcaaactttgatggtttccgtttatgggatcgtgcttaacttgcggctgactcaaggcgtagcagctgatggccggttaaacagtaatatgttaaacgaactgatcaatccgcatacggcaaaacagttaccggctagcgttttgccaacgttacgtcaaatcctttatgaggggctgcacaatatttacttcttttcaattgtgattgtggcgctcgctttggtggccaatcattttgaagccaaaaaggttttagcaaaagctgccacgcaagaatctgatgaagaagcttgagctatgaagccggtagttacgttagccagttgtttgagccaaaatttttctaatcaagccgttgtattatttagcggacgggcataaaaaaatcggccttagagaacgtcaattcgtttctctaaggccgattttgcatagcagcgttcatcatcaagcgcgaaaagaggtatcaatcatttcagcaggttatcggtcgtttgctgattgatcgcggcggacggtttaatcggctgtttatataatttagcatttttttcatttacgacggccacgacatcatatgtggggtcattttcaagaggcccaaagtttagcaaggtttgctggtcatcgtattgaatgtcttgaaggcgggtactcatgaggacatgaagcatgtcggctttttgatgcgactttttgatttcttcactggctttagctaaggtataaccttcatccagcatggttttgatcatgacaattaacgcaatattggacagcgaataacgtttgttgccatttgcttcgtggcgacgtgaatgaatcaggtgctttttttcccaataacgaatttgggtaggggttgcaccggtgacacgacttgtttcgccgatgcctagtgaaatatcgagtgatcgcaaccgcttattaaacagttccatgaaaatctctcctctgatgagcgtgcgccgggaagcacgttatggtgagcgtgaaccagacgaatttgttaaaactgaatccgctgcctttaaaaaatatgcagcgactttcaaatcacaaccttgacaactagttagtttaaatgtaatataatctcttgtcaatattacattatgtgatattaaaagtatgaaacattataaagaaatcaggcgaagttatggacgttaaagatatcaacgggaaacctgtgaacgtaccgatgatggtgattaccctcattgtcgggacattcatcacggttcttaatcagacaattctctccaccgcgtttccaacgttgatgaaggcttttgatatttcaaccgcaaccgtccagtggttgtcaacgggattcatgctggtaaacggtattatgattcctgtttcggcttatttaagcgcaaaagtcccgtcaaaatggctctatatgagtgccatgagtactttctttgttggcacgctggtggcgtttgttgctaatagttttggcgtcttattagccggacgattgattcaggcgatcggcgtcggaattaccatgccgctgttacaaaacatcatgatgtcgattttcccaccaaatcggcgtggagctgctatgggaatggcggggatcgcgattggggtggcacctgcaatcggaccgacactttccggctatgtcatcgataatttcggctggcgggttttgttcggcatgatcctgccaatcgcggcgttggtgattcttgcggccatgttctttttcaaaaacgtgttaccactttcgaatccgaagctggatgtgccgtcgctgattgagtcgtcaattggatttggcgctttgttgtacggcttttctgaagtcggtaatgacggctggggcgatccaatggtccttggttccattgctgtcggactcatcttcattgtcatctttgggtatcggcagttgcatcttaaggagccgtttgtcgaattacgagttttcaagagtaagatttttgcgttatcgactgctttagggacgattgccaacatggcgatggtcggcgttgaaatgattttgccactgtatctgcagatcattcatggtaaaagtgccttggaatcaggactaacgctgttgccaggggcgcttttaattgccgtgatgagtcccgttaccggtcaggtttttgatcgcattggggcaaaacgcttagcccagttaggtctcttcttcctgacgattgcaacgttgccgtatttcttcttaacgacgaatacgccgtcaatcttcattaccgtgatttatgcggtgcggatgtttgggatttcgatggtgatgatgccattgaccaccaacgggatgaatgcactgacacctgatatgattcggcatggtaccgcggtgaataacacggtacgccaggttgcgacttccatgacaacggcggttttgatttccgtgttgtcaaatgttaccaacctcgccaagccggctgccagcttgttgaagcgtaatcctttgcagtataaacaggatttcctcaatgcaacattaaacggttaccacgcagcctttttattagcagttggctttagcctggttggctgggtgcttgcatttttcctgaatagccacgccatgtcacaggaaatcacgattcaaccagaaaagaaggtgaaggcatgattctttggttcttaggtctaatggtcattggcctttatctcagtttcatcatgatgcatcgatcggcaaagcggagcacattaattgccattttcagtattggcttgatgggcagtctgttactgatggtgcttaacgataatgcccattttggaatggaaaaacgaacgactacggatgaacaaacgatttatacggcatcacccaatgcgcagatgccaatgttattgaagcaaaatgttggcactgccggtaagcatgttgtctacatctataaaaccgatcctaagaaaaaagtggtgcataccaaagcagatctggctgtcagcaatcaggttgtgcagacgacaggaacaacggcttcgatgacaagtcgcacaactcgctgggaatatcaaaatagctttttcagtgcattgtttaaccaccaaggtgcaggccagttggtggcacagcataatcgactcgtgatgcctaaaagttggattgagctgacgacgacgcaagccaaacgtctcggcactaagctcaaagccttgcaacacccgaatgctcagcagaaagcaaccatggctgccgcggtgaaagccaaagctgctgagttggctcatgcgaatccgaaactggcgagcgatcaggctgcactgttgaaacaagcacaagcaacggttcaacaagcaatgattcaacaggcggttaaagaagttcaacaacaaaaataaccggtccgagttaatgttgatgacgatgcgacaatcaaaaagcagatatcagccgttaaagctgttatctgcttttttcatggcgctgatgacggcgggagaaatacgggctaaagtaccaccagctgagcattaataaggcaaacccgagcgcgaagcctgcgaagacatcggttggataatgaacccgcacaaaaattcgcgaataaccggtcaatccaatcatgccgccagccaataaggttatcgtccatttaacagtcggtcgcctgacaaaagtccatgctaaaagaatcaaggttccataaaacatcatcgtgccgcttgaatgcccacttggaaaactgaacccgccagcctgtaccaaagcgcgaatttgcgggtcggcgatgaatggacgcggccgttggactagatatttaataccaatatttagaatccccatcatggcaccgacactagccgtaaataaagcggcgatacgataacgatagatcaaaagcacccctgctaacccgagcgttaaaaaaatcagaatgctcggattgcccagttcggtaatgacgatgaggattggctttagcgcatccacatggaaccgggtcacaaatgcgatgacatgctgatcagtcgtttgaatccagctggcttgattgaggatgccaattaagaaaataatgaagatcataaaagcagtacctgaaaaataaagtggcaatgaccgacgatgcaacaagacaacctcctgtaaacgtaaattgataaccgactgaataccgtttagtcggcttttggttaatccacggtgacgcgttgacgtttccgcagattgacaaagaaaataactaatatgactagaatagcataaagaccattgaacactttcatggtttttgctatgattgacgcaatcatcaaacgaacaaaggagtagtaagtcggcgcgggtttcagagagcaggcggtggtgcgagcctgacgatgctaagactgaactgacctttgaagttgctgcggtgaacggagtaatcgcagccggccggaccgttaccccttttgagcgctgtgaaagcagaacttaggtggtaccgcggctgagccgtcctaatgaagactagggcggctttttgtttgaaaataagtgggaggtaacaaaatggcatacgatcatcatgagatcgataagaagtggcagcgttattgggccgaacataacgaattcaacaccacaaccgatccgaagaaaccgaattattatgcattagacatgttcccatatccatcaggccagggcttgcatgttggacatccagaaggctacaccgcgaccgatattgtggcgcggatgaaacgaatgcaaggatttaacgttttgcatccgatggggtgggatgcattcggtttaccagctgagcaatatgccttgaataccggtcacaatccccggacttttactaagcaaaacattgaaacgtttaagcgtcaaattaatagccttggtttttcatatgattggaaccgggaaattaatacgaccgatccgaattactacaaatggacacaatggatttttgaacaactgtataaacatggactagcgtatgaagctgaagttccggttaactggagccctgatttgggaaccgtagtcgctaacgaagaagtgattgatggtaaaacggagcggggcggttttccggttgttcgtaagccgatgcggcaatggatgctaaagatcacagcgtacgccgataaattacttgcagacttggatgatttggattggcctgaatcaatcaagcagatgcaacgaaactggatcggcaagtcaaccggggcgcaaatcacgtttacggtcaccgatactcaggaaaagtttgacgttttcacaacgcgtccggacaccctttttggcgcaacttatgtcgtcatggcaccagagcacgacttggttgaaaagattacgacgccggaacagcaggcagttgttgatgcttatattgaagaagcggcacataagtccgatcttgaccggacggcgctcgataaggaaaaaaccggcgtctggacaggtgcttatgcgaccaaccccgtcaatggcgagaagttgccgatctggatctcggattatgtgctggcaacttatggtaccggggcgattatggcggtgccggcccacgatgatcgcgactatgcttttgctaagaaatttggcatcgaaatcaaaccggtgattgaaggtggcaatattgacgaggcagcttataccggcgatggcgtgcacattaattccggctttcttgatggcttaaacgaacaggatgccattgatcggatgatcgcatggctggaagataaaggcattggccaggaaaaagttaactataagttgcgtgactgggtcttttcccggcagcgttattggggcgaacccattccagtgattcactgggaagacggcgagacaaccctggtaccagaagatgaattgccgctgactttgccggaagaagttgatatcaagccaagtggaaccggtgagagcccgctcgccaacctgactgactgggtcaatgttgtagacaagaacgggcgtaaaggtaagcgtgagacgaataccatgccgcaatgggctggttcttcgtggtacttcctgcgctttgtcgatccacataacaaagaggccttggctgattatgacaagctcaagcagtggatgccagtggacctttatatcggcggggccgaacatgccgtgctgcatctgctgtacgcgcgtttttggaatctgttcctttatgatatcggcgcgattccaaacaaggaaccattccagcgcctgtttaaccaaggcatgatcttgggtgataatcatgaaaagatgagtaagtccaaagggaatgtcgttaaccccgatgacgtggtggacgaatacggtgccgataccttgcgcctgtatgaaatgttcatgggaccattggatgccggtatcgcttggtccacggatggtttggcgggtgcccgcaagttcttggatcgagtatggagcgcctttattgatgatgaaggcaagctgcgcgatcgtatcaccaccattaatgacggtcgtttggataaggtctacaacgaaacggttaaaaaagtaaccgaggactatgaggcgttgcattttaacacggcgattgcccaaatgatggtcttcatcaattcggcgcgcaaagacgatgatttgccgctagaatatgttgaaggctttgtcaaaatgctcgcaccgatcgcaccgcacttgatggaagaaatctggcaacggctgggacatgatcacagcttaacctatgcgccgtggccaagttatgacgaaagcaagcttaaaaccgacacctacgacatgatggtgcaggtcaatggcaaacttcgtggttccatcactgcgagcgttgatgagactgatgacgagatcaaacaagctgctttagccaatgaaaatgtccagaagtatacgacaggcaaggatattaaaaaaatcattgtcgtaccacgtaagattattaatatcgttgctaagtaatgtggttgcattttggtcagactgataggataagtttgattgccacaattgcggttctagagacaaaaactgcctctggaatcgcttttttggtgagcgcgagccggcgcggttagaaagtaagcgtgagccagcccgcttagaagccggagtgtaagtggccttgggcgtgatggccggtctttggccattgcgaccaaggtccttacacgcaggcttctgggctggcgaacgcgttatgggcgtaaaccagaatataagtggcctcaggcgtgatggccggtctttggccattgcgcctgaggcccttacacgcagatccctgcgccggggagcgcgttatgggcgtaaaccggagtataagtggccttaaccattatgtgaaggcaatggtttagtttacgtgactacgattttcaaagatttcttttgattcaacaaagaaactcagtaaagattgcaagtgaggctgggattgcctaaaatataaaggattacgcaacacgacaggagcttatcatggaaaattcgctgggcggcgggacgcaaccgccacgttcagacaaggaaaaaatgatccgcggttcggcgtggatgactgccggcagtgttttttcgcggattcttggtgctatttatgtcattccgtggcgtatttggcttggagcggcttttttaacggctaatgctttatttactaaaggctatcagatttacagcctgtttttgattatttcaactgctggtgtgcctggcgcggtttccaaacaagttgcccgctataatgcgatgggtgaatataaaaccggtatgcggcttttttatcacgggacatttgccatgttcattatggggatcctgtcttgtggggcaatgtggttgctagcgccattgctcgcagcaggggatgcccggatgattccggttttccgctcgttggcatggccactgttgctgattccatcgttgagcctgattcggggctttttccaaggctataacgaaatggcgcctagtgcgatcagtcagtttattgaacaggttgcccgtattctgtatatgcttgtcatgacttatgccatcatggttgccggtaaccatgattacctgaatgcggttgtgcattcaacctttgcggcattcattggggcagtttttggacttggcttattggtcgtgtattttgttcggcagaaaccgcgattggatactttggtggcacacagtaaacaggcgctcaatatcagcgttaacgaaattttagttgatgttgcgcggcaggcgattccgttcattatcatggattcaacgattaatatttactatattgttgatcaatacacgtttaatccaatgatgaaggcgttctacttagttagcgaagatcagcttgatcggttctatgcattatttgccggcaacgccaacaagctgatcatgatcattgtcagtcttgcagtggccatggcaattacggttgttcctttgctggctggcgcaaaaacgcgcggggatgttgaaggtttagcgcggcaaattacgaacacgttgcagcttttcttcatcgtcatgattccatcggcgttaggcatggtggccgttgcgcgtccgttatatgttttgttttatcgtgatatggacttccttgggattcgcttgttacaattttcgtcaattttggcgattcttctaggattatttacggtattggctgctattcttcaagggttgtttaataatcgattggcgattcaggagatgctggttggtctcgctgttaaagtcattgcgcaatggccgatgatcttcttctttaatgtttacgggccggtgatggcgacaatgttgggcatgacggtgtctagtttgttgatgttgtattcgactaatcggatgtacaatattcatgtcagacagaccattcggcgcggcgtcggtattttagctttttccctgattatgtgtgcggtttgctacttgatcgtggacgtatccggtattctcattaaccctgagagtcagtttggcgcagcgtttgttttactggtagcagttggtgttggcgttttgatttacggttatttgattttgaaaacacgtttggccgatatgatcattggtgcacgggtcagtcggctgcgcgaaattttacacatccggtgattttatgcgattagataaatatttaagtcatttacagtttggtagtcgaaaagaagtcaaagccttgattcgcgacaagcgcgttcggattgctggggagttagtgacggatccgggctacaatattcttccgggtgttgccgttgaggttaatgatgctcaagcggacgggccacttgaagtcgattatttaatgaacaaaccggctggcgtcatcaccgcaaccgaagatccaacgcaatcaacggtattggacttgattcgaccgcatgattatcggcccggcctttatccagtcgggcgccttgataaagatacaaccggactgctattgctcacaactgatggcaatttagggcatactttgttagcaccgaaccaccatgtgccaaaaacttatgccgctaagttagccaaggcacttacaactgagatgaaacaccagttagaacatggcgttgctttaaaagactttacaacggcaccagctgatgttcaggttgtaccggcgactgacaataaagaaatttatatcacaattacagaaggcaaataccaccaaattaagcggatgttgctggccgttgataatgaagtcgtcgcattgacacgaattgcaatgggaccattacgtttgcctgaggacttagacgccggtgagtatcgggcactgacggatgatgagcgttcgctactggatcagatggtacgctaagtttaagctttactttttcgttaacggatccattgtcatggcatagttgcacccctatactgatagacaagaaagggtgagcgcaatggaccaacaacaatatatttgccccaaatgtcaaaatacaagctatatttcggatcggtttcaggcaacgggcggtaatttttccaaaatctttgatgttcaaaacaagaagttcgtgacgatttcgtgtacccgctgtggttataccgagctatatcgcagtgaaaccagttcggggatgaatgtcttggattttctattaaatggcggttgattttgaccgatttggcgggtcgtgttcgttaagattcatgaagatgagcgccgcagacgacataaaaacgtccttagaagttcgaaattctaaggacgttttttgactgcgttgattgtcatcttttgagctaatttgctgattcggataattgcttcaggtaggctggtagttcctgaatgaccatggttggtaaggcgacgtagctgttcatagctacaatgtctgctacatgcgagtgaacaaaaaccgcagctaacacagcttgggtcaaaggatggaattgccccgcaaaagcagcaatgatgccggttaaggtgtcaccggagccgccagttgccatggctggtccgccagctgtgttggcatagatttcgtttccgatgaatacatgcgtttgggcacttttggcaatgatgattccagggatttttgcggctgcttgttgactggcttcaattgtttgcgctgcgagtgccaagccggagagacgttgccattcgacttgatgcggtgtccaaattagctgggcttggggataggcgaggtgatgagcggcgacaagggtaatggccgaactgtcaataatgagcacttgggcttgactaacggctgcaaagacacgctttaaaattttcaaagcagtcgtgtccgtgcctaatcccggtcccacaacaatgacggtcgcttgatggatcgctgtctccagtgccgaagtggaagcatccaggatcatcgcttcaggtaagcgggcgtgtaaagcgctgcgattgacaggattggtcgcaacactaaccagtccggcaccggtgtaaacagccgcactggcactcataattgctgcaccaccatattgcgcattaccgccgatgataaggattttaccgaagctgcctttataagtattccgtgatcgcggacgaacaatggcacgcgctaattgttccgtcagttgtttcatggtgtgggcacctcttttaaaaccgtccagtcattaaatgtttgcgtggataaattcggggtgccggtttgcaggtagtctttggcaaacatgacaagtggtgaggcgttttcccaagttaactttgctagcggcagggcacatgctcccagtgagtcttgacctgtaaactgtgggactgacgatgccaactgtccaccggttaacgtcaatgcatagaacacgcaaatatgttgattaatcgtccaacgttcatattgccacggataaacaaagctggttgcccctaactgtcggtcgattgtggcagttaggccggtttcttcgctaaactccctcaagacatcatgctcaagtggttcgggaccatccaagctgccaccgggaagatcgaatcgatgaatgtacggtccgccatttttccgaatgacgatcaagcgctggtcaatggttgcaatgccataacagccaaacgcgcgatgggttttatgtgtcattgtctcgcctccatcgtctaagcgtagcacggagagggaggtgagacaatgagtaccttggctggtccccattttgtccccctggaaacaaaaacaaagccctcctaagataacctaggagggctaaaacgttgatgtataggcatttcattttctaaagaaggctaaaatatcctatgaaatgccgcgaacaggaatcgaacctgcacgggaataaatcccacagcgacctgaacactgcgcgtctgccagttccgccatcgcggcaacaacaataatgattatagcggatgcgtagaaggggcgcaagcaaaactttaaatatttttccgggttgtccgattcaaaaaatgttaggataaagcaacgtgattatttgagaagggtggtagcatcatgtcaatttacgattttgaagtaacgctagaagacggttccaagtattcattgaataaatataaaggccggccgatgttgatcgtcaatacggcaaccaaatgtggttttgccccgcagttcgacggtttggaagcattgtataaaaagtatcaaaaagcaggcttgatcgtgttaggatttccatcaaatcagtttaagcaagagctggcggatggacatgctgcagcagaggcatgtcgaatgaagtacggggtcagctttccgatgcatcaactgatcaaggtcaatggtcagcagacggcgccgttgtttaagtatttaaagaccgaggctccaggtgaattgggtaagtcgatcaaatggaacttcaccaagtttttggtcgatcgcaacggtcatgttgtgaagcgctttgcacctaaaacaactcctgaagcaatcgagccagcggttgaggagctgttatcctaaggctttaaaaggattgccggatgactgattgggtacttgatgacggtggacatggttctactggatgcgtacaatgacaacaaaagcaagaaagcagggatcattgatggaagatttgccaactgatattgcaacgtttgtggacacgcacttagttgatcgccataatagcaatgctgtgaagtgggacggtctgaaagaagaatttggccgggctgacttgttgcctatgtggattgccgacactgagtttaaggcgcctcaagcagttttggatgcattgacagctcgcgtcaaggaagggacgtttggctattccattcgcccgcagtcttattacgaagcgttcattaactggcaaaaagaacgacacggcatcacggttgaacctgagtggatgcgttttggcgttggcgttgtcaaatcactgtatgcgatggtgaactggctgacagaacctggtgatccggtcctcatcatgcagccggtttattatccctttatgaatgccattaatgatcttggacgtaaagtcgtatcagttgacttgcaattaaccgctgatggttggcgcatggattttgaccaattagaaaagaccttggcggcgaatgaaattaaagcgatgattctgtgttcaccgcacaatccggttggtcggatctggacccgagatgagttagaacaactttttgccatcacaagtcggtatgatgtgacagtggtttctgatgaaattcacggtgatcttgaagtgagtgggccgaagtttacatccgctctacaggtcgctgaaggtaaagctcgaaaaaagcttgttgtgctcaatgcgccgtcaaaaacatttaatttagccgccttgctgaattcacacattattattcccgatcaagcgttgcgtacgagttatgatgccttcattaagcagctgcatccggttgatacgagcttgatggggcaagtggccggtgaagctgcttatcggcatggcgctgcttggttagatcaggtcttacaagtggttcgctacaattatcggcaactgcaagcttgtttagccgcggcggcaccacaagcgaccctggccgacttacaagggacttatttggctcatgttgatattggtgcttatgttgcgccaagtcagatcaaagactttgttgaaggggtgtgcggattggccgttgattatggtgcatggttttcaccgcaaacggcaacttatattcgtttaaatttagctactgatcctaagcttgttgccgaggcgattaaccgactaaccactcatttggcacagcagccgcagcggtgatcgggacaagaattaaattgcctttttcaagataaaactcgaattcaaagagacggaatggttctccttgaatccgagcttttttaatattgtgctgcacaaaccagtttacttgatatgggacgtgttatcgaagcttgaggcgtaaatactgatcgcctagattgtgatcctgaacaatggttttcagatatcggcgtaacatggctgaacgttcaagcacggaccaaccggggtcggcatgcaaccgtttaagttcagcgcgacttggatgatcatttccggtgaaaaagcgccaattcaaaatacccattaatctggcagcggcgtcaagatcacgctgattggtcacattattgtccattaaatcaccataggctaacgcttcaccatcttgcagaaataattttttcaagtaacgctgatagtgcaagagatcaggattttttcgctgttttgcggtgagataaggcgtcaggtcggtgatctgtttttgataagtaatttgctggggaccaaacgtgacgaccccataactagcgggactaatagaaaatgcaccactgacaatttcgatagtcgggcactggccagctgggtcgcggctgatgtcttgagcatgaatatgcccggagaagactaagggcacgtgatagcgggttaacaatttttttaacgcgtcactgttgtctaaaacataaccttgattgacggcttcgttatgcgtgtatagattgtgatgcatgaaaataattgacttgcgatgcgcgcgggcacccagcgctaattggcggcgcacccaggtcatcgtttgcggagaaagcttaccacctgtattaggcggacgattagatggctcaatcgtgtaaatgttgctatctagcagcaataattggtattggtgattgagatttacgcgataacttagactgttcccatcttgggcagcagcttgttcataactgctgtggaagatctggcgccagtcgctggggctaatttgttcagtcaggcgttgttggcgtcccttataagcgcgggcccaaccgtcataaatatcgtgatttccggggatgattaacactttaatgccgtggtcaacaagcggttgtagtcggtgcatcaagctttcagcactggttttctcaccgttaaacgtcacatccccagtgataattaaggcggttggccgtgattttaaggcgttttgcactaatgcatgaatagcaactggttgataatccatatctttacccgcggctgatcgtttgatttgggtataggcgctgcgttcatcgtgcaaactaggcgcaataaaatgcgtatcactaagcacccagatgcgtggatgggcatcgtcagttaacggtgtttggtgatcagggtggatttgggttaatcctaatgcgagcaggaacataccaaacagtgctaccaaatatttaccgactttcattttctgcctccaaagttgattctaccatgacaaaagaccagcgccagattgacttatttaggtataagcattaattgccggatgcgaatttgggagtggaggactgcaggcagttgttgaaaatcttcgcagcttacttcatcggttatggtaaaataaagcatcgtttcaccgtatgaaccaaaataattgtttttaaagagaggaaagaatcatgcaagtcatcgtaaccgttattgggacagataaggtcgggatcatagcgcaggttaccactgcactcgctaatttagatgttaatatcttagatgtgtcacaaaccattatgcaaggcgcctttaccatgatgttattggctaaaattccggatgatgccagtttcaaaactgttaagcaacaactaacagctttaggcgacaaaatcggtgtggagatcaaagtttcccgtcaggagatttttgacgcgatgcaccgtctgtaagctggtttagtcataacgcgttcgccggcgcaggggtctgcgtgtaaggaccttaagcgcaatggccaagaagcgggccatcacgcttaaggccgcttacactccgacttctaagcgcgccggctcacgctcactataaaggagtagcttgatcatggagacgcaacagattaaagaaacaattgaaatgatcagtgaggaaaatctggatattagaacgataaccatggggatttccttgctggattgtgtgacgggtaatttacaaacaaccgctgatcatgtttacgctaagattatgaaaaaggcggccaatttggtagcggtggcggatgccattagtgatgagtatggcattccgattgtgaataagcggatcagtgtgaccccggttagtcttttagctggagcggatcaaatgcttgattttcggccggttgcctatgcgatggatcgtgccgctaaggatctgggcgtagatttaatcggtgggtattcggcattagtccaaaatggcagtaccaaggccgaaaccgcgctgatgaagagtttgccggaagtgttagcaacgacagaacgggtctgcgcttcggtaaatattggcagtacgcgtagtggattgaacatggatgccgttaagttgatgggaacggtggtcaaacaggtggctgatcggaagccgcaaaatgccatgaagctggtcgtcttttgtaatgcagttgaagataatccgtttatggcaggagccttctgggggatttcagaaggtgatgttgcgatcaacaccggtgtttccggtcccggcgtggtacagcgcgcactcgccgctgaaccggatgccagttttgaacaagtatgcgaaacaattaaacaaacggcatttaaggtatcacgaatggggcaatttgttggaaaggttgctgctgatcggctaaaggtaccgtttaatattgtcgatttaagtctcgcaccgacgccggctcaaggtgattccgtcgcccagattttagaaacgatgggtcttagccatgttggcacgccaggaaccactgcggcactcgctttgcttaacgatgcggtcaaaaaaggcgggatcatggctgctgaacgagtaggcggtctatccggtgcgtttatcccggtttctgaggacgccaacatgatcacagcagcggctaatggtcaaatcagtttggaaaaattggaagcgatgacggcagtttgttccgttgggttggatatggttgccgttcctggtgatacgccagatgcagcaattagcgggatgattgccgatgaagcagcgattggcatgattaacaataaaaccactgcagtgcgcgtgattccggtacccggtaagcaaatcggtgatcaagtcgaatttggcggcttgtttggaactgccccgattatggcggttaatgatggggatgccagtcaatttattaatcgcggcggtcgcatcccggcaccaatccatagctttaagaattaacccgctactttaaattcttagcatggaagcatttctgatggccggtttatttttttaataacgtactttgcagttgcattcgaaaaatgccttgcccgtctcatgattttatggcggcgcaaggcatttttaattgacggcgtaatctattcatgaggtgagaatgatgtttgtagcgttggatgaagaaaaccggcgagtcatattaaccagtcatgaacaggcgcaacaactacgcaaccgatcgttccattgtccaatctgcaaacaacacgttttgattaaaaatggtgtggtgatgccggcacattttgctcatcggcagcgatcagacaatgaaggagaaccggagagtgtcgaacacctgacaggtaaaagttggctggtaacctggcttcgattgcatcagcaggcggctacgttggagtactatgatgccaacattcggcagcgggcagatattcttgttcaccgtaacccgccaaaagtattggaattccaagccagtccgttaagtattcccgatttgaaaaagcgtaccacgatgtatcacgcgcgtgggtgggaagtcacttggattttaggacggcggtatcagcataaccgtggtaaaagacaggcacgaaagtttttaacgttggaagacaacttgttgacactgtggtatttgaattcgcaagctggcaaacttacacgggttcagctgatgccaaatggacgtctattgacttattatgttcagcggtgctctcctaaacaatgttggcaaccggaactggtagatgggttgcgtcagactaggcatatcggtttgtctttacaaaagcgagtaccttcatggctggcgcttcaggcgttagcatatcagcagcatcataacttacacggggttccatggattgtgcatcaccgttcacatccgctgcggcattttggcatcccggaattattgttaagggttaaatggttactgacgtttgaagggcggacgtttacggatcgcgacaatttaaacttctggctggcggcgctaccgaatgtctggacgccgttgttgccagcaggaaccctcggcacactaatcggtaaacactggttggaactgctacaaacagctgggtttattcggcgtgatcatttggggtatcgttggcgtcagttaccgcactggtttacggatattgatcacaaacttgttgctccatcatgcatcgtcccaagcgcaaagccctgagagaaaggactcagaagcaataacgacgatgggacagcgcggtcaattgcttcgttaactcctaagtgcgccggtttaagcgtaaaaaaaaccctgcataatcgcagagcccgctaaaaaccagtaaattttagtttatttgatgttgccgctagcaaaaaggttgggttaaaatccaactacaaaagttgcttcattcagacgaagactaagtgttggtgaaatcaaagttgcccatagttagaaaaatcggaaatgactgcccatgttttctggtcgctcagtaaagaagtgggagggatcggttcgaatgagctcgcaaaggcggggaataagatcaggatcactaatctgttcaattaaaacggcatgcccatcatcaactttgcgatcggtatcgacaatcaccaaagatggggtttgggtaatgcccatttgattagcagtgcgttgatcggaatcaaagcccattttgacttctgaccgttgtcgatcttcgtaaaacatctcatgatctaagtggcatttggttaacattttcgccacaaacgctgcatcgtattgatattgaactaaaggcgcgtgctgttgtagtcgtaacagcaacatccgggcctttttgtttccttgatattgggcagctttgtaatctaaagcaagattataagcagctcgcaataactggttgcgtttggcgaggctgtgaacatttaattgttcgcactgcataaactgttcgataatatccagatttaaaaccggaacaaagtgaactttgacttcctgttcgaatttgtccaactggtgtagcagcttttgttcggtgctaagacagacactgccaataggattgaaaaaaagaaagatttctaacacggtcatggcctccaatttgctggcaacaaatttctatacttactttatcagaaaaccgaaaagtaacaattatttagcttgtgaatcgtgcacatgcatgtatgcacgttgcaccttattaataacgggttgtttttttatgtgaaaatggcgtagtaaatcatcgtaaaatttttgcgctacagcaagattctgatactccatttccagttcaaaatcagaagtctggtcgatataaaaggtctgatcgagcgttaacaaaccagccggcaaatgggcaagtcttctggttgtcttggcttgggtttgaggagcaaccgttgccggatcaatcccccgggcagccagagcctgagtcacttggcctgatttgagctcgccttgttcgattagtttctgtgcctccactaaactcaatggatcggtgatttcttctaagtcgcgctgggtactttcattaggtactttaagggtttgttccgcatggtcggcaaactgacggatacgcaaaccaagccgcgctgctttgacagcaccgtcagctgtgtcataataggtgttcatttggctaaaggccggttcaaaatcaaaataattcaaaagcgctaagaaagcatttttgcttaaacaagttttgaattcctgctcgcgggaaatagacatgatttgcctccagaaacaacggcaccggttacatgccaaaaatatgatagaatgatggtcgtgagtgtcatatttagccaaagtcaacatcgcgtttagctgacgtggtgacgactagccagatggacatcacattatctagtagtttagtatgggagggccagtaatgcaaagggactgggacagtttcttaatgccatatgaacaagcggtcggggaattgaaaatcaaatttcgcgggatgcgtaaacaatttcaacaggcaaacgagcatacgcccattgaattcgtgacggggcgggtaaaaccggtcagttcgattatcgaaaagcaaagtcggcggtttatcagcgatgagctcctggaacaagacatgcaagacattgctggcctgcgcattatgtgccaatttgtggaagatatttaccaagtggttgacttgttgcggcagcgaaccgacatgaagattgtggaagaacgcgactatgtgaccaacgtcaagccctcaggataccgcagctaccatgtggtcatcgaatatcccgttcaattgattcatggtgaaaaaaagattcttgcggaagtccagattcgaaccatgtccatgaatttctgggcaacgatcgagcatagtctgaattataaatataatggcgagtttcccgatacgttaaaggcgcgactcaaacgcgctgctgaagcttcctttatgcttgataaagaaatgtcggatattcgcgaagaaattcaggaagcacaacatttatttgtctacggtaaaggccaacagccgtattcagatacaaccgatgactcaaagcctgatgataaaaaggatgaataagatgcgtgtgacagtttttcataacagcatacctgcttcaattaaagcagcgcagaaactacttaagttattaaaaaatggccattttgaactcgatgagcgccatcctcaagttgtgatcaccattggcggcgatggcacgctgctgtcagcctttcaccgttatgccgaccaattggatacgattcgctttatcggcgtgcatacagggcatttaggcttttatacggactggcgtgattttgaaattgaggatttagtcattgctttaaaagaagactcaggccaaagtgtcagttatccgctattagatgttcgggcgatttatgcagatgctacgagtgcccattatttggcgctgaatgaggcaacactgaagcgtctgaatggcacgatgcggacagaagtttatattaaaggcgacttttttgaaagttttcgcggggatgggctgtgcgtctcgacaccgaccggatcaactgcctatagtaagtcaaatggcggggccgtgattcatccgcgtcttgatgccttacaaattacagagattgcctcaatcaataaccgggttttccggaccctcagttcaccgattattaccgcaccagatgaatgggtcactttggaaccaaccgggcgggatgattatgtgatgacagttgaccagtttgtgattaatccgccgacgattaagcagattcgttataaaattgcaaaagagcgcattcactttgcccgttatcggcacatgcatttttgggaccgtgtggaggatgcgtttattggagcaaaacattaatgcgatttgaatggcaatacgagggaccgccgctcaaattggcggcttttttaaaacaacagggtttctcccgggcccaacttaaaaagctgcgttatcaaggcggctttatttttgttaataaacggcagcggcatacagcttatccgctgcgaaacggcgatcggattctggtccaaaccgcgcctgagcaagccgccgctagtgttgtcccgtatgaacatgaatttccgatttgttatgaagacgatgattacttggtcgttaataagcctgccggggtagcatcgattccagcagttggccggcgaaatgacagcatggccaatatggttaaggcatatttgattaagacccatgcagaaagtcaggcagttcatgttgtcacgcggctagatcgcgacaccagcggcttaatggtgtttgctaagcatagtttggcgcacagtttgctggatcggcaattgcacagcgagaattttttaaaacagtacttggcgctggtgacgagtaagtcattgctgtccgcacatggctggattatattgccaattggtgtcagcacaggattttacatgcgccgtgtcgtcagtgagaccggtaagccatctgtgactgaatatcaaacacttgcgcaaaattcgcacgccgccgcggtactggtaacgttacacacaggccgtacccatcagattcgcgttcattttgccgcgatcggacatccgttgtttggcgatgatctgtataatcggcaagctgatgatttcaagcggcaagccttgcattgcgcgcatttgcggttttggcagccgttgcaaaaacagtgggtcgatttgcatgcaccgttaccaactgacatggcaaagcttagcgaccacttgcatttaccagttgtttattaggcatggcgtcattgatgaaggggacactggcaagtcgtttggccgcatgaagactgagacatcatttgcagcttctaaataaaagtatcccattttcacgcgatcgcgaaaatgggatactttttatttttgccactgtcaggttaaaaattccctttatgatagccggaatcagcatcgaacttaaattgtttcttgagtccgttagttaagtaaatctttttgtcgttggtgataaagatggcttgaatgtgctgactgtttttggcattcatgtactgtaagccatccttgagccccttgtcaaaagcggcgtttgacaaggcatccccgtccacgctgtttttggaaacaatggtgaccgaggccagattgttgtcgtatgggtaaccggttttgggatcaaagagatagatatatttgtgaccgtgcgagattaggtattgctcatatgtgccggcagtgacgatggattcgttgctttccgggattgtcccaacggcagtaccgcgcgcggctgtcgggtcttgaatcccgacatgccaatcacgtttcgctccaagtggtgaatgacccatgaccacgacattaccgccaagatcaataatggcggcggtcaccccatctttacgcaagacttcgcgaaccttgtcggcaacccaacctttggcaataccgccaaagtcaagccgcatcccttttttggttaggtaggccgtgttgtttttggtgtcaagcttgacatcgcgccagttaacgagcggcaatgcttgggtgatttcgctttgtgcgggaacacgcgcaccaggcagcccgatttgccagagattggtaacagcaccgattgccatgtcaaaactgccatttgagtttttggagaaataataggccttttccagtagcggcataaaatcttttggaaccttgacaggcttgacaccggcattggcgttgattttatcaagcactgaaccgccacgagtcaaggtagcttcggcgtcaacatgatggatcatcgcaaaaccatcttttaaagctgactttttgcctttatcgtaaatggtaagcgtacatgttgtccccatgacgaattcattacgtgtatatggcgtttttagataggtcgcctgtgttttcttttggcacccggctaatgttaaaagtcccatgaaagcaatgagaccgatgaatattttacgcatgttacttaaccctcatttcatttttccctttaatatcataacgctcgttttctaaaaagaaaaacgcgactcgcctcactgtgatttagacgaaccgatattggccaagtcaggtttaccatcaacgaattacttgggtacattaaaaaggccgacctcagagacgaatttgtctctgaagccggcctttttagtgtcttgaataaacaaaaaaagctagaaggcgatcaatttggtgccatgaagctccttaacgcctaattgttcgctgatagtagcggcattttggctagtgatgccgccgccgggaagaatcgtgatttgtttttccgctgcatgggcgatcagcgcctgtagatgtggcaaggttgtttcaattggcgttgatagtgggccaccatgcgtcaaaatccgatcaacgtgatgtgcggctagccagtcaatggcggccagctgcttggtttcgggaatggcatcaaaagccatgtggaagacaacactcataccggcgcttgctgcgatcaaactcgtcatggcatcttcatcaattgtcccgtccggcagtaaggcaccgaatgcaacgccatcaacgccaagtgcctgcgcctcgaataaatcggcttccatgattttcaactcggtgtcattgtaaacaaaattgcctccgcgcggccgaatcatagtgacgaggctgcgaccatgttcatggacatacttggcactttcagccatcacacctttggaaacggtcgtcccaccaaccgccaaattatcattgagttcaattcgatcagcgcctgcagcaagtgccttgggaatgtcggtatagttttcaacagcaacttctcgtaacatggtaacctcctgtcgttatttaaagaaacatcacaagtaacacgatggcacccagaatgattcgataccagccaaacggtttgaagtcgtgcgtttggacgaatttaagcagccatttgatagcaacgatggcgactaagaaggacacgactgagccggttagtaacacaacccattgctcgccggtaaagccattgccttgcaacaaatacttgccaatttttaagatagaaacgccaaccatggtcggaatagccaagaagaaagagaactctgtcgcaacatagcgcgatgtcccaatcaataaggcccccaaaatggtggcaccagagcgggaagtccccggaacaattgacagaacctggaacaagccgattaacaaagcggtttgataggtgatgtcggccaaacttgtaatgtgcgcctgcttattcttgaggtaattttccaaaacaatgaataaaaccccgtaaaggatcaaagtcgttgcgacaacgagtggtgtatgtagatgtttgtccatccagtcattgagcggtaagccgacaacgacagatggcagcaccgcaatgatgactttggcccataactgccaagtatctttttgcgcctggacagtcggtttggaaaatgggtttaatttattgaagtaaagcaaaataaccgctaagattgccccaaactgaatgacgtattcgaacatgttcataaattgccgtccttgcgacaacttaacgacctggtcaaccagatcaatgtggccggtggagctaatcggcagaaattctgtcagcccctcgacaatgccgataatcacggccttgataatatcaaacataataaccctccaattctcaatgttaacagtatacaaggttttatcctacttgccatagtgcaaatgcaatttagcgagatcttatataatctgtgtggttaatggtgaactgatttgtggcaagcaaaaagcggcttaagcaaattgcgttaaagccgctgttaaaagatctgatttaaagccgcttttcagtttgaaagtcggctatttggttgccagaaacaaaacgttaacggcttccggagttggaatatcgcgctgttcttcggttagcagcccggttttagaatcccggctgtataaagtcccgttgctagtgttttgattaactgccaagacatagcgttcggtgaggtcgaagttgaaatcacgtggaaaatcgccggcggtactgatttgttgcagttgtgataagttgcgaccatccggactgacagcaaaaacggttaaactattgaagccgcgatttgaaacatataggaaccgttgatcactgcttaggcgaatagctgcggcaccattatgatccgtataatcttccggaatagtcggtaaggtagcaataagttcaaaacttccggtggcagcatcatagcttaagatgctgacctgactcgagagttccccaagtaaataagcaaccggattgttatgattaaatgcaatatggcgcggaccaaacccaggttcagcgtggaagacaacgggatcgccaagcttgccagcatcactaatcgtgtaagtggtcaaagtgtcattaccaagatcagcgactgccaagcgttgaaaatctggcgtcacggcagcgaaatggacatgggcgccgtcttgttccggacgcggaccgttaccggtgtgcacaatttcgtctgtcgcagttaagctatgatcacggttgatcttatagacgttgatgcgcccttcatgataattgctcgcgtatacaagttgacgattttcatcgattgagatgtgggcaggagaagagccgggttgtaaaacgcgattaatcagcttaggaggattaacgttgagatcataactggctacaccgccttgatccccttcagcatcaaccgcatataaaatatggtcatctgaaacggctaaataagtaggggaacctaaatcggtaatatacggttgcggggcagttaattggccttgtgtgtcgtcaaacgtaccagtataaataccagcaccgccgtgacgggtataaccgcctaacaagagtctttgtttcatagacaaaacgctcctttcgaatttgctttgagtatagcatgttttggggatgcttatgctatgatatagagcgtgagccgccccaacatagctggttaacttgctgccagctgtccttcaaagcagcggcttatctgtcacttttcgaggtacagcaagaccgacaaaaacgaacgtaccgcatcttttttagtactgcgatataggcttaaaaatatcacaagtaaaaacggaggcaacaacatgcaatttacggcaacgatcactgccattggtaaagacgctttaagttcaaaagatcccatgattattttatttggcccggaagccacagatgcactgcgcgatgttgcagtgattcagcagtttgatgatcccgcggccttatcccaattctccattcaggcgggggatcggctgacgattgacgggacagctttcaccatgacttacgtgggccagttagccatcagcaatttgaagacaatcggtcacgtcaccttattattccaagacgtaccagccgaaaagccaatgcaaaatgccatttatctcaaacccacccaacggccggcatttcgtgttggaacaacattgacctataacacgcaagcttagcggttgttaattggatattaaaaaacacctgtaatgacaggtgttttttttaccatgatgccttgcgaacaccgggaatttgacctttgtgagccaaatcgcggaagttcaagcgtgacattttgaatttacgcatgtaagcatgtggccgaccgtcaagttcatcacggctgtgtgcgcgaacaggggaagcattccgcggtaacgcctgcaaagcagcataattatgctcggccttgtacttggcacgcagcggagcgtacttggcaatcgtcgcttcgatctttttttctttggcaatctttgacttcttagccatctatgcaatcactccttgtttgtcgtttgtattggatactggtattcgaacagttcaacccacatagcatagcacagcaataagtcactcgcaacacttacaaaagataagcggttagtattgatcaccattgaaaatcgagtttttgacaatgacataatcgaccttggttaaagcttccagatcgcgaccaccggcataggaaacagcggattgtaaatcttcttgcatttcctttaatgtatcgccgatcttacccttaactggcagcaggatttttttgccttcaacgttatgatgggtgcctttttgatactcggaagctgaaccgtaatattcctgatattctttgccatcaatggtgacgtgcttaccaggcgtttcttcatggcctgcaaatagagaaccaatcatgcacatggtggcaccgaagcgaatggacttggcaatgtcgccattgttacggataccgccgtctgcgatgatgggtttacgcgctgctttagcgcaccaacggacagctgcaagttgccaaccgcctgtcccgaaaccggtcttgagcttggtaatgcagaccttaccgggaccgatgccgactttcgttgcatcggcgccggcattttccagttcacgaacagcttcaggcgttccgacattaccagcgatcacaaacgtttttggcaaatagtgtttgatatgctgaatcatgtcaatgacgatttgggcgtgaccgtgggcaatgtcaatggtcacataatctggcgtcaaatcgttagcagccagcgcttcgataaaatcaaattcttcatccttaacgccaacactaattgacgcgatcaaaccgcgctttttcatgtcgcggacaaaatccatgcgccgctctggctgaaagcgatgcataatatagaagtaatcgtgttcggccagccagatcgccaaaggttcatcaatgatggtctgcatattggcaggaacaaccggaattttaaacgtgtgtgggccaaatttcacgctggtatcaacctctttacgtgagcgcaccacacatttgttgggaatcatttgaatatcttcgtaatcaaaaatctgcatgccgttgttcatcggattcatcctttcgcaaaagccgaacattgttaagtattattggtgttattcaaaacaccaagtgctaagatacgcgattaaaatgtaaaagtcaaccaaaatactttcttttctttttaatgttcgtgttttgcttaaaaataagaaaagccgggacatcccggccaggtagcaagtggattagaaaaatttgtttcgccaaaattgaaaggcaagaaccatcgcaatcgcaattgaaatggcaatcgtgatgatccagctcaccttcatatctgctagtggcaagtggacattcatgccataaaatgaaaagaccaacgtgggaatggtcagtaagattgaataggatgtcagaaatttcatgacgccattcatgttattgttaatgattgacgaataagtatcagccgtttcgttaataatggaattgctaatctgcgccatttcaaccgcttgctgattttcgatgatggtatcttccagaagatcctgatcatcttcgtttagatgcaatgggttggtgcgtttgagttgttccaggacattacggtcggttcgcagactcatcataaagtaaaccaaggagcgttgaatgcccattaatccgtaaagttcttcgttgcgcaagttgcgttgaagtttattttcgttggcttcgcgggctttgttgagatcgcgcaggtaggtcaggtaactgatcgagatctgatacagtatctgtaagacggtgcgattttgatgttgcggattgaagttgcttattttgccttccgaaaaaaggctcagcaacggtatcggttcttcgttaatcgtaatcaccgcaatatttgtaataataatggcaagcggagccgtttcataaactactttttttcgggcgtcacgggtaacaacgggcatgtcaaaaataaacaagtggctgtcattgtcttcatcatactcataccgtgcgccttcatccggatcaaggccatatagtaggaatgcttctgatagattggctttagtctgcaattgttcccgttcttttggggtggggttgaccacattgatccagacgccgggactgatccgcgattgtggatttagccggccggttttgtcatcgaaacgataaattgaaagcatggcagtctccttggctttttctcttagtttacaacaagcggccaagctatgcaggaaggaaaatcatgcgaaaacgtgaagcaaaaattgaattggcggctcaacaaacgcctttatttgcgtgtccggtgtgcgctcagccaatgcaggtcaaagccggatcgcttatttgttctaaaggacaccggcgcgatttcagtcgtaaagggaccgtgaacttcttgaatcaacaagtcgcgactgaatatacagctacgatgctagcagccagacggcgaatgttgacggcgggattgtttacaccgtttttggacgctatggcagctaaattagtcccgcatcaacgcctattagatgttggttgcggtgaggggacaccaactgcttacttggctcaccaaaagcaacagatggcagtcggtttcgatatttcagcaccggcaattaacttagcgggtagtttggcagcgccagtattatttgccgtggccgatttggcgcacctaccatttgtcaacgatgcttttgacacggttatcgacattttctcgccaggcaactaccgggagtttcggcgcgtattacgaccaacaggacagctgctgaagattattccacgcgccggctatttaaaagagttgcgtgaagggttatattctggaacacgtaaggctgaatatgataaccagcctgtgcgtgaacggtttttagcagcgtttcctcaagcaaccatccaatcaataacgtatgattttccactggttgcagatcagtttaccgatttgatgaccatgacgccactgtcttggcaagcaccggctgaacggcgccaggtaatgttaaccaatccgccaaaaagtattcatattgaggttgatttactcaccgtttcgaatcttgtcaagtaaaagggttgaaaacaggaataaccggtgttaatatgcttttaagctatttatttcgggcttttatcagggctagcttttgggtaattgataaaagtttgcgataaattacttcactaacgtatcgcttcgctgagtgcgctccgaagcaatgcgtttttttcttgcttaaaatcaggttggcgccaagtttttgctttgtaacgcgcttcccggtgcagggatctgcgtgtaaggacctgagtcgcaatgaccaagggcgggggacatcacgctcggcgctaagtccgcctttacgcccataacgcgttcaccggcgcaggaatctgcgtgtaaggacctgagtcgcaatggccaagagcgggccatcacgtctcaggccgcttacactccgattcctaaccgcgccgattcacgctcactgcgggttggtgttaacacaatagaatgtgctacactgaaagcacttgtgttgaagggacgataacatggcgaatcatattgttttatttgaaccgttaattccagcgaacactggtaacattgcgcggacttgtgcagcgaccaatagctatttgcacttgattaagccattgggatttgagactgatgataagcatttgcgccgcgccgggttggattattgggccaaggttcgaattgtctatcatgatagtcttgatgacttcatggcaacggtcaaggatccgcagcatttgtatctcatcaccaaatttgcagatcaaacctattctgatcgcgattacaccgatacgcatgccgaccactatttcctttttggcaaagaaaccactggactgcctgagggatttatgcgggaacatgaagatcagtgccttcgtatccccatgacggcaaacgtgcgcgctctcaatttatccaattgtgcagcattagtggtttatgaagctttacgacagcagcattttgccggactggaaaccgtgcatacctatgaacatgacaaactaaagtgaaaatacgctaggaggcgcaacccatggaagcaaaacgttatccgattacggttgaatcatttcattatgatctcgtgaaacaaggaaccccagtgaagaacgatttacaggtagccatgcgtcagattcagtggtctgaccctaagaaacaggcagaattaaaaaaaggcaatctttttgaaatgatgattccctttgacgtggtgcctgacaatgccggatttgaaatttccggtaagatcacccaaattgttcaggttatggattatttcggtgaagcaaatgagctgccacaagaagaactgggcaaattgagtcggccactggttgaaaccattgaaaccttaacctatcaggtgacagcggtagccttggatcaaggcgttaatcttcagttcggcgcaagtgacgaacaacctggccaagcttaagcaggtagtgaataggaaaagatcaaaaaggcggccggaaagctgccttttttgctgagcgcgagccggcgcggttagaaaccggagtgtaagcggcctcagacgtgatggcccgggcttggccattgcggctgaggtccttacacgcaggtttctgcgccggcgaacgcgttatgggcgtaaaccagaacataagcagtctcagccgtgatggccaggttttggccattacgcccaaggtccttacacgcaggctactgggctggcgaacgcgttatgggcgtaaaccagaacataagcggccccagccgtaatggcccaggctttggccattgcgcccaaggtccttacgctctgacttctgcgccggaaagcgcgttatgcccaaacataaccccggctattgtaaaaaccggcataacgacccaccgcatatctcaaaagaacatagcaaaatcaccgcagtggctttttaaatgcgggctcagctcgtgtataataggcaggaatgaaaggagcatgaccatggcacaaaaacgtggcgggcgcaggcgaccgcgcaaaaaacgaccaactaaacagcaacagcacaccttaagttgggttggcgcgctatttgtcgtgttcgcgagcctggcatttttccgtctcggcattgttggaacggtccttgccaacgtttttcggttagtagttggcgatagttttctggtagtcagtgctgcgactgttgtgaccggtatctggtttttattggcagatcggttgccgaagttggcgcggcatgtctggatcgggttaagtatcattctgatcgccgcactggttttactaacagcacaggcaatggcgacactgaatgtccacagtcattatttgctagcgacttggcacctgttgcaaaatgattttgggttaatgacaaccgcgtcacaagtcggaggcggcttgcttggtgcaggactttttgcgttgttggcgccattattaagtagcttaggcgcaaccattcttgcgtggtttggtgtcattgccggtatcctcgtgtttttgggggtgggcgccaaccaggtttttaactggttgcaagcttttggacaggcttgcaaacgtggattgattcaggtatctgatcacataacggcgctaaaaaaagcagatgctaaaaaggctgccactcgtccaacatcgacgccagaagctgcaacggatgctgctcacacgcaatcagaaccatcatcggagcgagccgatgacttcacgattaaggggccaactccggttaaaccgttgccgcaaagtgaagcgcctgccccaacgaaaccagcaagtgccgcacctgtgagtgagtcatctgctgccactgcgcaggtgcccgccagcaagctggacgcagacatgccggcttcagactatcagttgcctagcctagccatgctgacggcgacaccgcctgtcgaccaaagtgcagaatatcaggcaattaaaacgaaccgtacaaaactgaaggaaacttttgaaagctttggggttaaggtgggcgttaaaagtgcgacattagggccgtcaattacgcaatatgagattcagcccgcggtcggcgtaaaggtttcaaaaattgtgaatctatccgacgacttggcattggctttagctgcaaaagatattcggattgaagcaccgatccccgggaaatcgttaatcggaattgaagtgcccaatcaacatattgcaacagtcgggtttaaagaggtcatggcggagacgcctaaggcaccgaatcatcccttagtgttaccacttggccgggatgttaatggtcaagtggtcacctttgatctaaccaaaatgccgcacctactaattgccggcgcaaccggttcaggtaagtcagtgatgatcaatgtgatcctgacgagtatcttgatgcgtacgaagccaactgatgtccggctgatgttaatcgatcccaaacgtgttgaattgtccgtttataatggcgtgccgcacttattgacgccagtcgtgaccgaagcaaaaaaggcgccaagtgctttaaataagattttaaccgcaatggatgaacgctaccaacgatttgcggcagcaggcgtgcgtaacatgaaagaatttaatcaaaaagtagcagcaaatcctgccagtggtcagtccaaaatgccgtatatcgttgtcattattgatgagttaagtgacttgatgatggttgcgggtcacgaaattgaaaccgccattgtacgactggcccaaatggcgcgcgctgccggcattcatgttatcattgccacacaacggccatctgtggatgttatcacggggttgatgaaggctaacattccatcacgtattgcttttgccacatctggcggcattgattcacgtacgattcttgacagtaatggcgcagaaaaacttctgggccgcggtgatatgctgttttcaccgattggcgcttccaagccattacgagttcaaggtgcgtttatcccgtctgttgatgtagaacgggttgtgaaagctatcacggatcaagtggcaccagcttatgtagacagtatgacgccgactgaaaatgttgaaaccgagcaacaaggggattctgaagacgagttgtacgatgatgccaaggcatttgtcattgcacaacaaagcgcttctacatcaatgctgcaacgacgctttcgaattggctataatcgtgcggcacgattgattgacgatcttgaagctaatcagattgttggccccagcgaaggcagtaagccccggaaagttttcgttacaccaacagatgggaatcagtcatgagggagactatgcaaaaagaaatcaagccgggcgtttggcttatggttttgccaaccacccaatttaaaactactcggatcaatattcagtttttaaccccattgcggcgagatacggtcacaaaacgaacgttgctgaccagtcttttggagacaaatagtcaggagtatccaactcaggcagctatggcggcccatttagagtcactttacggtgcaaacttcagtattggtgttgcgcgcgaaggccgactgcaccgggttggggtgacaatgagtactgtggacgatcggtttacggatgcaccgttgttaccaaaggcagcagcgtttttgaagacggttttgttttcccccaactttcaagctgggcaatttgacgcggcaacttttgatcgggaaaagcaaaacttggatcactatctggccagtttagatgatgatcgtcaaacgcaggcagcattgggtgtccagcgtctgtatttcggcgttgatcctgatcaggccatccccagctttggcacgcgtgaagatcttgcgccgatcacgacagcgagtttaaccgcctattaccaccaaatgatcagtgaagatcaagtcgttatcaccgttttaggcgatgttcaggctgaaaaagtggcggctttgtttgctgattggccactggcggcgcgctcgcaaaccacccccgcgattgcatttaatttaccggagcatgccgaagtcgtcagccaaaccgccaaagtcgttgcccaacaagctaaatttgatcttgcctatcatgtcagcacggatttgatgggtccaaagtatgcagctactttagtggcagaagaattgtttggcggttcaagtttgtcattgctcttcaccaacgttcgcgaaaaggccagtctggcttattatgcgagttccatgttggatacttttcgcggcttgatgttggttcaaaccgggattgaaagcaaagatcaggcgcgggttgcggatttgattcagcagcaactggcagccattgtgcgcggtgatttttccgatgaccggttgcaggcgattaaagatggcattttggatcatcagcgtgcagcgtatgatagtccgcggtttttgacaaatcaggcgctgtatcgactgttagtgccggacgcaccgcaagactttgaaagctttgctagccgaattcaggccgtggatcggcaggcagtgcaacaagcggctgccgcgatgaaactgcaagcgacgtattttctgactggggaggacagcgaatgaagacacaatatttccgtgatgttgatgaaacactcatcacaacgacgctgcccaacggtttgcgcctgcaagtggtgccgcgcccggcgtatcataaaagttatgcgatcatgaccactgattatggtgcgattgatacgcgctttgcaccggacggcaagcagatggtgacttatccagccggtatcgcccattttttggaacataagttatttgaaaaagaagatcatgatgcatttgatcttttcggcgagaccggtgcgtcagccaatgcgtttaccagtgcgacaaaaaccagcttcttattttccacgaccactcaattaaataagaacctgcaaattttgcttgattttgtgcaggcaccgtttttttccacggaatcggtggctaaagagcaaggcattatcggctcggaaattcaaatgtatcaagatgatccaggttggcgggtgtacgctggtttgctggaaaaccttttccccaatcatccagcgcatgttgacgtggcagggacagcagcaagtatcgctcagattacgccggagatgctttataccattcaccgcgttttttatcaaccaagtaatatgaccttggtgattgttggcaatattgatgcggagaatgtgattgattttgttgctgccaatcaggctcaaaagacatttccaacgcgacagccaattgtgcgaggcgttgaagcagacgtgcaaacagcagatattattccttatcgggagttgaaaatgccggtcagtcgtcccaaaacgctggttggctttaaaggacaggtggcaattccgcagacggctgctggttggcggtatcaattaagtattcgcctattgctggaagttttgtttggagattcatcgcagctttatcaagcatggtatgatcgcggtttgattgatgactcgtttgattttgattttacgaatcagcgtagttttagttatgggcttgttggcggcgacaccgatgatcctcaaggcttaagcgccgccattaaggaagtattggcacatgctgcggatcaggctgatttgaatagaaatcgggttgcgctaattaaacgcgcgtcactcggcaaatactatgccggactgaatgggttaaatggcgttgccaaccaattaagcgccttaagctttggcgaagcgtctttgtttgattttccgcaaatattaaacaggattaggtttgaagatcttgagcagttaattcctaaactttttaatgctgaagctttaacggttttgacaatgcttccggagggaaaataatgcgatcggctttaatcattggcgcttctggtgatattggccaagcggtagcagcaaaattggcggcagcagggtggtcgctttatctgcattactttaagcatgagcaagttgtgatggatcaaatgagggcttatcaagcagcatatccgcatcaggactttattccgttacaatatgatttgacggatgaccgtcatctagacgaactcacaaatcaactttttagtcttgatgctgtcatttttgcagccggcatgacctattatcatctttttaaagaaaccacggtccctgagatgacgactttgatgcgggtccatttgttaacgccgatggttcttttgactaaagtggagcgtaaattggcacaatctggtcatggacgcgttattttcattggatctgtctatggtggtaccggatcagcgatggaggtggcctatagcacggtcaagggagcgcaaagtgcctttgtgaaggcttatgcacaagaagttgccagtcttggcattaccgtgaacgttgttgcccccggagccgtcaccaccaaaatgaatacaaagatgtttgactccgatacactcgccaaagttcaggcagagattcccgcggctcggtttgcgaccccccaggatattagttactatgtcagtatgctggttgccgaggaagcggcttatctaaccggacagacactgtacgtaacaggcggctggcgcatgtagtaaacaaaggatttcttaaggctttcagacggtttttcatgctatactaaaaatggttaataaaaaatagcgggtgaagaaaacatatggatgaaattgggcaaaaattacgggacgcccggattgaaaaaggctataccattgatgatctacaacaaattaccaaaattcaaaaacgctacctgattgcgatcgaagaaggtcatttcgatgcgttgccaggcgacttttatgtgcgtgcctttatcaagcaatatgccgatacggttgggcttgacggggatgaattgttgacgcaatttcagcaggatatcccggaaccgcaaccccaagaatacgctgcacagtcagttgaaaataagactcgggcgacccgcgccgaagaagcgagtccggttaaccgtttgcggcgctatcttccgcagattgcgattgctgcctttgtgattgttgccatcatcgtcatttatgtcgtgatgctattttcacaatccggaccgaaacaaacgattcccgcggattccgagagtgttgcggtttcgtccaagcgcagtagttctaaggcatcgaaatcatcaaaaacctcatcatcctcgaagtctagcaagtcttctgcatcaagtagttccaagtcatcagaaaaggcatctaaagaaagcaaaaagaagagtgacaagctcgacatttctgttgctgcggcaaatggtgctactcaggcagttacgttgaagaatttgccgaccagcgggaataaacttacactcggtgcaaacggggcgaccgcttggatttcagtcattgtcaatggttcgacaacttggcagggttccttgacatccggaaatacacaagaggtgacattaccagataatacgtccaccttccaagtccgctcagggaatgcgactgctacaacgattgagttgaatggcaagaaggttgacatttcaaacggtaccagtgttgttcggacgattaccttcacaagcagtacaagtgaaagtgaggcttctcaagaatgaatctccctaataagttgacgctgattcgcattttcttaattcctgttttcactttgttattggcattcaattggccagctggttatctgacaattgccgggacaaaagttgccatgagctggtttatcgccttgatcatcttcattgtggcttcacttaccgattttgcggatggtcagattgcccggcgcaaacatttagtgaccaattttggaaaatttgccgatccgttggccgataaattgttagtcatgactgcatttttgttcctgacagcagctggacagattccggcatggggaacggcgattatcctatggcgtgagttagcggtgacgggattgcgactattgctttccaatgaaggagaggtactggctgctgcttggcccggaaagattaagaccaatacgcaaatgtttgcgatcatctttttgatgctcaataacgcatggttcaacaacattaacattccgtttgcgctaatccttttctatgttgcagtgttcttcacgatttattctggcgtggaatatttttacaagaatcgcggcgtttttgcagattcatttggatctaaacagcagtaatatcgtttttttacccaggctgatagcttgggtttttttgtgcccgtcattcggcgcaaaacggaacgggtagtaaaataaaactgaaccttgttgggcttggaggcattgtttatgttaatggttgggtgattgcagcagattggcagcagaatttttgaatattgagtgaatgcattaaagggcagatgtgctaaacatcgaattctattgttaggtgggaaaaatatgcaagcagaaattattgctatcggaacggaaattctgatgggacaaatcacaaatacaaatggcgcgtatatggctaaacaactggctacattaggtattgcaagctatcatcaacaggttgttggggataacgcaaaacgactggctgacgcgataagtttggctgaacaacgcagtgatatcgttattttgattggcggtttaggaccaacaccggatgatttaacgaagcaaaccctagccgcacacctgaatttacccttggtggaagacgctggcgctatggccaagttggctgcgcgggttaaacaacagcaacgtccaatgacacccaataatcgcttgcaagcgatgtatcccaaaggcgcaatcgtattggccaatcgtgttgggttggcggtcggcgcatgggttgagcagcgccaacacgcctatgttttattgccgggaccacctaaagagtttgtgccaatggttgatcatgaactgttgccacgactggcaaaatatagcgggcatcaagaagttttggaaagtcgcgtgatgcgtttctttggtgtcggcgaatcgcaacttgtgacagatttaagtgatttaattgccaaccagacgaatccgacacttgcaacttatataaaagatcatgaggtgacagttcgggtaactgcgagtggcaaaacacaagcagaagccgcggcaaaacttgagccaatgatcggcatcattatggatcgtgaaggccgctacttttacggctacggtgacgataacagtcttgctcaggaattagtcaaagcattggcggctagtgataagcaaattagtgccgctgaaagcctgactgcaggtgcatttcaagcggcattgggagacgttccgggagtctcggcttatttcaaaggcggcttcgttacgtacgctttagcgacaaaagctgcatttttaaatatcgatgcccgtcagctagcagaacatggtgtggtgagtgaatttactgccaaagcaatggcagagcatgctcgtcaacgagccgcggcagacattgccgttagttttaccggagttgccggtcctgacaagctggaaggacagccagccggcaccgtctggattggtttggcgcggttaggagagaaaccaatagcacaagtttatcattttccgggtgggcgaaatgacgtccgcaagcgcgccgttatgacggggatgatgatggtgttgaagcgtttacgcgaataacagcaaatagttgtggatggaacaagctcattaaacaggaggcggtaagagatggcagaaaccgaacgacaggaagcattggcaacggcgttaaagaagattgagaagaattttggcaaaggggccattatgcggatgggggacaaagtggagacacgcgtttctgctgtttccagcggatcacttgcaattgatgatgcacttggtgttggtgggctgccacgtggacgaattgttgaaatctatggtccggaaagttccggaaaaacgactgtggccttgcatgcagttgccatggttcagcaacacggtggcacggccgcttatattgatgccgaaaatgccatggatcccaaatatgcagcggcacttggcgtcaatattgatgagctgttgctttcacagccggataccggtgaacaaggattggaaattgccgatgagctggttgcatcgggagccattgatattttagtggttgattcagtggcagctctggtaccgcgcgcagaaattgaaggggacatgggtgatgcacacgttgggttacaggcacggctaatgtcacaggccttacgaaagttgtctggggcgatcaataaaaccaaaacaattgccttgttcatcaaccagatccgggaaaaagtcggtattgtattcggcaatcctgaaattacgccgggcggtcgggcgctgaagttttatgccactgtgcgtatggaagtgcgccgttctgagcagatcaaaaacggtgccgatattattggcaatcgcaccaaaatcaaagtggttaaaaataaagttgcaccgccgtttaagactgccattgttgatattatgtatggtcaaggcatttcccaaagcggtgaacttgtcgacatggcggttgaaaaagacatcattgaaaaggcgggttcgtggtatgcctaccaaggcgagcgcattggtcaaggacgtgaacacgctaaaagctatcttgaaacgcatgaggagctgcgccgaaccattgaaaaacaagtccggcttgcttatggaatgtcgccggatcacgttatcgatcaagcggacacggagacagatactaccacatctgctgcatcatgactggttaaaaggggtgcttgttgtgctgcgagcgaatcgtgtgtggaaatggctcacgcttttcataacgcgctcgtagtcgcggcaatcgaagtgtaaggaccttgatcgcaatgaccaaagcccggccatcacggctgaggccacttatgttctggcttacgcccataacgcgctcgccggcgcagaagtctgcgtgtaaggacctcaggcgcaatggccaaagtgcagccattacgcctgaggccgcttatgttctggcttacgcccataacgcgctcgccagcccagaaacctgcacataaggaccttggtcgcaatgaccaaagaccggtcatcacgcccaaggccacttatgttctggcttacgcccataacgcgctccccggcgcagaagtctgcgtgtaaggacctcagtcgcaatggccaaagtgcggccattacgcctgaggccacttacactccgacttctaagcgcgccggttcgcgctcactaaatttgcctccagttgacaccttgcaggccagcacgtaaactaatagaggtgtaataatttaaaaaaagcatcaaagattttgatcaacttgatgattgaatcgcttagatgatgcggaggtgaaatgatgagttcagtaacactggtctcaataaccctcgcagcagtcatcgctttagcggtcggtttattgatcggatttgcacttcaaaagaagctccaccagaacagtttggatcgagcgacgcagacagcagaaggtatcattgaggccgctaaaaaagaagcagcgactttaaaaaaagagaaactgctagaagcaaaagatgagaatcatcgctatcgaacccaacttgaagacgaattgaaagatcggcgggcggaagtccagaagtcagaacatcgactgaaccagcgagaagatactcttgatcggcgtgatgacacgcttgatcgtaaagagcagagtcttgctgaccgggaagcaaatttgaacaagcggcagcaacagttagatgaacgtgaacaagctatctcttctgaaatcagcaaacaacagacagaactcgaacgaattgccgagctaagccatgagcaggctcggactcagatccttgaccagacacaatcagaattgacgcatgaacgcgccgtgatgattaaagaaagcgaagatgaagcaaaggaggccgcagataagaaagccaaggtactgattgcggatgcaattcagcgcagtgcttcagatatcgttgccgagacaacggttacggttgttaatttaccaaatgacgacatgaaaggccgaattatcggtcgtgaaggtcgaaatatccggacacttgagactttgacggggattgacttaattattgacgataccccgcaagccgttgttttgagcggatttgatccgattcgacgggaaatcgcgcgaatcgcgttggagaagctcattcaagatggccgaattcatccggcccgcattgaagaaatggttgataaggcacgcaaagagatggatgaccgcattcgtgaaatcggcgaacaagctatttttgatgtgggtattcataacatgcaccctgacttgattaagattttgggtcgcttgcattttcgtacgagttacggtcagaatgttctggatcattcgattcaggttgcaaagctggccggtgtgatggctgctgaattaggagaagatgttaccttagcaaaacgcgcggggttattacatgatattggtaaggcgctcgatcatgaagtcgatggatcccacgttgaaattggggtcgagctagcaacaaagtacaaagaaccaaagacggtgattaatgccattgcgtcccatcatggtgacgttgaaccaactagtgtcatttcggtactagtcgccgccgctgatgctatttccgccgctcgtccaggcgcgcggtcggaatcacttgaaaattacctgcatcgcttagagaaattggaggctattgccaacagtcatgctggcgttgaccatagtttcgcgatccaggccggtcgtgaagtacgggtgatcgttcagccagaaaaactttctgatgatcagagtgtcattttggctcgcgacattcgcaatgaaattgaaaaagaattagagtatccgggtcacatcaaggttacagtcattcgagaaacccgaaccgttgaatatgctaaataagtttgcagttaggccttattaaagggcactatatgtaaaccaaaaagatccgcaagcggtaattgagcttgcggatctttttgcgtttttaaggcttgtgaacttctgacgtggcatataggacctcacgatactgacttgtaccgatctgtgggtcaaattggccgtgtaggaaatccttgattaaggcgaggttcttgtctaactggtcagcatcaagatgtaacgtcagtgtcactgctacgccataatcaatggttgcgattgtgaggttgtgcgtttctaaaaaatgctgcagtggattaagatccgcatatggaatctgaaaagtaacagccttttgcttaattcgggctacaatgccaattgtttcaattgcggcgttgacattgccggcataagcgcgaatcagaccgccggcaccaagcttgatcccgccaaaataacgcgtcgtcacggcgagtgtatcgcgaagttcatgttgcaagaggccttcaagtgtcggggagccagcagttccggatggttcgccgttatcgctggcccgctggatttggttttcgttaccgagcacgtaagcaaagacattgtgatttgctttggcatgctcgtggctgatgcgatcaataatagcctttgcctcgtcttcatcatgaatacgagcgaggtgggtgatgaaacgagactttttaatgatttgagtgtaatttccggattcttttatggtgagatatggcttcattatgcgtaatctccttttgaggtgatgaaaatggatctggcaggtgcccaactcacacagcgtgaactggcgcgtttagctgtctctaatatatcacacgcaactgttgtgccggcattggtaaaagaccatcatcagtggcaatgtcagcgatgttgcagccgaagacctgttgcactgccagatggccgaatttattgtccggagtgtgttgctttaggacgactgaccaatgccgatcatctttatcggtttgaacaggcgcatctgccggttggtgatggtcaattaacctggcatggtttactaacacctgatcaacaggcggcatcggatgcattacaggcgagtgtcgcagcaggtcgtgaacatttgatttgggcggttaccggggcggggaagactgaaatgctttttccgactattgcccagctgatccagcagcaaaagcgggtggccattgtttcaccacgaattgacgtgattcgggaactggcaccacgatttcgaacggcatttgcaaccacacccatttccgtgcgttatggtgggcattttgatcaaacggatagtgatttgctcttagcaacggttcatcaattattacgcttttatcgggcatttgacttaattgtcgtagatgaagttgacgcgtttcctatgcgcggaacaccaatgttacatcaagcagtgaggcaggcacgccgcggctcggttgcttatttgactgccactcctgatcgtcaattaaaacaggcaattcggcgggggcggcttggggttagtcgactttttcgccgttttcacgggcatccattaccggttcctcggattcaattagtgaacttacggcatgtgccccattcgcttcccaaagcagtcattatgtgggtgcagcaagtgctagcgactaaaagagtctgtctgttgtttgtgccgaagattagttgggcagaacaacttgccggtaagttgcgccaaatagggctaaaggcggctggtgttgcgagtactgatgcgcagcgggcggaaaaggttacagcatttcgacaaggacaattggaggttttagtgacgacaacaattctggaaagaggcgttaccgtccctcgctgtgcggttgcagtgctagcagcggcagatcccgagttttcggcatcagctttaattcaaattgccggtcgagctggtcgggcagcggatagtccggacgatccggttgtcttcttttccgatcgttatacccttgcgatgttggcagccagacgccaaattgtgatgatgaatggcaggtgaagacgatgcgctgtattggttgtacccgcccgacagatcgcggcttgaagctgacaacgttattttcccgtggtccattgctagcgccgaggttatgtcacagttgcttgagccaatttagtttcattaccggtataacctgctccggctgcgggcgaatgcaggtagccgcggagccgtgtttggactgtcgaaaatgggcgaagcatgggccgcttttaaataaccgggccttatttgtgtatgacgcaaaaatgaaggcgtggatttaccaatataaaggactgggtgactatcggctgcatgtagcttttcaggatttgattgccgagcgtctgcgacatgcagaagcgttggtccccattccaagcgaagctaaacattatgaatggcgcgggtttgatccgattttaggattatttggttgcctgccattacaaaactggctccaaaagtcggcaacagcgcgaccacaagctcaaaagacccgccgagaacggctgaagacgccacaaagttttcgggtgctcgtttcagccaaaaccttaaaccgcgtgcgtcagataacattgcttgatgatttgtatacgacagggcggacgttgtaccacgcgcgggatgctttagtggctgccggtttcaaggggactatccaggcgtttacattaattcggtgaaatgtggcttttgttgtgtctggtggtaacattcgggtataatgaaggtggagattggaagggttttaccccagccaatcagcgtgtaagcgtttgcctacacgcaggaaaggggagaagttttatgctcacatacaatgttcgtggcgaaaacatcgaagtcaccgaagccatcagaaattacgtggagaagcggattagcaaactgaacaagttctttggtggttcagttactgcgacagcgcacgtcaatttgaaggtttacccagataagaccgcaaaagtagaagtgacgatcccgctgtcgttcttgaccctgcgtgcggaagaaaccagtccggatctgtacgccagcattgatcttgttactgacaagctggagcggcaggtgcgtaagttcaaaaccaagattaatcgcaagtcacgtgaaaaaggctttggtcagattgacatcgatagcaatgcaccggctgaaccgaaaccggccgaagatgatgataatctgaaggttgtgcgaacaaaacgcgtttcgttaaaaccaatggattcacaggaagccattttacagatggatatgctgggccacaacttctttatcttcgaagatgcagatacaaatggcacgagcattgtttacaagcgtcgtgatggccgttatggcttgattgaaacgaacgaataatagcgattttcttaaaagagaggcaaggctgctgcttatcggcgggcttgctttttatttgcctgtcagctccatcatgcctataaaacgatgcgtgtggctattgcagtttatgagaagtgtggcaattaatgtgatttttgacgcggggatctgcatttaaggatcttggtcgcaattggccaagagcgggccatcacgcttaaggctacttatgttctggcttacgctcataacgcgctccccggcgcagaagtctgcgtgtaaggacctcagacgcaatggccaaagtgtggttatcacgttcaaggacgctaatgttctggtttatgcccataacgcgttcgccagcccagaaacctgcacataaggaccttgggcgcaatgaccaaacccgggtcatcacgcccaaggccgcttatgctccggtttctaaccgggctggctcacgctcaccaagttattttcaatctcccctttaaaatgttaagatgttagaatgtataaatgttaagatgtataaatgttagaatgattaaagtagtgttagttctacgaggtttcgacagagaggaatccattaatggccaatattcttagaaaatgggtcgaaagcgataagcgagaaatcggtcgcctcggcaaaatcgctgatcaagttcagcgctatgaagatgaatatgcagcattatcagatgatcaattaaaagcaaatacccaaaaattcaaggatcgccttgcagcaggggcaacgttagacgatattttaccggaagcttttgccaccgcgcgtgaaggggctaaacgagttttagggttattcccgtttcgggttcaaattattggcgggatcgttttacatgaaggcaatattgcggaaatgaaaaccggtgaaggtaaaactttgacggcaaccatgcccgtttatttgaatgccttgactggtaaaggtgtccacgtggttaccgttaacgagtacttgtccacgcgtgatgcaacggaaatgggcgagttgtacaattggctcggtctcagcgtcgggttgaatcttaactccaagaacagtgacgaaaaacgcgaagcctataattgcgatatcacttattccaccaatagtgaactcggctttgactatttgcgagacaacatggtggtttataaggaacagatggtacaacggccactgaattttgcaattgttgatgaagttgattcgattctcattgatgaggcccggacgcctttgattatttccggtggcgcagaaaagacaaccggcctttatattcgggcggaccgcttcgttaagacgcttaaagccgatactgattacaagattgactggccaacgaagaccatttcgctcactgaaagcggcattcgcaaagccgaaaagaattttggcttggataacctatacgataccgaaaatacggctttaacccaccatatcgaccaagcattgcgggcaaattacattatgcttaaagatatcgactatatggtgtctaacggcgaagtgctgattgtcgatcaatttaccggtcgggcaatggaaggccggcgctattccgatggcttgcatcaggcaattgaagccaaagaaggggtacaaatccaggatgaaaataagacgatggctaacatcacttatcaaaacttcttccggatgtacaccaagctggcagggatgactgggaccgctaaaacggagcaagaagagttccgcgaaatctataatatggaagttatttcggttccaaccaataaaccggttatccgggttgactcaccggatgttttgtacccgactttggatgctaaattcaatgcggttgttgacgatatcaaaaaacgccataaaaaaggacagccgattctggttgggacggttgcgattgagtcgagtgaacgcctgagtaagcaattagatgatgaaaagatcccgcacacggttttgaatgcgaagaaccactttaaagaagcggaaatcatcatgaatgccgggcaacgaggcgccgtgacaattgcgaccaacatggctggtcgtgggacggatattaaattaggccctggtgtcaccgagttaggcggtttggctgttattgggactgagcggcatgagagtcgccgaattgataatcaattacgtggccgttccggtcgtcaaggtgatccgggttctacccaattttacctgagtctagaagatgacttgatgaaacggtttggctctgagcggattaaagcaatgctggatcggttcaaggttgccgatgacgatcaggtcattcaaagtcgaatgatctcacggcaggttgaatcagcgcagaagcgtgtcgaagggaataactacgacacacgtaaaaacacgctgcagtatgatgatgtgatgcgtgaacagcgtgaagtcatctataagcagcgtcagcagattatcaatgaagacgagaccctcaagcccgttttgatggcgatgattaatcgaaccatcacccgcatcgttcaaacgcatacccaaggcgatcaaaaggattggaatcttgatgcgttgtatgcttggatcaccgcaaacatggccgatccggagaaattcaagcgcagcgaacttgatggcaagtcgcaagatgagctcatcggtttactggcggatatggctgaaaataacttccagcataaaaacaagcaacttggcgatgacgcgcagatgctagaattcgaaaaagtggtcatcttacgcgttgttgactcagcttggacggatcacattgacgccatggatcaactacgccagtctattggtttgcgtggttatgggcagatgaatccgctagtcgaatatcaagaagaaggctaccggatgtttgaggaaatgattgcgtcaattgatgatgatgtgacccgactgttcatgaaagccgaaattcggcaaaatattcgccgttaatggtgaaccggcgccccggcactgcaagctcaaatttgcggtactggggtgttttgaggataacagaagcagaagctaaatgtgggattgaggcaacccagtcatcactagaatcaacttaaaaaagaggagcaattatcatggaactcagtgtcatgcgtaacaccttggccgccatgcgaaccaaaataaatcaattcagggggtctctttgacctcgatgcgctgaatgaacgcattagtgaaaatgaaggtagaatggcggaaccgggcttttgggatgattcggaagcagcacaaaaagtgatcgatgccaacaataaactcaaagaaaaacacgatcgcttttacgcacttgaaaatgaactggaagatcttgaggccggattggagttgttacaagacgaacccgatccggatttgcaacacgaagaagagaccaagcttaaagatctgcaggaaaaacttgatcagtatgagatgcagttgcttttaaatgggccatatgaccacaataatgcaattctcgaaattcatcccggtgcaggtggtacggaatcacaagactggggttcgatgttgatgcggatgtatcagcgctgggccgaccagaatggcttcaaggttgaagttgctgattaccaacctggtgatgaagccggcatcaaaagtgtgacgcttttgatcaacggtgaaaacgcatatggcttattgaaaagtgaaaaaggcgtccatcgcctcgtccgcatttcgccatttgattccgccggccgccgtcataccagttttgcctcggttgatgtgatgccggagcttgataattcaattgaagtcgatattcgcccagaggatatcaaaatggaagtctttcggtccagtggtgctggtggtcagcatatcaacaagacttccagtgcggttcggctgattcatctgccgaccgggattgtcacttccagtcaggcacaacgatcacaatttcagaacaaggccacggcaatggcgatgttgaaggccaagttgtatcagcgtgaagaggaagccaaaaaggccaaagccaaagccattcaaggcgagcaaaaagatgttgcttttggttcacagattcggtcttacgttttccacccgtacacgatggtcaaggatcaccgaacgaattacgaaaccggtaatgggcaggcagtgatggatggcgatcttaatccatttatcaatgcatacttgcaatgggagctcgcccagaaaaatcctgattaaactgtaacctgcctgaaatcttgctgacttaatcggctgttatactaatcctagcttagaaaaaggagcaaaatgcatgattcaaatggaaaacgtgacgaaacagtatgctaacggcgtcactgccattaaggatttgaatcttaaaatccaggatggtgagtttgtttacgtcatcggtcctagtggtgccgggaaatcaacgttcgttaaaatgctgtatcatgaattaaagccgtccagcggtagtattaaaattgatgattttgatttttcaaccatgaagccgtcgcaggtgccatttttgcgtcgtcacatcgggatcgtctttcaggatttcaaacttttaccacgcttgacggtgtacgagaatgtggcttatgcgatgcaagtcattgaagcgccggacgataaaattaaagaccgcgtgctcgaagtattaggactcgttggcttggaacagaaattgcggcgttttcctgatgaattatccggtggtgaacagcagcgggtgtcagtagcgcgtgcaattgtcaacaagcctaaagtgttgattgctgacgaaccgactgggaaccttgatccgcaaacctccgatgaaattgttgatattcttgaacgtatcaatgcaaatggaacaacggtgatcatggcaacccataacaaggatattgtgaatgaacgtcaacaccggctactcgaaattgccgggggtcgcttagtgcgtgacgaagaaggaggcacatacggcaatgaagagtaaggtctttttccgccatgttaaagattccctgcgcagtttgcggcgtaacggctggatgtcggttgcagcggttagtgcagtcaccgtcacattactgctggtcggtatttttatggccttgattttcaacctgcaccacatttcacaacaagttgaaaatgatgttcaggtgcgggtttatattgataaaaaaacaactaccaaacaacgtgatgaccttaaagacaaacttaaaaagctggatcatgtcaacaaggtcacttaccgttcacgtcaacaagaattggatacaatcatcgggggttatggttcgcagtggcggatgttctccggggaccaaaacccattaagcgatgtgttcatggttaagacgaatagtcctaaggccaccattagcgtgtcaaaagaagcacagaaactggatcatgtggttgatgcaagctatggcgggcgaacggcaaagaaactctttaattctgtggatgtagcccagaaatgggggcttgctttcacgattctgcttttgtttgttgccgtgttcctgattaataacacgattcgaattaccattttgtcacgttccgacgaaattcggattatgcgactggtgggggcaaccaattcctacattcggtggcctttcttgcttgaaggtgcctggaccggtttgtttggggcagtattaccgattattattgtggatgtcggttatgcgattgtctatcggagcttcacttatgcaaacggagccagtggttatacgctttatgccaacatgccgttcttgttctggcttgacttgatgttagccgggattggcattgtcatcggggcactgggatcagttatctccatgcggcgttttcttaagttttaatttcaaaattgaacatttgagttgctgctatcgactcaatgtgaaaggattgctcttttccgggcagtccttttttggtgggcggttttaatgaatgtcagtacgatgttttgaatacgcaagcttatgtcgaaaataactcatacgtgttaatcgatgggacaaaaatggccgtttttcggcattttctgtttgatgagcccaaaaccttgtaggaagcggtcgttaatttctgctatactggtcacagtgaatattggagggttaccgatggcagtgatcattgccttacttatcagcccgattggtgccgtattctggcttgctttagggttgacgattttgtatgcggttagccggacaagccgcgaacgccatcagtacttgcgggcgattcatccccgacatagcgaaattgccccattcttttgggtcggtattttgctaggcatcgttatctcggcactgatgttggttgcgcgcttacaagttagtttgcccgcattattagcattaagtggcttaacgctggtcgggctaatcttttctggctggcggttcagtccatggtggctaggattagcgggcttagttgaattgctgcggccgacaacgagccaaatgagtgctgatttagccgttttagttggtgtgttgtggttagcgcaagccttgatcgcgcggttaaatcggggcactcaaattgagtccccggttattttgcaggatcgacgtcaacgtcaacaggttgcgtttcgattgcgacagttttactgggtgcctttgttcttaccggtgagtgttgaccaagttgcgggattgccgctcttatcaatcgcaacggacacttttgttgcggttgggcttccactggtcttaggcgcggcatttaccacgcagcgtgatcgcgttcaaccgtatttgcgccgaagttggccatggtttgcagttgccggtggcggtttgatcgtctttggactggtgggtcggatccttaccatacctgtgatggtaatcgccttaatacctgtgttggtgagtttgatactcggtgccggcttaatttggcaagcacatcaagtacatttaaacgtgacacaaaccaatcacggggtggttgtcatcggggttgtcccacagacaccagctgcacaaatggatttgcagccgggtgatcgggtcttaacctgcaatcatattgccgtcaacaatgccgctgaactttataacgcaattcaaaaggaacccacttattgccgcttacggcttcaacaggcagatggcgagatacggctagccgaaaccgcaatttttgccggtgcaccccatgaacttggtatgattttattcccggaggagacagcatgaagaagatcttgattgttgatgatgaaccagccatcttaaccttgctgcaatacaatttagaggctgaacactatcaggttgaaacggcaacggatggtcaggaggctttagataaagtacgtagcgagccgtttgattttattattctcgatctcatgttgccgagtttgagtggactggatgtcacccgtaagattcgtgaagaaaagattcaaacgccaatcatgattctgacggccaaagacaacgaaaccgataagatcgtcggacttgagcttggtgccgatgattatgtgaccaaaccgttttcgccgcgggaaattattgcccgaattaaagccatcgaacggcgtagtcaaagtcaaccacaagcgccacttcccggtaatgccaatcaaattacggttggtcaaattacgattgatcctgaaaattataaagctagcaaagccggacaccgactgcaattgacccctaaggaatttgaactattggtttattttgctcaacgagttggcaaaacgctatcacgcgatgccttgcttaatggggtttggggcttcgattacccggcggaaacacggatggtcgatattcaggtcagccatttgcgggataaaatcgaaacagatcctaaacatccggattacttaaagacggtgcggggattcggttatcaaatggaggcgccacatgaataaacggattttacgccgtgtactggttattagtctgctctcgttagcaggcttttttgtactcgtcacgacggtcaatcaacaaatcgtacatcagcaggcacgcgatttgaggcgcgtagccagaacctatgcagcctctgctaaggatggcgttgatccgcaagcgctggcaaagtccgaagccgcttttattacggttgttccggataatcccaaaaccacccgacaaaaagtgatggccgatgccttacgtggcaatcatcgcgaaccatttgtgacaacggttaatgttcttgggcgagctgaacaggcatatctgtttcgtcaccggggacactgggttgccattagtcgctataagtccagcgtttggacaacggcgcctgagcaattttggattttgacgctgacatttgcggtcctgattgctttaattctggcttggctttttcgctcggagcatcagtatcaagaagccattcgggtcatgagccacaacttggatcggattcgccagaaaaaagagcccgagcctgtgattctgccgccacagtcgccgtttacgcctgtggcacggcgaattaatgccttagctgcggaacaaacccatttacgtgagaaagtcgcagtacggcagtccagttttgatcgtctgattgataatttgccactaggcgtcatgttgattgataccaataaggatgtcattttgcataatcatgccatgtcccagcttttgggccatcagattccgcagccgcggcacaattatctggacgatgttaagacttatgcgttggcccggatgattgagcacacttttcgccatgaaaagactcatcatcaggagttgaccgtcctggcaacccaaaagtcggttgatgccagtgtcattcctttaaaccaaggaactagtcgtctccaggtgttggttattttgtacgatgtcacgtatttgcgccaagtcgagaaaatgcagctcgattttgttggcaatgtgagtcatgagctaaagacgccggtgactgctatttccgggtttgccgagacactattaagcggggctaaaaatgatccggcgacgctagataagtttttgaagattattttcgatgaaagtaagcgactgacccagctcatcaatgatattctaacgttgagccggcccgaatcgaatcaaacggtgcaggcacaagtaccacttaagaagttagtcgacgatgcattgcgtaatttagctaaagtgattaaagacaagcagattcgggtggaggtggcaattgcaccagacttacaggttgtgaccgatgagcgcaagttaactcagattgtgcggaatcttttgaacaatgccgtgttttataatcgattagccggacatgtgacgatcacggcccaagtagtcgaagggcacttgtcattggcggtcgctgataccggtattgggattcccgagacagagcaggcacggatttttgaacgcttctatcgggttgataaagcgcgcagtcgtcacaatggcggtactggtttgggtctggcaatcgttagtgagctggtgaaaagtatggatggtcaggttgccgtttcgagtcaagtcggggttggatcgacctttaccgtgacattgccggtcagcaagcgccagcagcaagattgatgagatatttacagaacctttacattcaacgacatgaacatttacacgcaactgttaagatgattggagcttgaaatggaggatttcgtgtgaaaaaaattgtgaccctgttttcgatcgtatttttggcgctgttagcaagtgcatgtggcagcagtcatagttcgaaacagtcgggtgaatcaatcaccgcagttggatcaagtgccttgcagcctttggttgaagcggcgggcgaacaatatcagacggaaaatctcggcgtgtttatcaacgtccaaggtggcgggagcggtaccggattaagccagatccagcaaggggcggttgatatcggtaattcggatctttttgctgaagaaaaacctggcattaaagccaacgccttggtggaccataaagtggccgttgtcgggattgcgccgattgttaatccaaaagtcggcgtgaaaaatgtgtcaatgacgcagttgcaacagatctttcttggtcagatcaccaactggaaacagttaggtggcaagaatgtgccgattgtccttgtcaaccgcgcacaaggttcagggacccgcgcgacttttgaaaaatgggcgcttgaaggcaagcaaccgattgccgctcaggaacaggattccaccgggatggtgcgacaaatcgttggcagtacgccaggggcaatttcttacgtcgctttttcttacgttgataaaaccgtccgcagcttgtctgtagacggcgttgcaccaactgatagtaacgtggcaacgaatcgctggcatatctggtcgtacgaacatatgtatacaaaaggtcggccaagtggtttgaccaaacgatttttgacttacatgatgtcaccggccattcagaagaaactggtccaaaaaatgggctacattccgatgactaaaatgaaagtagtgcgtaacgccagtggccagattagtcgtccataagcgagtctagcgtctaaaagctttttcggctcacggattgatgaaacaagtcagtgtgggcagttaggttcaggcaacctagcagatcaatgaaggcagatgcggccaggacaatggctagttgcggtgaggttttaggaggttatgatggatccaattcgagaagcgatgctaaaaaaatcgcgctcatcaaagttagagcggcgcggcaaaacgattagcctgatttgtatcagtctgattgtacttgtagtggtggcaatatttttctttgtcgcctcaaaaggattagcaacattctttcaaaataagattaatttatggtcgtttttgagtaagagtgtgtggaacccatcaattaaagatgcccatgggaatccggaagttggcgcgttaccgatgattgtcgggtctttcggcgtgacttttttatcggcaatcgttgcaacgccatttgcggttggcgccggcattttcatgaccgagatttcccacaagtgggggcaaaaagtgttacagccggttattgagctgctcgtcgggattccatctgtggtttatggcttcatcggcttgtccgtcattgtacctttcattcgccatatctttggcggtactggctttgggatcttagccgggacttttgttttgtttgtcatgatcctgccgaccgtaacatccatgaccgtcgatgcgttaaaagctgtcccacgccattatcgcgaggcttcattggcgctaggtgctactcggtggcagacgacttatcgcgtggtgctgcgtgcggcaattcccggcattttgaccggtattgtttttgggatggcgcgcgcttttggtgaagcgttggcggttcaaatggtcattgggaatgcggctttgttgccaaagaaccttgtttcgccagcttcgacgttgacttctgttttgacgagcgggattggtaatacagtcatgggttcgctggaaaataacgctttatggtccttggcattgctgctgttgctgatgtcattagcctttaacctgttgattcgttggatcgggaagaaaggggagctgaacaaatgaatccaaaagttgttgataaaattgccacaacggttctgtacattgtttcagggattatcattgttattttggccagtctcctcgggtacattctttttaaaggggtaccgcatatttcctggcattttctcacgagtccagcacaaagctttgaagctggaggcggcattggcattcaattgttcaactcgttttatcttttagtccttgcgatgctgatttcaacaccgatttcgttaggggcaggcatttacctcagcgagtatgccaaaaagaattggttgacggatgttattcggacttcgattgaaattctaagttccttaccgtctgtggttgttggactgttcggttttctgattttcgttttacaattcaaattcgggttctcgattttatccggggccttggcattgaccgtcttcaacctcccgttgctgacgcgaaatgttgaagattcattacgcggcgttggctttgaacagcgtgaggccggcttagcgcttggcctatcgcgctgggagacggttttacatgttgtcatccctgaggcattgccggggattattaccgggatgattctaggtgccggacgggtttttggcgaggcggcggcgctaatttacactgctggccaaagtgccccggcgctggatttcaccaactggaatccggctaatattgcgagtcccctaaacccatttcgaccggccgaaacgttggcggtgcatatttggaaaatcaactctgaaggcattcaacctgatgccgttgctgtttctgccggagctagtgccgtacttgtgatcgccgttttggtcttcaacgttggcgcccgctatttaggcaatcgactatttaaaaagatgacggcggcttaaacgggttaggcttctagtatcaatgaggcttacccggtatgataatcgcgataatacgtggaggcagaggatgcaagaactggaaaagtattcattagatgacacttatattcgaccatttgatcgcgaaaggcaggaaattgcgcttgaaacggaagatctgcatgtcttttatggtgataatgaagccattcatggcgtttcgctgccgtttgaacgctataaaatcactgcattgatcggttcaagcggctccgggaagtcgacatacttgcgctcactcaatcgaatgaacgataatattgaaagtgcgcgagtcaccggtaaaatcatgtaccggaatattgacatcaatagtgatgcggttgacgtttatgagatgcgtaaacacattggaatggtgtttcaacggcctaatccattcgccaagtcgatttacgacaatattgcttttgcactgcggcggtttggcatcaaggacaaaaagaaactcgacgaaattgttgaaaccagtttgaaacaggctgccttgtgggatcaagttaaagacgatcttaatcaaagcggtatgtcgctttccggtggccaggcacaacggttatgcattgcacgggcgattgccatgaaaccggatattttactcttggatgagccggccagtgccttggatccgatttcgacatcggcagttgaagataccttgttgtcattaaaagataagtatacgattatcatcgtgacgcataacatgcaacaggcggcccggattagtgactacacggcgttcttttatagtggagcagcgcttgagtatgatgaaacccgtaaaatcttcacgcgtcccaagattaaagcaaccaacgattatgtttccggacatttcggctaggaggttcccatggctgaagcacaaaaaatcattacaagttcagatgttcatcttttttatggtaagtttgaagcgctaaaagggattaatctggattttaacgaacatgagatcacagctttaatcggaccttctggctgtggtaagtctacgtatttacgaacgttgaatcggatgaatgatctgattccgggggtgacgattacaggaaccatcagtttacgcggtcagaatatctatgcgcctagtgaagacgtggttcaattacgtaagcaagtgggcatggtcttccaacaacccaatccgtttcctttctccatttacgaaaatgtgatttatggattgcgtttggcaggggttaaagataaaagcattttggatgaagcggtggaaaccagtctcaagcaggcagccatctgggatgaagtgaaggatcatctgcatgacagtgcattatcgctttcaggtggccaacagcagcgggtttgcatcgcgcgggtattggcagtcaaacctgatgttgttttgctagacgagccgacgagtgccttggatccgatttccagcacgcaaatcgaaaacatgttactcgagttgcgtgaccaatacacgatcattctagtgacgcatagtatgcatcaagcatctcgaatttccgataaaaccgcctttttcctgacaggcaacctgatcgaattcgctgacacgaaacaaatgtttttaaatccaaaagaaaaggaaaccgaagactatatcactggacgcttcggctaggaggggtagtatgcgacgactttttgttgacgaattgaacgatcttcatgtacgtttttcggaaatgggaatgatggttaatgaggccatctataagtccgtgaaagccttcatcaatcatgacaaagctttagcccgcgaagtgatccacgaagacaaacacattaacgagcgtgaagttgatttggaaaaacgcagcttcgaattgattgccttgcagcagccggtgacgaccgatttgcgggtgattgtcacggtgatgaaggcaagttccgatctggagcggatgggagatcatgccgtttcaattgctaagtctactattcgagttaaaggtgaaacccgggtaccgcaaatcgaagctgatattgccgggatggcagacgcggtaaaagagatggttgaacaggtgctggatgcctatgtgaaggaagattcagcccgtgcacgtaaaattgccttggaagatcacggtatcaatgacttttcatcgcggatttacaaagagtgtatccgccagatgcaggaaaaccccgaaaccgttgtcggatcaatggactatatgctggtttcgtcctatcttgaacgaatcggcgactatgtaaccaacatttgtgaatggattgtctacttaaagaccggtaagattaccgaattaaactcaaacgcaattgaagacaagttctagatcctggagacttttttaacgaggctggggcatcattcattgtttcaaaatataagcgtaccatttctcgattttttaagaaatggtacgctttttggcttcttcatattagtataaatgagctttaacaattccagtgccaaaacggagcaatcgtaggccagatggggctcagccgtggaacaacacagcgaccggtttttgtcgctgatgttgttaggcgacttggagactgccgggcttgcaagctccaagcgccgtctccgctctagcttcgcgtcgtcaccccatctggccggagattgcgtagtttggcacggcccggaactactttagttactttctcagtcatagtattcggattttagtgcgcatcacatcctgagatagaattatgcctcagtcccttggcttattcatatgagtacaaatgagccttgacgattgcggcgtttggcgcgacacgggactatttgacttattttctagcgatgatattcgaatttggtgagtagcgaatcctgaaatggaatgatgccacaccctcgttcattccgcttttttagaaagcagtgaggtgtcgggatgaccacaaaactgatcgcgtccgccttacgacctgtttaaaaatcaacctttggacctatgcgccttggccgaattccgtgcatactaatcatgtaatcaaatcctggagggataacccatgaatgaacgcgaaagaattttagacctcgttaaaaaaggcgtcatttcaagcgaagaggcgcttgtgcttttggaaaacctcgcaaaacagcaaggtacgcaagccggcagcccggccgatgatactgctcccgaagctcattcggaacagaccgaaaccgatgatcaatcaacgcaggaacaacaagaagctaataaagatacggatgctgcattgacagagcttaacaccgaaattgccgaagccgccggtgccttggatgctgcgacggcgcaagtgacaagcatcagtaagcaaattgaagcgaataacgaacaaattattgttttagacacaatggaagatcttgaagcactttccccggaaaaatatcaaaagcgcggggaattgaagcaagagaatcagaaacttaacgatcagttagccgagctaaagggacaggttgaaaccatgaaggccaacctggcaacgttgcggcgtcaaaagcatgatcttgaacgccaaaagatcagtgacaaaatcttcaacgatgactggcaaaaagatgctcgtgatgtcttctcggagtttggcaagaacatcggggatgccacgtcacaactaggcggtttcgttaaggacactgtcaacaatgtcctagataacgttgactggaagaatgttactgtaacggttcccgggttggcgactgaaaaatttgaacatgttttcaagtttccagacagtcaggcgacgattctggatgtcaaagtggccaacggtgatgtgaagtttaagacttgggatcagccggggattcaagtcgaagcagcgattaagttatacggaaagatggatgccgattcaccgtttgaagcttttaaagatcgtagccgcattgatgttaccgacgatcattttagcttccaagtgccaaataagcgcgtccaggccgatttggtcatttcgttgccaaagcgcacttacgaccacgtgtcagttcgtttgctgaatggcagtgcggatttaaccggtctgaatggtaaagacttttatgttaagagcaccaatggccaaatgaattttaccaacgtggatggtgtgatgattgaaagtgaaggcgtcaatggatcgattaaggtccaaggcggccatacccatgacttattgttgacgactgttaatggtgatgtttcagtggatgccgatccggcaacagcagcactaaagacggtcaatgggacggttcgagccacttatcacacggactttaccaaaattgaagggacttccatgaatggcaatgtgaaagtggcggttccggcttctattgcactgaaaggtgaagcccgtacccattttggtagcattaagagccgacttagcaacgttgcggagccagccaaaggactcaagcgttttgagttagaccggcccggaaccggcaacagcgagttgaaactcaatacaacaagtggcaacattcaattaaaagattcaaatgactgaggggatcgcttatgccttttctaataattccaattatgttcttcatcgttggcctggtactggtggccgtgtttgcaatcggtattttcttgctaaaactgttaatcgttcccgccttgttagtggtgttagcggtttggctgttctcacgccatgatcatgagaaacggcaaggtccgcgccacccttaccgtgaccagagcacgtctcgtccgcgaaaaaacgcaacgcatgtgaccgaatcacgtgatgatgattggagcgatttctaatcatgaacttcatcaaacgcgcagttatcacaacagctgtcttcctgatttatgctcaggtgtttcctggtcagttgttcgttgcgagctttggtgttgccgttgtcggggcactcgttttaggggttctcaatggcttgttgcggccgattctggtcgttttgtccattccgattacgattctgacactagggttgtttctgattgtgctcaatgggctgatgttaagtatgatgacatggttcgttcccggaattgttttcagcagtttcgggtcaacgatggtacttgccatcatcatatccgtcttgaatatgatctttgtcggcaaacattaagtcagcttaacgataaaagtgtgcgtcacgagattatcatcatgtaaaaataaatcggtcttaaagatgtttcctgtctttaaggtcgattttattttgtctaaagagattggttagtggataagtgcgtggaaaatgcccattttcaacattgacatattaaacgccatcgtttcagaattaggcgaatgttttgaagcgagctgctatgagggccggcgagttatggtaaaataaagcaaatacggcgaaagaaaggtggacttcatggcagacagcgtgacagtacggcaacttgtcaaagcgacaaagcttgaggtatacagcggctcggagtatcttgatgcccggcaagtcgttttgagtgatatttcgcgtcccggccttgagttaacgggttactttaattattatccacatgaacggattcaacttttcgggcggacggagatttcatttgctcgtaatatgtcttcagaagagcgtttattaattctgaaacggatggcaacagaagatacaccggcctttctggtttcgcgaggattgcagccaccggcagaaatgatcacggcagccactgccgcacatattccggtattaggatcacggttgccgaccaccaggctgtcaagtttgatcaccgaatacttagacagccaactagctgaacgtcgcagcatgcatggcgtcttggttgatatttacggtctgggcgtgctcattactggcgattccggggtgggaaaatccgaaacagccttggaattggttcagcgtggtcatcggctcattgctgatgatcgggtggatgtttatcagcaagatgaacaaacggttgtcggagctgcaccgccgattttatcccacttgttggagattcgcggattgggtatcattgatgtcatgaatctctttggtgccggggcagttcgtgaagacaccaccatttcgctgattgtgcacttggagaattggacaccagacaaaaccttcgatcgcttgggctctggcgaacagacgcaaatgatctttgacgtgccggttcccaaaattacgattccggtcaaggttggtcgtaacttagccattatcatcgaagtggccgcgatgaatttccgcgccaaatcgatgggctatgatgccactaaaacatttgaaaagaatttaaatcatctgatcgaacataacgaagcgaacgaccagaagagttcggaggaaaaataacttgttattaacactcaatccaattgcttttcagttgggtgggctggaagttcactggtacgggattattatcgccagtgccgttttactggcggtttatctggcaatgaaggaagcaccaaaacgcggtattaaagaagatcatattttaaatctgattttatgggcgttgccatttgcgttaatcggtgcacgcctttattacgttgcttttgaatggtcttattatgcggctcatccaagtgaaatcatcgcaatttggcatggcgggattgccatatacggcgctttgattgccagtgtgattgtttttgcgatttattgtcgcgtcaaatggctgccggcttggctggtgttggatattgcggcgccaaccgtgatgttagcccaggcaattggccggtggggtaatttcatgaatcaagaagcccatggtgccatcaccagcttggcttacttgcgcggcttgcacctgccagaattcattattcaacaaatgaatatcggcggtgcttatcgccagccaaccttcttatacgaaagcatgtggaatctcgttggttttgctttaattatgacggttcgccatcaccaacactggtttaagcaaggagaaatcgtcttgagttatgtcatgtggtatagttttggacggttctttgttgaaggcatgcggacggattcgttatatgtcataccgggcttacgtgtttcccagcttttgtcgattgttttattcgtggtggcggccgggctcatctggtaccgacggcggcgtggcgatgtcgcgtggtacttagacggtaatccactgcaggcggttgaataggagtgattttgtgccgacaaaaatagcggttttaggagcgggctcatggggaaccgtgttagccaatttgttaacggaaaatggccacgaagtcgatttatggagtcataatcttaaacaggttgcgaccatgcgagaaacccgcaaaaatgaacattatttaggtgcagaatttaccttacacgatgcgctgcatgtcacggctgatttaggccaagcattagatcaagccaatgtgattcttttcgttgtgcctaccaatgcgattcgcagtgttgccgagcagattagacccattctgcaggctcatcgtggtcgtggtgaacagccgattattgttcatgcagccaagggattggaacgcggcagtgagctgcggatttcacaagtcttagctgatgtcctgcctaaagaactcattcaaggcatcgtggtgatttcgggtccaagccatgccgaagatgtagcgactcatgatatcacaacgctgacagcagcatcggcagacttatcactggccaaaaaagtccagcggttattcatgaatgactattttcggctgtacaccaatactgacgtgatcggagttgaaatcggagctgctttaaaaaacgttatcgcaatcggggctggcgcgttgcatggtctcggatacggcgataatacgaaagctgctttgatgactcgcggtctggcagagatcagtcgggttggggtcaagttgggcgcagatccgttgacgttcatcggcttatccggcgtcggtgatttgatcgtcacctgtacgtcggttcacagtcgtaattggcgtgccggtaatgcccttggccaaggtgagaaacttcccgatgtgttgaaaaatatgggcatggtggttgaaggtgtttcaacgaccaaagttgcccaccacatggcaagtgagttgggtgtcgatatgccgatcaccgatgcgatttatcaggttttgtatgaagacgcgccgattcgaacggtgattaccgatctcatgaagcgaactggcaaacctgaatttgattttgataatgccagtttacaaaaaccataaaaccctgtatattagaacatgtagcttactatttgtaagcaataaggcaaaaggagagactgcccatggcaaaaaaatatgatgtaatcgtgatcggtgccggaccagggggcatgacagcagcactttatgcttcccgagccaacttatcagtgttaatgcttgatcgcggcgtctatggcggtcagatgaacaataccgccgaagtagaaaactatccgggttacaagtctatccttgggcctgatcttggccagaagatgtacgatggtgcaactcaatttggtgccgaatatgcgtacggcaacgtgatcagtgtccaaaatcacggcgctactaagttggtcaaaaccgatgaagacgagtttgaagctaaagcgattgtcattgcgactggcgctgaacacaaaaaactcggtgtacccggcgaagaagccttcagtggccgaggggtatcgtactgcgcggtctgcgatggtgcgttctttaaggatcgtgaacttgcagtcattggcggcggcgactcggccattgaagaaggactttatttgacgcagatggccaaaaaggtcaccgtcattcatcgtcgtgaccaattacgggcacaacaaatcattcaaaagcgagcctttgcaaacgacaagatgcattttgtctggaatgcccaggttcaggaaatccaaggcgacgatatgaaagttaccggcgtcaaatatcgtgataaagaaaccggtgaggaacatgttttgccagttgccggtgtcttcatttacgtcggcatcatgccaatgaccgagccattccaggatctaggaattctggacgatcatggctggattccaacggatgaacacatgcgaaccaaggtgcctggcatctttgcgattggcgatgttcgcgctaaagacttgcggcagattaccactgctgtcggagaaggcggcaccgctggtcaaggcgtcttcaattatattcaaagtctgaatgacaccagtgttgaagtaaaagcctaagttttgacgagtcttttaagattatccaccaattgaatttgatcaaggaacggttctagcagacacgaaaatctgttagaaccgtttttgcttttaaaaataccacactattgcgaatatgatggcaaaaatcgtaaaagaattttcttatttgagcgcgttttcaacccagcgttggtcacttatagtatgattggacagggaagggtagtacccgaaattatcaatttagacagataggagctgatcacgtgagttatcgtgatacgtatcaacaatgggtagatgaaccaacgcttgatccagagctaaaaactgaccttaagaaaatggcagacgatgaaacaaccaaagaagaagcgtttgcggaaccaatggcatttgggactgccggcatgcgcggtgtgcttggtgccggtatcggccgcatgaatatttataccgtccggcaggcgactgaaggtttggcacggtttatggataccttgactgacgaaactaaggctcggggtgttgctattagttacgattctcggtacatgagtcaggaatttgcctaccaaagcgcaggcgttctcggcgctcatggcattaagagttacgtctttgatcaactgcggccaacaccggagctgagttttgctgtccgtcacctgaagacatatgccggaattatgatcacagctagccataacccgaaacaatataatggctataagatttatggccctgatggcggtcaaatgcctccggaagagtctgacaagattactaaatatgcgcggtcggctgatgatctttttgccatcaaggccttgaacgttcacgagttacgggctaaggatttgatgcagccaattggtgaagatgtcgatgaagcttattatgctgaagtcgcaacggttacgattaatcatgatttgatcaaaaccgttgggaaaaacatgtcgctggtttatagcccgttacatggtaccggtcggattccggcacaaatggtcttgcgtaatgccggatttgaaaatttccggttggttgcgaaacaaagtgttgctgatccggaatttgccacaacgccatttccaaatcctgagtttgcccaagtttttgatttgccaattgaacttggcaagaaaattggggccgatgttctgattgccactgatcccgatgctgatcggctgggaactgcggttaaagttggcgatcactatcagttgttgaccggtaatcaaattgcgtctgtgctattgcattatattcttgaagcacgtaaacaagccggaactttgccaaagaacggtgcggtcgtcaagtcgattgtttccactgagttggcaacggccattgccaaagattatggcgtggacatgatcaatgtgctcaccggcttcaagtttatcggtgatcagatcaaacatttccaggcaacaggcgaacatgaattcctgtttggctttgaggaaagctatggctatctaatcaaaccgtttgtgcgtgataaggatgccatccagtcaactgttttgctagctgaagtggccgcatactatcaatcacaaggcaagacactttgggatggcgttcaggaactttacaagaagtatggctactacgccgaaaagactgttggcgttgattttgaaggcgttgacgggcctaagcagatggctaatctgatgaccaaattccgtgaagaacagccagatgattttgctggcgttaagatcgcgaaagttgaagatttcctgagtcaagaagctaagtccgcagatggcacagttgaaaagctgacgatgccatccagcaatgtgctgaagtatattttggcagacggtacctggattgccattcggccatccggtacagagccgaaagtgaagttctacgttggcaccaaagccgatacggatgcaaaggcgcaagaaaagcttgatgcctttgagaaagctttggatgcttttcgtaaggaagcttagatgaacgattcacgtggtcagcggttgcagtcgtgctagtgaatgcaatgtgataaccgcggataaaagtgtattttaaccgatagatcctaaagggcagcctttggggtctattttttgattttgcgctaatgcaaccgtgacgctaaatctagcgttggagctaaaagtatacggaaaagtaagcgttttctgtttctgccacagctttctttagtatactttggttactatgacaaattgacaggcggggggcgattgcgtgacgtatttaatcattgaagacgaaccggcattggggaagacgcttcagacctatttcagtcgtgacgaagaggtttggctagcggcgacactggcaaaagccaccacgattgtgaaaacagaacatccggcgttgatcattttagacttgggcatgccggatggggacggtttggcgtggttgaaacggtggcgggcttatttgacggctaaagtgattgttttgacggcaaatgatgacgagtcaaccacgattgccggcttggatcttgccgatgattatgtggtcaagccggtgagtcttaaggttcttaaagcacggattgccaaacaattaccgggagagtcccagcaatttggggccgttgcgctaaatctgcggacaggtcaggtcactaaaaacggcaaaccagttaggcttacaagtgccgaacaacgactgctggcctatttctttgttaatcccaaccaaattttgacccgtgaacagttgctggccgctttatgggatacgcgcgaacaatttgttgctgataacacgttgacggtaacgattaaacggctgcgcgaaaaattggaagatgatcccgccaagccaacactcataagaaccgtacgaggaatggggtattttatcgatggttaagcatgcttattggacgatgcctgagacgcgtcaagtgtttcaattgacagcgatattaattgggattctttggacggtacttttattaaccagtatcaccgtaccggatatgcgcatatggttggtgctggtgggcggtttggctactggcataagtgtttggttaacatggtgctgggcgcgaaagtttagttatcattttgatcaagcgcttttgcaattggatatgacgaaggaaaccgaggacaattacctaattgatcgcaatgatgaaggtttattttctgacttcaataatcgtctctatcactatgcgcgccaaatgcaagccgagcgtgaggctattaagcgtgatcgtgatcatctcaatgaggcgattacggatattgcgcatcagttacggacgccacttgcagccaacagtaacttgcttgagatgatgactgaatcgaattggaaaacgacgcggctggctttgcaggcacaacagcagcaccaagcgcaattaatcgagcagctgatcttactggcaaaagttgatacgcatacgttgagtcagcggcgggaaatcgttgtgttgaccgaccttgggaaagcagcccttagtccattcttgcgccagattgccgacaaagagattaccgttgattggcaagtgccaccagcgctgacgatcaacgttaattcggtattggtcaaagaagcctttgccaatgtttttaaaaatgcagtcgcgcataccccggttggcggccgaatgagtgtgcgcggaatcggtgacccggtgcgcacgcggcttatgattatgaataccggtcaaccaattgccgctcaggacctgccacatttgttcgagcgcttttaccgtggtcaatatgctactgccaacaatgtgggcatcggactggcaattgctgctggcatcactactgccaatgatggtcggctaactgcagctaatactgccaatggtgtccaaatgactttcgaatttttccgctgatacggtggctgtcactcacctgtcacttggcgttgctaaaatgacggcaagaaaccgataacaggataggctgttgtcgggtaaaggaggagatttgggatggcaattttaacggcacgccaattgaccaagcaatatgctggtgaagcgcatccggcactggatcatgccaatttgacgattgaacaaggcgagtttgttgccatagtggggccgagtggttcaggaaagtcaaccttgcttcatttgttaggcgggattgatcagccaaccagtggggaggtccggttatatgacacggatatctacgcactgaatcaaacgcaactggcgatttttcgacgtcggcaagtcggcttgatttatcagttttacaacttgattccgaacttgacggtggctgagaatatcacattgccagcggatttggatggacggtcaattaaagaagccgttttgacggagatgttaacaaccttgggccttgtcgaaaaggcatctgctttgcctaatcagctttcaggcgggcagcagcaacgggtggcaattggacgggcgttaatcaatcatcccgcggttattttggccgatgaacctacaggcaatcttgatcgccggaattcacaggatgtgatgacgctactacgacaagccaatattaagcaggggcagacactggtcgtgatcacccatgatccagacattgccagtcaagctgatcgtattgtccgcattgacgatggggtcgtgagcggggggcggtgagatgatggggatcgtgggacatttgactaaagagcagctgttgggtcaaaaagcgcggaccgtgacgaccattttagcaatggcagtcgctgccaccttgacacttgcaaccttaatcggcatttattcggcgagacattcgatgtatcaaaagaatatccaaagtactggcggcatgcagtttgcaatctcgcagttagatcgacaaacggcaaaggcaatcgggaaagactcagcaatcgccaaaagtgtggtttatcaacggcaaggaacggttgatattaaggaaccgggagtggcaaaaacgatggcatcaccgttactaacgttaccaaaagcggccatgcaacgattagtgaagccggtggtactcgccggggcattgccaaaacagccaaacgaagccattcttgcccaggatttggtgacaaagcagtatcgaattggtcagattattcaaagtcggcagcagggcaaaaacattcagttgagaattgtcggtagttatcgcggatacgcaggactgttgccacctgatggcgttttaacacttggtacggtgaccgggtccaaagattacacggtggcagctgcttttagagactacagtaatttttatggaaagcttcatgcactgacatcgcagcatcgagtgcattcgcgtcagctggcaattaataacatggcattagaacgggcaggcgagtcacgtgatgttaagctgagagtcatgtttgccttattggtagtcgttattttaagtgtgattgggttcgtatcgctagcgttaatttatacaagtattaatcttagtgtccggtcacaaacacagcgttatggcttattacgttcaattggcgcgacccctaaacaattgcgcagactagtttattcataggcggcgatgcttgcttttccggcgtttttaattggtatcggaatgggaatcggtggcttagcagtcgcatttcacatcctcaatcagcgctttatagtgcaaggaaataccttcagattattccttgtgattgattggtggccaatttttctaggggcgatcttcatgttcttagtgacgttggtagctgcgtggcgcccggcacatcgcgcggcttcagtcagtccgattgcggcggttcaaatgctgcctgagagtgtgaagattagtcgccggtcgcgtcggcttagtccgatcgagcggctactccgttccccaactgcaaagctagcttataagcagtatcgccggttagggtggtcaaaactgacgatgatcgcgactttatcactctcactgatgatttttattggtttaaccggtttctttcgaagtgttttgacgttgaacaatgaaactttcacgcagcaagctgatgttaccattgccagtaccgctgccgtggatgctataccctggacatttgaaccttcagaagatgcagggatcaagcaggcaactgtgactggaaccaagcaaatgcagctggctcatgcgccgaaagcttttggagacaaaataaatatcatcgttgttagcgaccggctttttcaaactgcttttcagaatcagccgactgttttgaccagtagccaactggttgtgaattcaaagaccggtcagcgtgagcaacggtggcaactgccgagagacttttctgggaccttacagctgatcaatcggcgcggagaaaagcaattcacgcaatcaattcgcgtcgtgactaaaacaacagcggcgttgggtaagtggcaatttggcgatcaatccggattagtcctgtcccgtgatcggtatctgaaactattaaaagcattggccatcaatgatcgtgagcttgattattcgattcaaacgcaactgacccaggctaaatttcatgattcggttgcaaaaatattacgcaaaatggtgcctcaaggagcactgaatgatcagattgctaatcgagcccaggaaagttcgtttggattggctattcaagtgatggtttacgggtttttaaccttactaaccttggtgagtcttgctaacattgtcaatcatatttttgccaacttactgcaaagacggcgtagtttggcgatgttgcaaagcgtggggatgacgccgcgtcagatcacaagcatgattggccttgaaaatggttttttgtttggaacaagtttagtcattggcagcattctcggaaccggactgacatggttactttatcgcgtggcaaacactggcatagcgtttaattatcgcgtgccatggcaagagatcttgattgcagggggaatgttgatgcttatttgggcggtatttaccggcgtgagtcatcaaatactgaaacatcaagatcttgaccaattgatttggttgagttagcaagagcctgtttttaggtggtgtcacagttgctgctttagggtttctatcgctttgatcaatgttatccatattcgttattgggatagtgactgacatcatggagtggacaatgcttcagcgttttaattggctctagccgcgttcgcaagcgcaaaagtctgcgtgtaaggaccttggtcgcaatggctaaaatgggtggctattatgccagaatgtaaatccctgtatacacttataaacgcgttcacagggccagaaacctgcgtgtaaggaccttgagcctaaatggcaaagcccagccatttaggctcaaggccacttacactccggtttctaagcggccctgttcacgctttctttctataacgcgctccccggcgcagagacctgcatgtaaggaccttggtcgcaatgaccaaagtgcggccatcacgcccaaggccgcttacactccggtctctaaccgcgccggctcgcgctcactgtgaattttcttgcaatgcctacttgatggtggtagtcttttaacaatttaagtaaatttcacgatcagacacgacaactatcaggaggtcatttcgaaatgggcatgcaccaatttatccaaggactgagcaatctggaaacactgcggcgggcaccgggctttttcaagtatcaggagcattcggtggcggctcacagtttcaaggtggcggagatcgcgcagatgttgggcgatgttgaggagttagctggaaacaaggttaattggcagatgctctatgagaagtcactcaatcatgattataccgagcgcttcatcggtgatattaagacgccagtgaaatatgcaaccccaacgttacggcaaatgttggctgacgttgaggctaccatgacggaaaacttcatcaaaaatgaaattccacacgattttcaggatcgttatcgtcggcggttatctgagggcaaagacgaaacgctcgaaggtcagatcctgagcgttgcggataagattgatttactgtatgaaggttttggggaaatcgaaaaaggcaatccggagcaggtttttctcgatatctattcggaaagtttaagtactattttacagttcaagaatcgtccgagtgttcgctactttcttgatgaagtattaccggatatgctagatgagaagttcgccagtcgggatcaactggctaaattgactaaagaaaccatggcagaacatgagactggcaagtagcgaaagtatgttcgctatgttataatatgcaggatgaaagttgggatgcgtttcttatcggttccaacttttttaatgagaaggttttagtgtggttgtgagctttgcgttggccggttagcgctcgccataacgcgttcaccggcgcagggatctgcgtgtaaggaccttggtcgcaatggccaagagcgggccatcacgtctaaggccgcttacactccgacttctaaccgcgccggttcacgctcaccataacgcgttcgccagcccagaaacctgcacataaggaccttggtcgcaatgaccaaagaccagtcattacgcccaaggccgcttatgttccggtttctaaccgggctggctcacgctcacttttctttggaggtacatcgatgattgaacgaattgctgatcgtaaatttgatttggtttcgccttataagccagccggggaccagccccaggcgattgctaagctgactaaggggtttgaagaaggtaaaaaggcgcaaattctgttaggtgcaaccgggaccgggaagacgtttacgatgagcaatatcatcgctaacttgaacaaaccgactttgattttatcgcataataaaacgttggctggtcagctgtatggtgagtttaaggagtttttcccacataacgcggttgagtacttcgtgtcttattacgattattaccaacctgaagcctatgtgcctagcacggacacttatattgaaaaagacagtgccattaatgatgagattgataaattgcggcatagcgctaccagtgcgttgcttgagcgtaatgacgtgattgtcgttgcttcggtatcttctatctttggcttgggtgatccgcatgaatataagaaccatgtgttatcgttgcggactgggatgaccattgaccgaaatacgttgttgcggcaattagtagatattcagtttgatcgtaacgatattgattttcaacgcggtcgttttcgggtacggggagatgtggtggaaattttcccggccagtcgtgatgatcacgccatccgcgttgaatttttcggtgatgaaattgatcggattaccgaagtcgatgctttgacgggtgaagtgattggtacgcgagatcatgttgccattttcccggccactcatttcatgacgagcgatgaacagatggaacgcgcaattaagagtatttctgcagaactcgaggatcgcttaaaagtgttgcgcggtgaaaacaagcttctagaagcccaacggttagagcagcgtactaattatgatattgaaatgatgcgcgaaatgggctttaccagtgggattgaaaattactcgcgccacatggatggtcggaaacccggagaaccgccgtatacgttgctcgactttttcccgaaagactttacgattatggttgatgaaagtcacgttacgatgccacaggttaaaggcatgtataatggcgatcgggcccggaaacagatgttgattaattatgggttccgtctgccaagtgccttggacaatcgacctttgaagattgatgagtttgaaaaacatgtcaaacggattctttatgtgagcgcaacgccaggaccttatgaactgagtcgcgttcctaaagaagatattgctgaacagattattcgaccgaccgggttgttggatcctaaaatcgaagtgcgtccggtgatgggtcagattgatgatctggttggcgagatcaacaagcggattgatgcgcatgaacgagtcttcatcacaacgttaactaagaaaatggcggaagatttaaccgactatcttaaggatatgggaattaaagtccgttatttgcatagcgacattaagacgcttgaacgaacccagattattcgtgatttgcggctaggtaagtttgatgtattgatcgggattaaccttttgcgtgaagggattgatgtaccggaagtatcattaattgcgattctggatgccgataaggaaggcttcttgcgggcagagcgttcgctgattcagacgattggccgggcatcgcgtaatgaacatggtaaagtcattatgtacgctgacaaggtcacggattcgatgaaagccgcgattgatgaaactcggcggcgacgggcaattcaagagaagtttaacgaagaacatcacatccaacccaagacgatcatcaaaccaattcgggcggctatttcaacctatgaacaatcggatgacgaaaaagccgatgcaaagaagacttttgctgaagttgattacgaagatatgagtaaagcggataagaaagaactggttgccaacctccgttcacagatgcaggcggcggccaaaaagttggactttgagcaggcagcttctttgcgcgatacgattttggaattgcaagcggatatgtcttgagaatgaggtggacaggacttgcatgatggcaccaactcagccatgattgctatgagcagatccggcgatcatggctgttttcttgctttcgaattaggcgcaagtgctgaggcatttctagtttgttcccgccagcgctaccagttgtcggcatgttttaattgaggagatcttttgtgaatggcaaatgataaaattgtaatccacggggctcgggcccataacttaaaaaatattgatgtgacgattccgcgcaataagcttgtggtcatgacgggcctttctggttccggtaagtcgagtctggcgtttgatacgttatatgcagaaggccagcgccgctatgtcgaaagcttatctgcttatgcacgccagtttcttggtcaaatggagaaaccggatgttgattcgattgatggtctcagtccggcaatttcgattgatcaaaagacgacttccaagaatccgcgctcgacagttggaacggtcactgaaattaatgattacttgcgactgttgtgggcgcgggtcgggcatccgatttgtcctaacgatgggacgccgattaccagtcaaagtgttgaacaaatggtggaccgcgtcttggctttgccggaaaagagccgcattcagattctgtcaccgattgtgcggcggaaaaaaggcagccataagaaagtctttgccaaaattatgcgtgaagggtatgtccggatgcgcgttgacggtgaagtcatggatgccacagcggattatgaactagacaaaaacaaagcccatgatattgatatcgtgattgatcggattgtggtgaagccagaagcccgcagtcggttatttgactcttttgaagcggcgttgcggctttcggaaggatacgctaatgttgacgtcattggtggcgatacattgcgtttttcggaacattttgcttgcccgatttgcgggtttacgattggtgaaatggagccgcggttattttcatttaatgcgccatttggagcgtgcccggaatgtgacgggctgggtgtgaagttgactgttgacatggatctggttgtaccggatccaagtatgactttagctcaaggtgccattgccccatggaatccaattagttcgcaatattacccggaactgttggcacaagcggcaactgcctttaaggtgcgaatggatgtaccgtttaaaaaactgaccaagcgcgaacggaatgttgttctcaatggcagtgatggcaagccattccactttcattatgaaaatgacttcggcggtgttcgcgatgttgatgtgccgtttgaaggcgttttgaccaacatttcccggcgttatgccgagacaaatagcgacttcacccggcaacagatgcgcggttatatgacggctttgccttgtccggtttgtcatgggaaacggctcaatcgtcaggcactcgcggttaagatctccggacgtgacatcgctgaagtatctgacttggccattaaggatgcgctgccgtttttcaagcaagtacatttgagcgaagccgagaccgtgattgctcagccaattgtcaaagaagtggtggatcggttaacttttcttgtcaacgtgggcctcggctatttgaccttaagtcgaagcgcggggacgctgtcaggcggtgaagcgcaacgaattcgattggccacacaaatcggttctaatctaagtggtgtgatgtatgtgcttgacgagccatctattgggttgcatcagcgcgacaacgaccgtttaattgcctcgctgaagaaaatgcgtgatttaggcaacacgctaatcgttgtggagcacgatgaagacacgatgcgtgcagccgattatctaattgatgtaggtcctggcgcgggtgagcatggtggtcgaatcatggcatcaggaacccccaagcaagtcgcccgcgtgcgtaaatcaattaccggccaatatttatcgggtcgcaagtttatcccggtaccgttaaaacgacggccgggcaatggcaaagtgattcggctggaaggtgcgtctgatcacaacttgaagcatatcaatgtcgattttcctttaggtaagttcattgttgtttccggcgtttccggatcaggtaaatcgacgctggttaattcgattttgcggcgggcactggcgcaaaagttaaaccacaattccgaaaaacccgggccatatgataagattctcggctataaaaatatcgagaaactcatcaacattgaccagagtccgattgggcgtacaccgcggagtaatccggcaacgtataccagtgtttttgatgacattcgcggtttgtttgcggaaaccaatgaagccaagttgcgggggtataaaaagggacggttcagcttcaatattaaaggcggacgctgcgagaattgtaaaggtgacggcatcatcaagattgaaatgaacttcctgcctgatgtttacgttccatgtgaagtctgtcacggcaaacgatataattccgaaactctggaagtcacttacaagggcaagaatattgctgaagttctggatatgaccgttgaagaagcaaccgcattctttaaaaacattcctaagattcgccggaagttacagacgattgtcgacgtcggtttgggttatgtgaagcttggtcagagtgccaccactttatcaggcggggaagcacagcggatgaagttggcaagtgaattgcaaaagctatcaacgggtaaaaacttctacattctcgatgaaccaacaacgggattacacaccgatgatattaagcggttgttggaagtcctcgaacggctggtggatgaaggtaacacagtcctggtgatcgagcataatctggatgttgtcaaaacggctgattgggtcattgacctaggaccggaaggcggagatggcggtggtcaggtgattgctaccggtacacctgaagaagttgccgaggtagcagacagttacaccggccagtaccttaaaccggttttaattcgtgacaccaaacggacgaaagaagccgcggccggttcgtctaagcaggcaaaagcgactaaaacatcgacgaaatagcatcaaaaatagtcgcgtgaaaagcgcgactatttatgtacataacaaacgtttggctttctttgagtttgacgaaaagttatccaccgcgacttcaagccggaactttggggtggaagtcagtaaacagccaccttagacactttttaaattgctttttgaaatggtatgattgaaacgattaagaaagtagggaattaaatgttaaatcgaaagagttttggttttgactggggacagtttatcactggtattttattcctgatcgctgcttttgtggttttacgctatccgttagccactttaaaaaccgttacctttatttttgcggtcgtggcgattattcgtggcattgcgattcttgccggttattccaccttgcgccagtttacaggtaagttagcgtggatttccttactgatggggatttttgatctcgttatcgggttggttttcctgttaaatgccggctttgggatggcaacgattaccatgatgtttgcaatttggttcttggttgattctgtcgggtcattatttaacgtcggccatctgcgcattgccggtaccggctggttcattttatatttgattttggacattctggcggtgattgtttcgctgatgctattcatgcagccggttgttgcagcagtcaccttagtcacactgttggcaatgttcttcgtcttattcggaatcgaatgtatcgtgattgcgttcgcccggcggaatatttaatgtttcatttgaacctgatgacgtggtgatcaaaccgtggcattgggttttttagtaagcgcgagccggcgcggttagaagtcggagtgtaagtggccttgggcgtgatggccggtctttggccattgcgcccaaggtccttacacgcagacttctgcgctggggagcgcgttatgggcgtaaaccagaatataagcggccttaagcgtgatgaccggtctttggccattgcgcccaaggtccttacatgcaggcttctgcgccggggagcgcgttatggagcgtgaaagccaccgactcacggatcgcaccgctgcaagagaaaagtatgaagcagtatgaatgacacgcccggaatgttatactgtatagaatatgatcacaaaggagccgtttatgactgaaagtttggatcttgttattattaccggaatgtctggcgcaggtaagactgtcgccatgcaagcatttgaggatttggggtacttttgcgttgataatatgccacctgcactattgcctaagttttgggaattggtgaaggaatccggcaagatttcaaaagttgcgcttgtcgtcgatctgcgcagtcgggctttttacgatcaaatcatcgatatgctggcaaatttagataacaatgcgtatgttcattcccgaattttatttttggatgctaccgacgaagaattggtatcccgttataaagaaacccgccgttcacatcccctggcaatggaaggccggttgatggatggcattaaaaaggaacgggtgttattaactgagctgcgtaatcgtgcgcaagtggtcattgatacgacgactttaagcccgcgacagttacgcgaaaaaatcttcctgaacttcaaagaaaataatagccaaccggcgtttcatattgaagtcatgtcctttggttttaagtacggcttaccgattgatgccgatattgtgatggatgtccggttcttgcctaatccgttttatatcaaggcctatcgcccgaaaaccggcttggatccggacgtttatgattatgtgatggacaacgaagacgcggaaagtttttacaataagttttacgctttgttggccgaaatcatgcctaagtataaggctgaagggaaaaccagcgtgaccattgctattggctgcaccgggggacaacatcgcagcgtagcgtttgcagaacgtattggcaaagccttttccgatgcttatgcggttgacatcacacatcgggacattaagaagcataaggagacggtgaatcgttcatgagtcgtgaaactaaatttattcgggttattcgcggtcggcgtcctaaagtcgtcgtgattggtggaggaactggcttaccggtgattttgcatagtttacatgagcaagatgccgatgtgacagcgattgtgacggttgccgatgatggcggttcgtcagggacgattcgcaattatattaatgtcgtgccgcctggtgatattcgtaacgttttggttgccttatcggaattgccgagtttgtatctggacatttttcaatatcgctttaatacgactgatgctttttttgccggtcacgcgattggaaatttgattattgcggctttgtcagagatgaaaggcggcattttcccggctgttcagcagttaagcgagatgatgcaggttgatgggcatgtctatcccgccagcaatacgccgctgaccttgaatgccgagtttactgacggtacaaagttgtccggcgaggcggaaataaccgcagccgggaagaacattaagcatatttccgtgtccgagactgatccggctaatggtgaacccaaagccgtccaagaagtgattgatgcgatcatggatgcggatgtggtggtgctgggaccaggcagtctgttcaccagtatcttgcccaacttgatgattggtaacctcggggatgcggtgaaaaagaccaaggcagaagtgatctacattgttaatatcatgacgcaaaaaggcgaaacgcaaaactttaccgatgccgatcatgttcgcgtcttaaacgagcaaatgggtgagaactttgttgatacggtgttggtcaatattgagccggtaccggataattatttggatcaccaaaaatataacgaaattttgacgccggtgaagcataattatcagggactacgggatatgggctgtcgcgtcatttcagaagactttttgaaactgcgcgatcgtggcgttttccatgatggtgataaggtggccaaggagattttgaacttagcctttcaagtaagtgccaaaacgcggaggtgagcgcatggcaagctttgccagtattgtgaaaaaagaactgacgcaactggaagttcatcctgagcatgctaaggcggagctgtcggcattgattcgaatgaacggcagtctaacgttgatggcacatcggtttgtgttgaacattcaaacggagaatcccgccattgcgcggcgtatttatagtttgattcgccaagtgtaccatcacgaagcgaacttggtcgttcatcgaaaaatgaagcttaagaagaattaccaatatattgttcgattgacggaaggcgtcaatgatattctgtctgacttggctattttggatccaaccacgatggccatttcaacgactgtgccagccagcgttttaaaggaaccacaacgcatgcgctcgtatttgcgcggcgcctttttggcaagtggctcggtgaacaacccggaaacatcgcgctatcatctggaaatctactcattatatgccgatcataacgcgggtattttaaaaatgatgaatcattttcatctgaatgcgcggaccgttgaacgtcgcagcggctatatcgtttatctaaaagaagcggaaaagattgccgattttttgcaggtcattggcgctaccaatgcgatgcttaaatttgaagatattcgcatcgtgcgcgatatgcggaattccgttaatcggctggtgaattgcgaaacggctaatatgaacaaaaccattgatgctgctcaaaaacagatcgagaacattaattatcttaaagatcatgtcggtttagataatttgccaactaaattacgcgaaattgcagtgttgcggttggcgcatcctgatgtatccttacaagaattaggggcaatggttcctgggggtacgatttcgaagtcgggagtcaatcatcggttgcgcaagttgaaccaaattgctgagggatatcaacaaccagaagatgcttagaccaaatcgatcatataaaatcgttaataccttattgaccagtaaaataatacctttgtttcctcaagataatcgtgtacaatgtaaccgacaccaagcgttatggtgtgtgtttttgtaggcaaaatatgtgccggtttagtttaaattcacggacataacgccacacattttgtcaaagcaactttactcacgcgtggcagcgattgccgattattttcgacgatatccggaatgttggatgcgacaaagtttgatagtttttgcttcaatttttaggaggaaacatcatggtcaaaccgattacattagatgaacaactgtgttttgcgatttacaaggcacaaaaacaatataaccatttttacgcgcaggcattggcaccgtttaagctgacttatccgcaatatatcaccctgttgtctttatatgaacacggtacgatgtcggttaaacaagtcggacaaacgcttgaactggacagtggtaccttaacgccattgatgaaacggctggagaaagacggctggatcaatcgcaaacgctcaactgaagacgagcgtcgcgttgatgtgagcctgacgaaaaaggctttggatgcccgcgatcagatttttgaacatgttggctcgtgcatgaaactgatgaatctgccgcagtctgaatatgatcatattaaatccgaagtagcgcgggtggacgaacatttgagtgctatcgctgataatgcttatcccgaagcataaatcttcccaataaggtcaaagattgtgatgaaaatctttgaccttatttgactttagcagtatacttagcactgtactttaaagagtgctaaaaaacgattttttcaggaggttaggacatgctagtacctaccgtcgttgaacaaactagtcgtggcgaacgcgcttacgacatttactcacgtctattaaaagaccggattatcatgttgtccggtgaagtgaacgatcaaatggccaactctgtcattgcgcagctgctttttctggatgctcaggattctgaaaaggatatctacctatacatcaatagtcctggtggcgtgatcaccagcggtctggcaatgctagatacgatgaacttcatcaagtccgatgtgcagaccattgcaattgggatggcggcatccatggcctccgtcttattggctggtggcactaaaggcaagcggtttgcattaccgaactcgaccattctgattcatcagccttcaggtggtgcgcaaggtcagcaaaccgaaattgaaattgcggccgaagaaattttgaagactcgcaagaagatgaaccagattttggccgatgcaactggtcaaacggttgagcaaatcaagaaggacaccgaacgtgatcactatatgagcgcgcaggaagccaaagattatggcttgattgatgatattttggtcaataagaacaaccaaaagtaagtttaaagcgtttaaacccaccgaccttcattaggcggtgggttttttgtttggcataaaagcgtttgtaggtttgacagcaggggcctttttggacgttgagcacgtacattaacggtgtaagattgagatgttgggtttctatgtataattgtgacatgttcaaaattgctttcaggccaactcctttgtttataggcagcaacctatgtaaaggtatgaatgctaatggcctaagtcttggcatcgcctccaaagtcgttcattccaaaaaagacttgcaaagttctgattgattgagtaatataattaggtacttgcgcggttagtgtaatggatcgcacgtgagattccggttctcgaaatccgggttcgactcccgggctgcgcagaaacccagtcaaatgggaaaagctaggaacagtaaaagcccgctacggtgggctttttgtttgccggaaaagtggggaaaacgaatttatgtgcaattttatgtgcaatggacctaaaaaaacgtctaaaaaattggttattgcacacgattgcacacacatagctgaatcgactaaggtacaggcaatacggcggacacagtgatttaaaaacctaaatggtagcgtatgggttgcggctgacacaataattcgagctggaattaaacatggggtgggaagactggaagacttcttaatttagtgaaatatctagtagcacccgttatgcgattacaaacaggcttagcgggctttgtcagtaacaagatagtcttcatgaaagcctgccaacaaataattaatttacaagtgaaaattgctcaaaacagaacatgtctcggtgaaagaagcgcgtgttaggtatattcgggagcctgaaacagtcacacagaaacttcatgaaaatttcattagaacccacccgaaacctgcgttatcaaaaggccgattcagggtcatcgggaaagctaaaaaccgaacacttgaagaattttcgaattagatgttcaaacttagcgggttttgtgattactttaagtcgatttaggcatcagacttgcgataaagcggaacccctgctacaattggttctgttggtaagggaaaacagcaaatgttggattcctaatttttttcagcttgctgggtcggaaaacgactcggagggacgtggaatgacccattaaagaaggacgtgccttatgcatactgaacttgcgtggctcaaagcgatcgcgcctgatctgatgggcgttgtcactaaacgctatcaggtccttcaatttattaactggatggcaccagttggtcgacgaactttagccgaacagatgaagatttcggaacgtgctttgcgtacggaaacggattttctacgcggacaggggcttttggaaagctctaagtccgggatggtgttaacagctaaggggttggaaacttttcatggtctcgatcatctgatgaaccaactactgggcatcaaggatgatgaaaaacgactcgcaactcatttggagattgaccattgtctggtcgtttccggagatgcggatcaaagcagccgagttttagacgaacttggtaaaacgctgaattcaaccttacaattgctgttgccgcccggtcacctgacaattgcggtgatgggcggtacaacgatggctcatttggcttcgcagttgacctttcaattatctgccggccgtgaactatcatttgttcccgcacgtggtggtctcggtgaggctgtcacgattcaagccaactcgattgcggctgcaatggcagaagcaaccgatagcaaataccgagcgttatatgttcctgaaaacctcagctcggaatcctacgagtcattaattaaagagccatcggtaaaagaagttttgacacttatcgataaagctcaagtcgtgattcatagcgtaggtgatgcacttgttatggcgaaacgccgtggcatgtcacctgatacgatccgcatgttgaaagccaaacatgccgttgccgaagcatttggtgttttctatgatgcagagggcaaggtcgtttacaagataccgcaaatcggattacaacttgcggatcttgatcatattccgtatgtcttcgcagttgcggctggcaaaagtaaagccaaggcaattgcggcgtacatgcaacatgcaccgagtcggacgtggctgttaacagacgtcggtgccacaaactcgattttaactggggcaacccgttagaataaaaccttatttcctaaaggaggaaattttagcatgactgttaagattggtattaatggttttggccgtatcggtcgtttggcattccgtcgtatttacgaattgggtgcaaagagcaatgacatccaggttgttgcgatcaacgatttgaccagcccaaccatgctggctcacttgctgaagtatgattcaacccacggtactttccctggtgaagttagtgcaaccgataacggtattgtcgttgacggtaaagaataccgtgtctacgcagaaccgcaagcccagaacattccttgggttaagaacgacggcgttgactacgttcttgaatgcacaggcttctatacttctgctgaaaagtcacaagctcacttggatgcaggcgcaaagcgtgttctgatttctgccccagctggcaagattaagactatcgtttataacgttaatgatgacaccttgaatgcagacgacaagatcgtttctgcaggttcttgcacgaccaactgcttggcaccaatggcttacttcctgaaccaggaattcggcattgaagttggtaccatgaccaccgttcatgcctacacctcaactcagatgttgcttgacggcccagttcgtggcggcaacctgcgtgctgcacgttcagctgctgctaacacgattcctcacagcactggtgctgctaaggctatcggtttggttatcccagaattgaacggcaagttacagggtcatgcacagcgtgtttctgttgttgacggttccttgaccgaattggtttccattttgaagaccaagaacgttacggctgaccaagtcaacgaagctatcaagaagcacaccgaaaacaaccctagctttggctggaacgaagacgaaatcgtatcttccgatgttatcggtacgacatacggttcaatcttcgatcctactcagaccgaagttacaactgccggtgactatcaattagttaagacggttgcttggtacgataacgaatatggctttacttgccagatgatccgtaccttgctgaaatttgctactctctaatccggagtaacgcttttctaaccgcaacatccgaagcggagggagctttactccctccgctttttttggaaagaccattaaaaggtgcttttatcagtgtcgctttggcctttgtaaacgagatgttgatggtaagcttaattgaagcatcatctttaggaaaatgaaggaggtcatatcttttggctaaattaatcgtttcagatttagacgttaaagacaaaaaagtcttgattcgcgttgacttcaacgtgccgatcaaagacggcgttatcggtgatgacaatcggatcgtggcagcattgccaaccatccaatatgtcattgatcacggcggcaaggcaattctgctgtctcaccttggccgggttaagaccgaagaagataaggcaaagctgaccttgaagcctgttgcagaacgccttagtgaattgctgaagaagccagttacatttgtaccggctacccgtggtaaagaattggaagacgcgatcgcgaagttaaatgacggcgacgtacttttgatggaaaatacgcggtttgaagatcttgacggtaaaaaagaatccggcaacgatcctgaactcggcaagtactgggcaagcttaggcgacttgtttgtcaatgatgcctttggtaccgctcaccgtaagcatgcttctaacgttggtattgcctccaacatgaaacaaactgctgccggcttcttgatggaaaaagaaatcaagttcttgggtgacgctgtggacaatccaaagcatccattcatcgcaattttgggtggtgctaaggtttccgataagatcggtgtgattgaaaacctggttcctaaagctgacaagattctcatcggcggcggcatgacttataccttctatgctgccaagggtatgagcatcggtaactcactggttgaaaaggacaagatcgacttagctaagaagatcatggaccaagctggtgacaagctgcttttgcctgttgattctgtggttgccccagaattttctaacgatgcaccgcataaggttgttgaaggcgacattccggatggctacatggcgttggatatcggccctaagacgattcaggaattcaaggatgcacttaagggtgccaagacagttgtctggaacggcccaatgggtgtctttgaaatgagtaactatgctgaaggcacacttgaagttggtcgtgctcttggtgatttgaaggatgcaactacgatcatcggtggcggcgactcaacagctgcagctaagcaacttggcattgcacctaagattacccacatctccactggtggcggtgctagccttgaataccttgaaggcaagaccttaccaggtattgcagccatttctgacaagtaattgttagtgatgctgatctaacagtcattatcgacatgcttgatgcatgtcggtacataatgaaaggaagctatgtcatgcggacaccattcattgctggtaactggaaaatgaacaagaaccctaaggagacgcaagccttcttagatgctgttaaaggtaagttacctgatgcaagcaaagttgaaacagtcattggcgcacctgccattgatctaacgacgctggttgccggtgcagaaggcactcctttgaagacagcggcggaaaactgctactttgaagacgaaggtgcttttaccggcgaaaccagcccgaaagccttaaaagaaatgggcgttgattacgtcattatcggtcacagtgaacgtcgtggttatttccacgaaaccgacgaagatatcaacaagaaggctaaggccatctttaagaacaatcttttgccgattatctgctgtggtgaaagtttggctcagcgtgaagccggtcaaaccgaagattgggttgcttctcaaatcgaagcagctttggcaggcttaagtgccgaccaagttaaggtttcggttttggcttacgaaccaatctgggctatcggcactggtaaaacagcaactgcagatcaagcacaagaagttgttgctcacatccgtgcaaccgttgagaagttgtataataaagatacggcagatgctgttcggattctttacggcggctctgttaaaccagcgaacgtcaaggaattaatggctaagcctgatattgatggtggcttagttggtggcgcttcgatggatcctgacagtttcatcgccttggctaactaccaagattaatctggtttcaatattaaacagccttctggcaaaaaggagaagaatatatgtctatcattactgatgtattggcacgcgaagttttagactcacgtggcaaccctactgttgaagttgaattgtataccgaagatggcggtttcggccgcgcattagttccatcaggtgcttcaaccggtgaacatgaagccgttgaattgcgtgatggcgataaggatcgttttggcggcaagggtgttttgaaggccgttgaccacgtaaacaatgaaattgctaaggctgtgattggccttgacgtcaccgaacaacgcttgattgaccaaaccatgatcgatcttgatggcacgcctaataaaggcaagctcggtgccaatgcgatcttgggtgtttccttggctgctgcccgtgctgcggctgatgaagttggtctgccattgtatcaatatcttggcggcccgaatgctcatgttttgccaacgccaatgatgaacgttcttaatggtggtgcacattcaactaacaccgttgacttccaggaattcatgatcatgcctgttggtgccaagagtgttcgcgaagccgttcggatgggttcagaaaccttccacgcattgcaggcactgctcaagagcaagggtgacatcactgctgttggtgatgaaggcggctttgcacctaacttgaaggataacgaagaagctttcgaattgcttgttgaagcgatcaagaaagctggctacaagccgggtgatgacattgctttagccttcgacgttgctgcttcagaaatgtacgatgctgataccaagacgtacacaaccaagtggtccaaccctgacaagaagtacacaaccgaagaatggaccaacatgattgacggctacattaacaagtatccgatcgtttctgttgaagatccaatcgatgaaaacgactgggaaggctggcagacattcaccgagaagatgggcgacaaagtccaaatcgttggtgatgacctgtttgttaccaacaccgattacctgaagaagggtattgacatgggtgttgctaactccatcctgatcaagttgaaccaaatcggtacattgacagaaaccttcgaagcaatcgaaatggccaaagaagctggttacacggctgttgtttcacatcgttcaggtgaaaccgaagataccacgattgctgacttggttgttgcaaccaacgccggtgaaatcaagactggttcaatgagccggactgaccggattgccaagtacaatcagttgatgcgcatcgaagatcaattaggtgctcaatcacaatacaagggtcgcaagtccttctacaacgttaaagcaattgactaattaacgcttgacgttaacatgaaaagcacgtcacttcaaatggtggcgtgttttttctattcttagcttaagcaaaagatgaacttgctcacgctttgtgactgaggactgtctggtgccggtgcaagcacctatgtctgagcattaataaaacgaatggaggcaatgatgagaaagttttttgcaatttttgcctggcttgagattattttgggcctagccatgctgtggatgacctttgatgttggattgcgagctacaggaccttttttcggcgccttaatcgtcttaattggcatcgtattgctatatggcttattgatctatgcgcttgtcgggtggtttattgatcggcaacattggccgtggtatgtggtaacactagtcgttaccttgatctataacgtgttagcgtggtctttccctaaaatcatggtgcaacgctgggctacgtatccttttccgatgttgacgctgatactcggttgtttgatggcgtggattgcttggcgtgagcagagcgtaacgcacaagtcggtgtagaaaccgggctggttcacgctttccaaaacgcgttcaccagcgcagggatctgcgtgtaaggaccttggtcataatggccaaagcccggccatcacgcccaaggccgcttacactccgatccctaggcgcgctggttcacgctctccaaaacgcgttcgcagtcgcagcaatctacgtgtaaggacctcaagcctcaatggccaaagcccagccattgagggttgaggccacttacactccgattgctaagcgctcctgctcacgctctaaaaatgatgtttttcacgtttccctcaaagggttatactaaataaatgttggcatggagggaagcattttggcacgaacggtaaaagaaaaagaaaaatttgatatcacccggctgcggtttgtcttgctaggactgcttgtaggtttaatgaccggaacagttgtcagtgcgtttcgttactgtattgaagttggcttacgcgccagtcgtcaggtgtacggttatttgcgcgtaacaccgtttgtttggtggcattgggcgttgttaatcggctttaacctagtgcttgctggtattgttgcgtggctgcttaaaaaggaaccgtatatttccggctcagggattccacaggtagaaggacaacttgccggtgagttggaaatgaattggtggtcgattctttggcgcaagtttgtcggcggggttttggcgcttgctcccggtttgtttcttggacgtgaagggccttcgattcagttaggtgcatcagtcgggcaaggcttggcaggcgggtttaaactgcgcggcactgatcgacggttgctgattgcatctggatcggctgctggtttggcggcggcgtttaatgcaccgattgccggtaccttgtttgtgctagaagaggtttatcataacttctcgccactggtttggctgactgccttggctggggcgattggttcggactttatttcgttaaatgtgtttggactagtgccggtcttgcatttgagttattcgcgcagtttaccggttacgagttactggcatttgattttattagggattttgttaggtttgctgggttatttgtatcagcgaatgttactagccatgccccgttggtatcagcgattgacacacttgccgcgtgcaatccaaggtgttgtcccatttatgctcttaatggcggtcggttacttcacaccgaatcttcttggtggtgggaatagtttgattgttggttttggccaatatgtgccatcacttctggtgttattgggtatttttgtgattcgctttatcttttccatgatttcttacggttcggggttacccggcggcatttttctacctattttgtcgctgggggcagtgattggtgcggtttatggcgtggtgatgaatcagctagggttattgccgcatgtttatatcatgaatttgattattttctcgatggccgggtactttgccggtatcgggaaggcgccgtttacggcaatcttgttagtaaccgagatggtgggcaacttaacgcatctcatgccccttgctgttttgtcactgactgcgtatctggtggttgatttgcttggtggggcaccgatttatgaagccttgctggaacagatgacgattcctaaaaccgtcgctcaactgcaccggcctgatcgtttggaaattccggtattcgttggtagttcgttaaatggcaaactggttcgtgacatgccttggccaaaagaagccttgctcatcggcattcggcgtggcgagcgtgaagttattcctcatggggacacgttgattcgtgaaggcgatacattggtattgttgacggatgaagcacaacgagcacgagtgaaacgccgaatagatgctttttcagcagccttggcaaccgcgcataagtctgaaccatagtcgattagggcgaagctttttcaagttggtttagtcaattcaggcgtatacttgtacctagcaaagacgtaccgacttgcaatagaaaggttttgattagtatgaaaaaacttcgcattgtatatgcaattgtcagtattttcttaggcctgttttattcaatcggcggagaactgggtttgcttacgtcatctggtagtggcgttgcgagttttttggtgccatttttgttgggctttgttgctaattggggcatgattgcgttggtcattgcaggattaatcgttgataagcagatgcgctggtggtatctggggtatccggctttgatgggaattaacattggcctgaacctgatattaccgttgcagcttgctgatcaggcgagttatttggctccttttcttgttgcgattattggcggatatatgttgtatcgaacggttaagcaacgtcctgatgccgcttaaatctttcgtcagtgtacatgattttgtcaggtttgaagtgtaaatggcggctaaaatatccggctgacggctataagaacaaaatcgggtaaaattcgcctttgccttgcttttatgctaaactactaaagtgagatttttcgcaagggaggcagcaacttgcaaagtttattgaccacattattagtgatcgattcggttttgatcgtgatcgcaactttaatgcaaccaagcaaacaacaggacgcgttaagcgcattgtccggtggagcaacagatctttttgggaagacgaaatcgcgcggttttgaagcgtttatggagaaagtcaccgtcgtactgggtgtcattttctttgggcttgccatcgcgctggtttatctggaagcccactaaaacaaagtctcctggaacattcaggagactttttttgcagagtacataaaatctgcagtatgctgacataaccatttaatttaagctctttatgtcaggcagggcaacaggcagttatcggttggcggtcttttaggattgcttgctaatcgattgtcacgaaggatgattgatcatgattttccgcaaaccacaaccattcgaatatgaaggtaccgatactggcgtggtattgttacatgcatacacgggtagccccaatgatatgaattttatggcgcgggccttgcagcgagccggttatggggtttatgttccgcttttttccgggcatgggacagtggagccgttagacattttgacaaaaggcaacccggatatttggtgggcagaaagtagtgccgcggttgcgcatatgacggcaaaatacgccaaggtgtttgtttttggcttatcactgggaggtattttcgcgatgaaggcgctagaaaccttgccagggattacagcaggcggtgttttttcatccccgattttgccgggcaaacatcacttagtaccgggttttttaaagtatgccgagtatatgaatcggttagcaggcaaatcagatgaaagcacacagattctggcatatttgccgggacagttggccgcaatcgatcagtttgccacgacggttgctgctgatttaaatttagtcaaacagccgacttttattggacaagccggtcaggatgaattagttgatggtcgattagcgtatcaattacgcgatgccttaatcaatgctgcacgcgttgattttcattggtatgatgatgccaagcatgtcattaccgttaactcggcccatcacgcattagaagaagacgtaatcgcatttatgcaacaagaaaacgagggatagcatgaccacagttggccatattcgtaatgaactattagcaacatttcgtaagaatccgaacattgattattcggttcaaacactcagtcgcgcacttaagttaagtgaaggcggcgattttaaagtactcgtccaggcgttaaacggtatggaaaatgataacctgattcacgccaatcacgaaggacgttatgcattgggcggcgcgcctaaagtcttgaccggcactttccgcggcaacgaaaaaggctttggcttcgtggcagttgagggcttggacaatgatgtttatgtaccggcgatgaacaccgattttgcgcttgatggcgataccgttgaagtgcggatcgttcgtgaagcccgtcccaatgatagtcgcggacctgaaggcgaaatcactaagattgtgcagcgcagtttaaccacactggttggtgaattcaaaccattttccgataaagatcgggctaagtctggatttatcggaatggtggttagtcatgaaaagaaactgaagaattttccggtttatgttaaagataccggtaatattccgcaactcggcgatatgaccgtgacggagattactgaatttccaaccgaatatcatcccaagttgatgtatgggatcgttgtcgagacgttaggcaacaagaatgatcctggcgttgatattatgtcgctggtcatgcaaaaccatatcaaaacggaatttccggatgaagtgatggatcagaccaatgccattcccgatcacgttacgccagaagaacgagttggtcgcaaagatattaccgatcaggctgttgtcacgattgacggggatgacagtaaagactttgacgatgccgtggtggtttggaaattaccaaatggaaacttccatcttggggttcacattgccgatgtttcgcattatgtgacggaaggctctgcgttggatcaagaagcatttgatcgtggtaccagtacgtacttggttgatcgcgtcattccaatgctgccatttcgactatccaatggcatttgttcgttaaatccaggtgtagatcgattggcaatgtcatgtgatatggaaatcgatcatgatggtcatgtcgtaaaccacgagatttatcaaagtgtgatcaagagtcatgcccggatgacctacaacaatgtgaataaaatcgtgaccgatcacgacccggaagtcatggccgaatatcaagaactggtacccatgtttgaagacatggttgaattgcatcagatcttgtataaaatgcgtcatgctcgcggtgccattgattttgaagaaaacgaagccaaaatcattgtggatgatatgggtcatccaactgacattgtgctgcgcgaacgcggcgtctcagagcgcatgattgaatccttcatgctggcagcaaatgaaaccgtggctgagcactacaacaagcagcatttaccattcctctatcgggtacatgaaaccccggatgcagatcgcgtcaaggaattcatggagttcattgccagtttcgggatcacggtaccgatgaaaaaaggcaaggagatcactcctaaacaactgcaagatgttgtaaccgatgtaactggcacgccagaagaagccatggtcaatgttaaattattgcggagcttgaaacaggcacggtactcaccagatccgctggggcattttggcttagcggcaaaatactattgtcacttcacaagcccgatccggcgttatcctgacttggttgtgcaccgcttgattcgggattacgctctggaaggcaccaccgatgacgtgaagacgtcttggaataagaagctgcctgatattgcgacccaagcatcgatggccgaacgtcgcagcattgatgccgagcgtgccgttgatgacctgaagaaagctgaatacatggctgataaggttggcgaagaatttgacgccgttgtcagcggtgtcacgagcttcgggatgtttgtggcactgccaaacaccgttgaaggcttggttcacatcacacgaatgagcgatgattactattcgtttgtcgaaagtcaaatggccttagtcggtgaacgcaccaagcggacttatcgaatcgggcaatcgttgcgcgtgaagttagacaatgtggacatcgatcagcggcaagttgacttttcattgattccagacgaaaaaacgccaaccagcgatttaggcaagttggttaaaaaagatgatcgccgtgatcgacgctcaaatggcagtcgcccgagcttcgggaacaatgggcgtggtggtaatcgtaatcagcccaataatcaacgaccacataagccagcaggtgcgcctcatcaaggtaaacattataacgccaagcgcgggactaaataacgctggcaacttttaaatatacgaggggatggttcaatggcgaagaaacatcgacaaaaacctgacaacctgctcgcccagaataaaaaggccggtcatgattacaacattcttgatacctatgaggccgggattgctttgacaggtaccgagattaaatctgtgcgcgatggcaagctcaatttgcgtgatggctttgcccgtattcgcaacaacgaggcttggcttgaaaatgtgcatatcagtccttacaaagaaggcaatttgtttaacgttgatccgatgcgtaaccgtaaactgttgctgcataaaaaagaaattcgcaagctcggtcaaatgacggcgcgccaaggagttactttggttccgttgcggatgtatcttaaacatggttatgccaaagtgttgatcggcgttgcggaaggtaagcacaactatgataagcgcgaaaccttaaagcgtaaggatcaagagcgtgaggttcagcgggcattaaaagcgcggtattaataaaatttacgctagcatgaaggctttttggcagatgagtgttggtgtaacacaaataggcattagcggtcagagatgacgctgatgcctatttattttgtcctgagcgtggcagccccattcaatgaaaggtcatcgggctctgacgcatcgggccctgacgccttgtatgatgccctaatgatgaaccgccaatagactgttatgattgtagcctaaatgacattaaacgatgatcagttaagcggagggcaaacacgctgatgcgaattgtttgagcgcctgatatgaaggcggtatgatcgctgtatagataccgttttttggcaggattttgttacttatgaagaaagaagggcggattatgaacttagctgctttgttgcatcgcccggaaagtgaagattgtttcttatatacggatgaggcaatgcgtgtgcgatttcacacggcacgtgccgatgttgcgaaggtgacggttctgtatggcgatccttattggcaactgcctgatgcagatggcactaataagttgatttatcagcgccggtcgatgcatttgataggtcacgggcaaactagggatcactgggaggtgacactcgaagctccttatcgccgcctgcaatatttatttgaagttaccggccaagatggcgctgtgtggttgtatggtgatcgcggcgtccgagaaaatcacgcggcagcacgacataaggcggaaaactattttcggatgccgtattttcatgcgattgatcgggttaaaacgcctgattgggttaaacagacagtttggtaccagatttttccagaacgctttgccaacggggatcccgataacgatccgattggaaccaagccgtggcggccaacggatcatcccgggcgcgaggattattacggcggtgatttacaaggggtactggaccaccttgacgatttacaagcgcttggtatcaatgggctgtatttttgcccgattttcacggctgcttccaatcacaagtacgatacgattgattatttgaacgtggaccccgcgtttggcgataaagttttgttcgcgaaattgattcaggcggctcaccaacgcgggatgcgagtcatgcttgacgcggtgttcaatcatatgggctttggcagtatgcagtggcaagatgttttacgcaacggagaagcatcgcggtttgcgtcttggtttcacatctatcaaacaccagtcacaccgtttcacaatcctctcaagaatgccggccaaccgcagtatgatacctttgcatttgaagaaaagatgcctaaattgaacactgccaatcctgaagttcaagaatatttattaacagttgccacttactggatcaagacatttgatattgatgcgtggcggttagatgttgccaatgaagtcgatcatcatttctggaaaaggttttacgccacggtaaccgcgattaagccggacttttatgtgttaggtgaagtctggcatcgcgcgcagccatggttaaacggggatgaattttccggggtcatgaactatcccttcacgcagcagattgaggatcactttttcaagcgaacattgaccgctgaagaaatggtggcgctgttaaccgatcaactcatgtactatcgcgatcaaaccaatcaggttatgttgaacatgctggattcgcatgatacgccgcgcatcctgacgctggcgcatggtgatgaagttctggcattgcaggcgttgacgtttagctttatgcagactggtgcgccatgcttgtattatggtaccgagatggggatgtcgggtggcgatgatccggatgaccgcaagccgatggactggagcaaacttggcagcccgatttggaaaaaggtggcggagctggtacactttcgccggaaacacgcacagacattaggccaaggcagcactaggatgtcggtgactgcggccggtctgataaaagtgacccgccatggtgatgaaacgttgacggcttactttaatacgcaggatcatgaagcagccgttggtggcagtgctgttttgacgcaaggttttacgaatggcaagttggcgccaaaaggatttatggtacaagtgggtaaccggtaaggagtatcagggtttgcgtatggaacgagacctacctgtgcaaaggagtacgtgccataacgcgcttaccggtacaggtttctacccgcgccagtaagcgtttattttcttttagtggggggattaaaagtgaagcgattattcgaagtcgatccttggttagtggcaacacatcgtttagagaagacagatcgtcggctgcaagagagtatcacggcggtaggcaatggttatatgggcctgcgcgggaattttgaggaaggttacagcggcgatggtttgcaagggacgtatttaggcggcgtctggtttccggataaaacgcgtgttggttggtggaagaacggttatccggagtattttggcaaagtgattaatgcgcccagttttctggggattgggataacggttaatggtcaacaggtggacttagccaaaagccattaccgcgacttttatctggcgttggatctgcatcaagggttgttgacacggcggtttgtttatatcggtgctgacgtggaagttcagtttgagtttgcccgctttttgagtcagacaataccagaggcagctttgatcaccgttaatgcgagcgtgttaaaaggaaccgccacgatcacttttgacgctaccttggatgggcgggtgacaaatgaagatagtaactatgatgagcggttttggatagcgcagcatgaggatgcaacggctaaaagtattcaactgcaaacaaaaccgaatccctacgccgtcccgcaattcaccgtattacttaagcaacaattacgcgtgaatgggcaggcaattgtcggcaaagtcacaactgctagtgggtggcttcaggagcaggtcacagtgcatttaacaacaggcgagcactatcagctggaaaaagatgtggtggttgtgacaagtcgtgatattgcccctgacgatcaagccgcaaaagctacccagctgatgaaccgagtcgtcaaggatgatttcaagacccatttagcagctcacacgcaacgttgggctcagcgctgggctaaaagtgatgtcgtcattgatggtgatccggccgcgcagcaagggattcggtttaatatcgcgcaattatttatgacttactatggtgaagataaacgtctcaatatcgggccaaagggatttaccggtgaaaaatatggcggagcgacttattgggacaccgaagcttttatcgtgccgatgtatttagccgtgaccccgccggaagtgacccgcgcgctgctgcagtatcggcatgatcagttaccgggtgcctatcacaatgcgcgtcagcaaggcttggccggcgcgttatatcctatggtgacgtttaacgggattgaatgtcacaacgaatgggagattacttttgaagaaattcatcgaaatgcggcgattgcctttgcgatttatcaatatacggtttataccggcgacgaaagctatgtgaaccacgatgggctcgaagtattggtcggcattgcccgcttttgggctgatcgggtgcactttagccagcatgcccaaaagtatatgattcacggggtcactggccctaatgagtacgaaaataacgtcaataacaattggtataccaataccatggctgtgtgggagttgcagtatacgctggcacggttacctaaaggcgatcctgatattgtggcggcattggcagtaacagatcaggaaaagcggcattggcaggcgattattgaccagatgtattatcccactgacaagaaattggaaatttttgtgcaacaagacggctttttagataaggatatacggccggtaagtacgattccggatgcgcaacgcccaattaatcagcattggtcatgggatcgaattctgcgttcaccgtttattaagcaggccgatgttttacaaggattgtattttttaaacgaccggttttcgcacgcggaaaaagaacggaattttgatttctatgagcccttaactgttcatgaaagctcacttagtccgtccattcacgctattttggcggcagaacttggcaaaatggatacggccgttgccttgtatgcgcgcacggctcggttggatctggatgattataatcacgatactcaagacgggttgcatattacatccatgagcgggagttggcttgcgattgttcaaggatttgccggcatgcgctatgaccatgaccgtttgcgctttcggccacaattaccgaaaaattggcggcggtatcaatttaagctgacttatcgtggccgtctgttagcagttgacgttggccaaaaggtaacggttacgctacttgctggcccaccgatcgatctcgacatcaatggtgaaacgcagcacttggaggtggaggatgaccatgcttaaagggtttatttttgatttggatggggttttaaccgacacagccacttatcatctggctgcttggcatgaactggcgcagcgtctcgccattcacttgccagctgcggccgatacggcgttgcgtggccgctcgcgaatggactcgctgaatctgatcctgcgttatggtcatcaagaaaatgactacgatgaggcacaaaaagccgccttagccgcagaaaagaatcagcgctaccaaacgttcattcaatcactgacgtctgcggatattttaccgggaataccagcactgttgaaaaatgccaagcaggcggggttaaaattggcgattgcctcggcgtccaaaaatgctccgttgattttacagcggttgggattattcgcgcaattcgatgcgattgtcgatccgcaaagtctacaccatggcaaaccggatccggaaatttatcgcgcggcgcaggaattgctgaagttgcaagccgatgaggtcattagctttgaagacgcaccggttggcatcgcggcgattaaagcagccggccagtttgcagtcggcatcggggaggcttcggcattggcggcggccgattatttggttagcaatacagcccagcttgattataatcaaattgtcgcggcgtttgagcggtatcatgcgcggtaatcagcgacgtcacgctaagttgatacggatattgataggtcaaaaatcatgtgctgaaaagtaaaaacattttgacatttctttcgctggcgttatactaatcatgtcaaaagaatttgacatttaaggggtgagagccatgaagaaaatggatgaaatggagcggaattttgccgatcactcgataagaattgcttacatgatgatgtttctaatgttatggtcaagtgcggtttttcagcatattcgtacaggagcgtggaatttcgatttctttgtggttaacgtggtgacagttgttcaaattgccagctatgagtggttcaaacaccgagctgattcaactgacaaggagccgggacgagttttgtacatgaccatcgcaggggtggcgattgttcttgctgttggcgtgctcgccttgatgcgtcatggaaaataagattcggagcctcaaaactcagcggcatttgacgcaacaagaattaaaggagtgagagccatgcggaaaatggacgaaatggagcttaaactttcagatcaatcggtcaaatatgcctatgtttttgcgatgacatcattggtcttttataatctttttcagttggctcatggtgaaaaaggcgattttacatcgtttgtgataggcgctgcgattgtcattcaacttggaagctttgaatggcttaaacatcgggcggataaaactgatcgcgaacctagccgtattttagttggtacgattattttagtggccgctcttttaaccttgggcttgctgatgctgatgcgtcatggaaaataaaattcgcacccttagaacccagcagcacctgacgcaacaggaattagcagatgcagtcaatgttacgcggcaaacgatcaatgccatcgaaaacaataagtatgatcccacgttgtccttagcattcgcgttagccaggcagttacagacaaccgttgatcatctctttcaaagttaaaagcaggctgtccacgtcaacaacgtgaatagcctgctttttagatagatcaatcatcatcttctccgagcgcatcgaagtcataataaagatcacgttcgggtaagacaacatctgcatttgtttccgcgtcaatcgcctcagcttcacgttccgggtgaaagctatgccacggcacgatcacccgggggttcacttctttagccaacgtgattaagtcctcgcgagttgcatggccggaagcattcataaactgcaaaggaatttgatggtccgccaaccaatccttcagctgagcaaaccgcggatcgtaatcccccaaaggttcaccgttactgtgtacataagcgctgattggtaagtctgccaaccgttcaaggtgcgcgtaactattttgcagaacatattgttgaggcgcctgtgcaaggtcagttaactggattgttttgccaagaatcgcatcaggctgctggttggtcattgcagttaaaattgccgcttcgttaggctcccacaccacctgacgcccgcttgcatgcgctgaaacttggaaggctgccatccgctcataattgcgattgtaagggttaatgacaaccagttgcgagctgtcagtcagcaattggcgaaatttagtttgcaggctcatttcggtcagtggcacacttggatgatcctgatcttcaactggtgtcggtgtatcaaacgaaaagctagtgccttcaagcaagaagagactgatcttttcagcattgaaacggctagcccaggcgtgcacgcgatcggcatgcgggccattgaggcgaacgtccccggaatgggcaaagcggcgcgcaccatcatcaatcaacagcgccatcactccgggttcatcgtgatcgctgtgaaacccggttactgtcaaatcgccaattgccagtggcgattcaaaggctaagggatggagattggcaaccggtttttcgatgcctaagcgaatgagcacctgatagaggcgataggatggttcggaaagataaatcggaatgtttttctgcaaatattgtaaggcgcccatgtgatcaatatgcaggtgcgagatgaagatggcttcattggcaaacgaatccggttgatcgaaaaaaagttccgggacatgcggtaatttgccgttatcaatggccgaggcaaccgtttcatggcttaaatcagctgcaaccccaaaatccatgatgacccggctagttttggtagcaaattcaacaatgttgccgccaatggtattgagaccgtttaaaaagcgaatcgtcgtcacaataatttcctccaatgtctctcgttggcattcgcgagaacattaaatcgtaccccgtctatgcgtgaaaagcaactattaaagtgaacccggaaattaaaatcagcctcagagacagtttcgtctctggggctgattcggtgtcgtgctggtatgacaagtcataatttagcataccaacctagtagtttttggttatttgtttgtcttgataattgtttctgcctgactttgcagcgtcttcaaagcttggtctggtttttcgtgtttcgtcagcatagcatcaaccgcgttcagaagatcgttgcgatattccgagaagccgatgaaggcagtagattggaaaccgaagccgagtgaatcaacagctgctttgctggttggattatcactgagatatttcttgaagtcagctgattgaaccgcggatttacgcagcggaacataaccggttaattgtgcccacttggaagtttccttttcagatagcaggaacttcatgaatgcccaagcacctttttgctgatcagtagaagcggatttgaagaggacaatatcgttgcctgccagttcggttgctttcttgcccttgtaacttggtagtggcatggtgccccacttaaagtctttgggcgcattttgcttcatgttggtgataccggcactggagcccgcgtagaagagcgttttgccggaagtgaagttcttatcgccataaatatcttcgccagcggttttagcctcgccgttgttcaccatatccatgatgaagttggctgcggttaaagtcttcttgctgtccaggtttgccttcagcgggttagcagaaacaagcggattgcctgcttggcgtgcaagtccttcgaattccatatcgaaactcttgtcaaagccaattgccgcaacgccgtcagccttgagtttctcggcatccttcttaatgtcttcccagctctttggcttatcaatgttatacttcttcatcagtgcttcattataaaagagaatccgcgttgacttggagaatggcacgctatagtacttgccttggtacttggagctagacaagaaggctgggtaaatatccttcaagtcgctactgctcattttgtcatcacctttgagcatgtattgatcaagcggggtgatgaaaccatttttcacataatcaggaacggtggtgtaggttgtctgcgcaattgtcgggagattacgcgactttgcggcagccataatcttttgctgcaacgcggtgtaattgccttgcgcggtgccgacaactttatactgcttttggctcttgttgaagtccgtgatgatctgattaagcgccttttgataaggaccgttcatcccatgccaaaaggtgatcgtcacacgtttacccgaatcgctcttagtcgtggaactggatttgctgctactgttgctgccgcatgcggttaagatggcaaccaacatgaccgtaaacattgcaagtaatgcttttacccaagtttgctttttcattttgatagattatcctttcaatccagctttagaaatcccagcaataatgtacttctgcaagaagatatacaaaataaccattggaatgatgacgaatgtggaagccgccatcaaaagttgatattgtgtgccggcatcagttgtgaaggcctgtaagccgactggcaaggtgcgcatcttatcagagttcgtgacgatcaaaggccacatgaatgcgttccatgacccgatcacctgaaggacggtaaccgctgtgatcgtggacttgctcattggaacgagcacctgccatagatacttccaatccgacgccccgtcaattttggcggcataataaatctgatccggcgtcgattggaaagtttgacgcaacgtgaagacggtaaagaagctggccagccacgggagaatcagcgctccgtagtggtcgatttgtcctaagtgcgacaaggtgacgaaattggggatgatcagcatttcaccaggaatcatcatggttcccaagaaaatgataaacagaatattcttgccatagaacttcaaccgtgaaaaagcgaaggcagcaagaatactggtgaaaagctgtccaaccgtggtcaccaccgttacgatgatactgttgatgaaatactgaccaaatggcgcttcattccatgccttaacatagttgctccactgcaaggcctttggaatccaaattggtggaacggcgattgtttccggtgcggttttcagcgatgtcgaaatcatccatagaaaggggatcagcatggtgatggcccctaaaatgacgatcagataaagtaagactttactgagcttttttgccatagtttgcttttcccccttaataatgaacgtgcttgcgcgaataccacagctgcacgagcgtcacgagcaagatgaggaagaaaagcacaacgccggatgcggccgcaatcggatacttatactcggtgtaaaatttctggtacaagtagtacacaatcgttaaatcggccttgcctggtcccggcgtcccttggaataaggcaaagatttcatcaaacactttgaaactgccgataatcccgttaacggaaaccaggaaagtgatcggtgaaagcatcggaatcgtgatgttccagaatcgctgacgagcattggccccatcaatttcagcagcttcgtaataaccgtggtcgatgttgtttaagccaaccaggaaaaggatgatgttgaagcccaaacttttccagatactcatgatgatcagtgccaacaaggcgtagtgcggatcagtcaaccagttaatcggatgaagtccaaaccagctcatgaagtaattgatcaagccgtaattaccatggaacatccaattccagaccatcgcaatcgcaaccgtacttgtgacaaatggtaagaaatacacggttcggaaaaaaccggaaatgatctttacctgattaagcagtaaagcaataattaatgacaaaacaactgttatcgggacaacgccgatcacaaagaccaaggtgttgcgcactgctaaatgaaaatcaggatcattccagagatagacgaagttgtcaaagccccagccgctgaccttatccgtgtaaaagtcatacttggtgtatagactcattaaaaaggaattaatgatcggccagatattgaaggtgatggtaatgacgagcattggcagtaaatagagtgctgctttagccgtcgatttgagcgtggctttttcattcagcatgactttcaccaccaaaaatcaaggcgccagactgatcaaagagaaaaaatcctgatttagtgatgtaaaaatccaactccggctgacgactggaaacgccggccatttcggtagacagaagccgttcgccgttataatcaatatcggcagtcgcctcacgtccatatttggaactatgcgtgatcttgccatggaacttggcaaggacattttcgccagcatcataagggataatggcttcgctacgaatgccggcagtgacagcttgtttcaaaatcgcctctggtaccgcattagctaaatcagctgataatgcctgtgccgggatcgtgttaataacaggttcgccaataaacttagcaacgaacagattgttaggctgatcgtagagggtctgtggcgaactaaactgctgaatggacccgtttgcaagcaccataatgttgtcggaaatatgcagggcttcgtcttgatcatgggtgacgaaaatggtggtgacgccggtttcacgttgaatccggcgaatttcttcacgcatctcgattcgtaaccgcgcgtcaaggttggatagtggttcgtcaagcagcaaaagacttggcgatttggctaacgcgcgcgcaatggcgactcgctgctgttgaccaccggataaagctcccggttttttgtcaagctggtcttcaacgtgcaccaatttggcaaggtctttagctttggcgtggcgctcggcttttccgactttagccatcttcagtggaaaggcaatattgtccaagaccgacaagtgcggatacagactgtagttctgaaataccatgccgactttacgggctaaggcatcttttttagtgacatccgtatcaccaaagaaaatttgcccggcagttggcgccaacagtcccgaaatcaaattcagtgtcgtggtcttaccgccgccggaaggacccagcagggaaaccagcgtgccatcgggaatggtaaaattcagatccttcagggtatctttcttgccatcgtaggacatcgtgacgtccttgaaagtaactttcaacccagtacgctccttcgaatagttttctgctcctcacctccgttcgtcggtcccacgcaagcatgccggtggggtcgcgccaaaaagaaaatttggaacaagatattgtggtgccgccacttcactaaagcatatctagggggcggggcgacaacacaactcttcacatattttaacccagtttcactcaaaattggactcattcgcttaaaaacatttgattgttacacaacaagtgataagacgcgaacgttcggcttctttgctataataaattcatgaaaaaggagcgatttttgtgatcatacgtccaagtaaaccagcggatgctgctcaggtggccccgctgattgatattgtctttactgaaatggaaataccgcagttaatgcgggttccaaaaccaaccttatatgcagttttgcaacaagcatttctgctgcccacttatcgttacggttatccacaaattctggtagccgatcaggatgggcatattgaaggtattgcagtgggttatctacacgaacaagaagcgcatattgatgatgctttacgtcccttgttgccaaaactggggctaaccccgcagtcatctttgtttacggataccgaaacttatccaggcgaatggtatcttgacaccttagccgtggcggccactgcgcaaggacatggcattggaaccaagttattacaagcggtcgatccggttgcccgcgcccgcaaagccgatgtagtcagtttgaacgtggacaagcagaatccgcgggctaagaagttatatgaacgcaatggctttgtcaaaaatggcgagctgatgattggcagccatcgctacgatcatatgattcggccagttggtgattaagtgaaaagtcggcacttacagctggtagtggaaccaaacaaaacggcactcgcgatgggaaatcttttgcgagtgccgttttgtttttcttaccatacttaaggtatcgtccattttttgtatcaatacagcagctaaagcctcagtcggggaagtccagaccatattcataacgtttcaacggatcagccaccccaacatggcggaagcggtcgaggatagccgccaacaaaatggcagcaggaatgtcccgattgctgggaatcgtaagcttaacaattgccggagcgacttcttcggcactaaaaatggttttgacgccatggaagacctgataatgattgttgagcaagttacccatggcgacccagttaagtttggagataaaaatgaattggtgccagacgccaaacatttttttgacactggcaacattacgatcggcaatatataggtcatagcgagggaaaacgctgactgttttttgacgaatcgaaccgagcggattgccgcttagtgtgttcaaatcaaatccgccattgataataccgtggcgggccgtcaaaatatacgccggtttgccattgtcggtttttaccacgctcagactgccggtacttaacgcattcatatcaagatataacgccatttgcagacctcccaggaaaggtcacatgctgtgtttaaccgcaaagattagaaatgggcatttgatgcttctgccttgttaacgcgaatagccttgcgaattgcggcggcaacgccattttcgctgttggttttggtggtatcccatgccaaggcagtgatttcaggaatcgcatttcccatcgcaacgccatacttggccattttaatcatgctagcatcgttgagattatcgccaatcgtcatgacttcatccatcgtgatgccctgttgcttggcataagcttcaacggcataacccttttgtgctttaatattgttaacttcaatgttgttggccgagcttgaggtgacactgagtttgccggtggcttcaaaagtctttgcgggtgcttttaaaatatcatgccgttcaccggtaaacgcgatgaacttcataatttggatggttggatcgtccaataattcttggtagttatcaacgtaattgatattcatcagttcaagccgagcagccgccagtgccaccgcaagtttgtaagttgtatcaggattcagatcaacgagcaaatcggcaacattttgaatccgctcgacgcgactatctgagaagacgcctttgttggtgacaacttcaaagtaaatgttgtctttttgcagcgttttgacaatgtaatcgtttagatcatcagcaattggaattgtgaccacgagcttgccagcctcgtcaaaaaccattgcgccatttaacgtgatgaaggcgggttttaagttctgagctgccaataagggttttgcctcagtcacgccgcgtccggttgcaaccatgaattcgataccagcggcttgcgcttcacggatggcctgggcgttttcgtctgagacttccattttgtcattcaaaagggtgccatccatgtccgatgcaataagtttaatcatatttacagttccctccggtttgtcatggtgccgttacgattttaattttagcatgaaaaacgcttgtccggtagcaaacgtgctgggattcttgtacactatttgcggaggtgcagcttttgaaaacattaatccataatgattggcagacggttctggaaccgatttttgaaagttccgaatatgcacggctgcatggctttttaaaagaagagtatgccactaaaacgatctatcccgagatgcatcatatcttccaggccttcgaatggaccccgtttcatgatgttaaagtggtgatcttaggccaggatccttaccacaatccgcatcaggcagtgggggctagttttgcggttgcgcctggcgttgccttgccaccatcactgcagaatatttataaagaattgcaaagcgacttagggtatccacccgtgcatcacggctatcttaaagcgtgggcgaatcaaggcgttttattgctcaatgcggtcctgaccgtgcaggctggacacgcgtattcgcatcagaatcacggctgggaagcattaaccgatgccgcgattgccgctttgtcagcgcgcggtggcgtcgtgttcattttatggggcaatgcggccaagaaaaaagccgccttgattgacacttctaaaaatgccatcattgcgtccgcacatccaagtcctttgtcagcatcacgtggtttttttggtagtcgaccgttttcacgcacgaatgaggcattagagaaaatgggagagacgccgattaattggcagctgccagagacggttacgacagaaaattaaaatgatagcaacagccgtttaagcggtgcaaaccagtgatccccatttgtctcagcggggacagtggggtgttgaggaacgagcagccgatttttccttctgacttctgctggtcataacccaataaaaacggtatgatgatacagaataaagcgcttttatggagggataaagtttggacctatttgaaagcttaaaagataaaattaacggtaaacatttgcggattgtatttccggaaggcgaggatccgcgggttttaggcgctgcagttcggcttgcagctgatggcctggttcaggcaattgtcttaggtaacccggataagattcaaagcctggccgccgaaaaaagctgggatctgagtaaattaaccgttcgcgatcctgaacatgacgagctccatgaccaaatggtgacggcgtttgtcgagcggcgtaaaggtaaggcgacccaagaacaagccgaaaagattgttcagaatgccaattattttgggaccatgctcgtttacatgaagaaagctgacgggatggtctccggtgcggtccattcaacggctgacacggtgcgcccggcgttacagatcattaaaacgcggcctggggttcatttagtgagtggtgctttcatcatgcaacgcggtcgggatgaacgatacttatttgccgataacgcgattaacatcgatccggatgctgaccaattggctgagattgcggttgaatcggctaaaacggccgcattatttgatatcgaaccaccccgcgtggctttgttatcattctcaaccaaaggcagtgccaagggaccgcaagtggataaagtggttgaagccaccaaaaaggcgcatgaattggcaccggatttggctttggatggcgaattacagtttgatgctgcctttgttccaaccgttgccaagcaaaaggctcctgattccaaggtagccggggaagctaacgtctttattttcccagaactgcaatcaggtaacattggctacaaaattgcccagcgattcggcggctttgaagcgattgggccaattcttcagggactgaatcaaccggtttccgacttaagccgtggtgcaaatgaagaagacgtctataagttggccattatcacggcggcccagaccttgctatgacaagcttaaagaaagatttcaccagtgaagctgcactgcaggcctttgctgcttcactgggaccgcagttgcaagcaggcgatgtgttactgctagacggggatcttggcgctggcaagactagttttaccaaaggcttggctaaggggctgggcattacggattatgtcaaaagcccaaccttcacaattattcgtgaatatcgccatggccgcctgccgctttatcatatggatctttatcgtttggaagatggtggcgccgaggatttagggttggaagaatatttcgaaggtgacggggtttcggttgtcgagtggcctgactttctggggcttagtgaaccggaaaccgacctgctgattcattttcaaaaggatgataattcggataccacacgtcacttagaactggttccccgtggtccgcgttatgaggcgttacttcaaagcctcagctaatgtgttaatgatggtttgctagagaacattcggaaaaacaggatcgagcatgatcgcaagtcgaaaaagcgatgcccggtgctgtttttttgtttgaatcagccgagtaattgtctagctgaacgcttatattttgataactaaagtttgcatgctaaactaatagcaatgtgagctgttgaacgaataggaaagtaggtgcaaaatgttagaagtcaaggatctggtcaagactttcggtaccatgaccgccgttgatcatgtgagcttcacggtaaaacccggtgagatcatgggattaatcgggcaaaatggcgcgggtaaaaccacgacttttcgaatgattctgaatttcttgacgcctgatgccggtaccatcagctggaacgggcaaccattgacggccaaagattacgacatcattggctatttgccggaagaacgcgggttatatcctaaaatgcgggtgcaggatcaaattgtttattttgcccggttgcggggtatgaaaacagctgaaatcaaagcgaggattccggaatggctggaacggtttcaggttaaaggtagggctacggataagatcaaggatttaagcaaaggcaatcagcaaaaagttcaagtgatcgcgacaatgatacatatgccaaagctggtcattcttgacgaaccgttttccggactcgacccggttaatgccagtttgttaatggccggcatcgagatgcttaaagacaacggcgcagcgattatttattccagtcatgatatggctaatgttgaggctatttcggatcatttggtgatgttgaaacaaggtcgcatggtcttaaatggtgctgtaaatgccattcgggaaagctttggccgaaccaaactgtttattgaatctggcttgtcggaagcagaattgcaagcatttgacggggtaacacatcttcgccgacacggacaggagtttgagttaacactggctgatccagcagtgggtcgacaaatatttacccaagctgtggcgaatggctacataccggaatttcgccaacaaccgcctacgcttgatgaaattttccgcctgaaagtaggtgagtcgaatgcataagttctgggtggttatgagtcaggtttacaaaaagaatgtcaaaagtggttcgtggattttcctagtgttgtcgccattgctttttctggcaattggggtcggcatcgcgttttatgtagccaaaacacaagctcctgcccaagtggccgttgtcagtgacgttagcgccgtgggtcaggcattaagcaaacaaagtaccgatgacttaaagtttaaggtttattcgtcagataaaaaagccaatgctgctttaaatgatgagaagattgacggtgttttaacggtgaaggctgctgaccatttccgttcccattatgtagcgcgcgataacgggcaaacggttgacacgtcgacccttgtcaccgcactgagcggccttaagctcagcagtaccgctgccagtatgcacttgacgcctgcccaagttaccgccttaacgcagccgcctgtggttacctcaaaaacagtcgcgattgaagatggcaagcaagtacccaaatcagactccacgcaactcatgaaccatggtgttgccgtcgtgtccatggtgctgattctgatggtgacgatggtttacggctcaattctcgcgcaggaaatcgcgacggaaaaaggctcacggattatggagattcttctatcatccgtcagtgccacgactcagttcttcggtaagctggccgggatcttcgccttgttattgacacagctggcaatttatcttgttgccggattgattggttggcaatttcttaaaaaccaaagcatggtcgcaggggtcttgaaacagtttgatttctcgattctattttccgggactaccggtatgatcgcgattttctttgttattggaacactaacattttcggtgttagctgctttgacaggttcgctagtttccaatcaggagcaggtgcaacaagctgctatgccgattagcatgttggggttggttggctacttcattaccattgccgcgcagtcaggtgattcaatgcttgctcaaatagccagttatgtgccgtttttaaatgtcttcgtgatgccgacgcaaatgtcactgggacgagcaagtatgggcgaggcgtggatcagtattgcaattagcatcgccttcttggccctgtttacaatgttcacggtcaaagtctatcgcaataatgtgttggtttactcaggctccggcttatggcagtcaatgaagacatcctttagcatctggaagtcagagcggcatgtcgtgaaaaaataagctgaaaaagaaattgtgaacgcctgactgaacgggtaaataaaaatggctggcaaagatgcattttaacatttgacgatcagcgtgctgtttacaatttgaaaataaaaacgagtgcaatttttcgtgttaagctgcagcgaaaattgcactcgttttttagttttatacgctaatttgttaagcttcagcctgctttagctaacttcatcatggctttagtctgcgcttcgccaaaatgttcattttcggcaatgaggattcttgcacacgcataactgtccgctaaggcgttgtgatggtgctcaagcggaatcttgagtgcagcactgactgtatccaaacgatgattcggtaactttggtaaaaactgccgtgatgttttaaccgtatcaatgacctgatagcgtggcgcggcaatgccatagcgatcaagtgtcaagcgcaatacggaaacgtcaaacggtgcgttgtgggcggtgacaatccgaccaggcgtataaaacatttgaatatgcggccaaacccgatcaaaagtcggctggtcttgaaccatatcaggtgtaatcccgtgaatccgaatgttttgcgggtcaaattgcatctgcgggttgatcagtgtgtaaaaactgtcaacaactcgattttgttgcacgacgactaaggcaagcgagcaagccgaagcccgtttgcgatttgccgtttcaaaatccatcgcaataaaatccatgtcatcttctcctaaactaaatcctgagtcaccaattcgacaggacagtgatcgctgcccataatttgcgttaaaatcttagcatcctgaatgtaaggttgaaaggctgagctggcgacaaaataatcaatccgccagccggcattgttagctcgcgcgtggaagcgataactccaccaggaatatgtgaccgtatccgggtaaaaatggcggaacgtatcaatgaagccactattgagctgtttggtaaaatcagcccgctcttcatcggtaaagccggcgttgtggtgattggttttgtcatttttcaggtcgatgggttcatgggcaacgtttaaatcaccacagtaaacgagtggtttctttgctgccagttcattcgtgtacgcgagaaaatcccgatcccactgttggcgatagtcgagtcgtttgagctcgccaccggaattaggcgtatagaccgtcattaaataaaacttgggatattcaagcgtaatgatccgcccttcggtatcatgttcagggatgcccatgccatacgtgacattcagcggcttgtgcttagtaaaaatggcggttcccgaataacctttacgttcggcataattaaaatattgatagtagccgggcaaatcgagttctacctgaccagcctgcatcttcgtttcctgaagacaaaaccaatctgcatccaattcgttaaaaatcgtcataaagtctttttttaaaaccgctcgtaagccgtttacattccatgaaatcattttcaacatgcttcactcctatcgctgctatgcgccttcattttactagactttacgggtgaatgcgactggcgttcttgttagtgtaaaacttctctcagtgcatgtggaggggcaaacacgagcacatcagtttagaagattctcgtagcagtgcgaaggggcaccttgttcgaatatcaggatagaaagcaagagctggcggagcggtggcgggctcagtgatgaaattggtctaaagcggagtgggcttctccgctttagaccaaggccgagctttgaaaccgcggtttttgcgggttcgaagtcgtgcccaccactctagctgcgcggtcgccagcctccaccaccgcggagccagctcggagtaacggaaatcacttaattagagtagaaccgagaaaaagttgacacttactgctttttgcgctctgtgttcatgcgcccgaatttctgctaaaatagtaagtagtctttttgaaaggacctgatgttgtggtagacgcaccacggatacttgaaggtatcaccatgttgcatgatgagccgttgagtcattatacctttacaaaaaccggtgggccggctgatttgcttgcgtttcctaaagacgtggctgaagttcaggctttggttgaaatggctcgggagcgggatatgccgttaacggtcatcggcaacgccagcaatttaattgtgcgtgatggcggcattcgggggttagtcttgattttaacggcgatgaaaaaaatcaccgtgaatggtaacgatgtaacggctcaggcgggggcccggctgattgacacaaccgaagccgcttaccgggccggattaaccggacttgagtttgcggccgggattcccggcagtgtcggtggcgcgttattcatgaacgcgggcgcttataacggtgaagtctgcagtgtgatcagtcaggctcacgttttgacgcgcgcaggggaactcaaaacttacaatcatcgtgaattaaactttcgctatcggcatagtgtggttcaagataccggtgacattgtcttgagtgtcaccttttccatgaagtttggcgataagcctactattcgggccaagatggatgaactcaatgcaagacgggcagctaaacagccactggagtatccatcatgtggctcggtgtttaaacgtcccccggatcattttgttggtccgatgattcaaaaagccggtttgcaagggcatatcattggcggtgcgcaggtatcgaaaaaacatgccgggtttatcattaatttaggcaatgcaacggcaaccgattatcttgatatgatccaccttattcaaaaaacggttaaagccaagtttgacgttgacctagagcctgaagttcggatcattggcgaaccgttacactaagcaatatcttaaaatctatttgaaaggggctacacaatgcatttagtcgaagccgtcttattcttgatggcattggtcatcatctcaaacgtgctcagtcattacattgtggctgtcccggtttctttgattcaagtcgcgctgggactaggcgcggctttattttttcatttaacgatcaatttagcgactgattggtttatgttgcttttcattgccccgctgctgttttacgatggtcggcattttccgcggcgagaactatgggagttgcgtggtccgattatggggaacgccatttttctggtgtttgcaacgatgctggtcggaggttacttaattcatttcctgattccgccattaccactaccagcgagttttgcgttggcagccatccttagccccaccgatccgattgcggttcagagtttggctaagcgtgtgcatttgccaagcggggttttgcacttggtgagtggcgaaagtttgatcaacgatgccagtggcttgattgggtttaagtatggcatcgcggccaccatgaccggagcatttgcactaggccatgctgttcgggactttttctacgtggcgttagtaggggcgttagctggcttggtgctaatcggcttgattaatttgagtcgcaactggcttttgcaacaagggctcaatgatgtcattttgcatacgattttgcaggtgttgacaccgtttttcatttatttgattgtggatgaatttatgcatgcttctggcgtcattgctgtcgtagtagccggtttactgagcaatacgcagcataatcggtatgttgccgcgttgccggagttgcggattgtttctgaacggacgtgggatttaattgtttataccctgaatgggattatttttcttatcttagggattgagcttcctgttgccatgcgggacacgatagccgatcatgaagtcaacacatggcaagctcttgaatttgttgtgattgtttatctcggcattttggttttgcggacgttatggatttatggctacatgtggcttacggttcgttcaaaaggcaatcctccttcttggcgggcggcgttgttaagcggtatttcgggtgtccgcggtgccattacgctagtcggtgtgtttgctgttcccgcagcattggcaaatggccagccgttccccgagcgcagcctgatgctgtttattgctgccggcgttgtcgtcttgagcttaatcgtggcgattgtggccttgccgctggtgacgcgctcagtcgcaccgctgcaaacccgtggctccacgattgccgcagatggtagcagcgatgtcgccgaggatgatgaaaatagtcacgatgttcgcattatctctcagcgtcaagcccagctgtttgtctatcaaatggcagttcgtcgcgttgaatccgagcggcgggagtcaaatcaaaaagcggcacttgatctgatcgccgaatatcaaaatctgattcggcgcctggagctagccgaggataccggcgccgccattccgccattggttcaagatgaacttgatttacgtaaggtgggggttcaaggcgaattatacgcgttagatgacttatggcgcgagaacaaaatcatgtccaaaagttatgccaaagctcacaaacaactgcagcatcgcctggatgatttgaattcaatggcgaaacgctccggccgaccaacattgcgcatgcttcttgaccggtccgcgttgaagctatcccacttttggtacacggtcgcgagtgaacagaatcgctcgcatcgctttttcaatgagaaactgtttattgaaaaggaaacagcaaaaggcggcttgaagtatttgtcgcaatttcttcgtcaaaaagaaaacaaggcccatcattacaaccgccaagtgatttattcgttgattgttcagtaccgcaatcgaattgcatcggttaaagcgttaaacacccacaaatcaacgcaatatgaacatgaactcggccgattacgcgcgattgcgtttgcagccgagcgaacggccattcatgatctacttgaaaaagggtatatcaccatggccatggcccagcgcttaaatcaaaatgttaacttcacggaaaatgctgcaactttaacttcgatggaagaagtttaggaactgggattaaaaaatatctcgacaaacaaacggcgaccagatgttctcaaatgagcatgtgcgggcgccgttttgttgtatcaaagggcatttaagctgccgtgaaatttttttttgaaaatcagctataaaagcttgcgttggtgcgtgacgttcgtataataggcagagttagtaaacttaaagtttagtttaacgaaacttataaaggcggtgtgccatggacattggcagcaaaattcgtgatttgcgcattcgcaaaaacctgacccaagaagagttaggggaacgaactgatttatcaaaggggtatatttcgcaagttgaacatgatcaaagttcgccgtcactggaaaccttttttgatattttaagcgttttaggtgagtcgccagccgattttttccgtgaagaaccagttgattcactggtctatcatgcttcggatcaggtgacttatcttgatgaggacaaaggttatcaattgaagtggttagttcccgaaagcaatgaaaacgagatggagccggtgatgattgattttgcaccggatgggatttttaaaactttcgaaccatcaccggcggaaacgtttgtgtatgtggttagcggcaaagtgaagttgttgctgggtgaacagacttatgtcgctaaaaaaggggaaactatttatttccacgcaacgaaacaacatcaactggtgaacgccgcaacgggtcgcagcaaatgcctgctggttgcgacggcatcttatctataaggagttggggtcattgagcaatatcattgttgaactgaagcatgtcggcaaacgttatggcgacacgcaggtattaaaagatgtcaatatcgaaattgaacaaggcaagttctacacattacttggtccgtccgggtctggtaaaacgacgattctgcgcgccattgccgggtttctggatgtttcggaaggcgaagtgctttttgatggcaaacggattaatgatgtaccggcaaatcagcgcaaggttaatacggtattccaagattatgcgttattcccgcatcttaatgtttttgacaacgttgcgtttggattacgtctgcatcggatgagcaaggaaacgattaagaccaaagtgacagacgcgcttaaaatggttcggttacaaggctatgctgaccgggaaatctctgaattgtctggcggccagcagcagcgggtagccatcgcccgcgccattgtgctggagccgcaagtcttgttattggatgagccgttatcggcactggacgcaaagttacgtaaagatatgcagtatgagttgcgcgagttacaagaacggctcgggattacctttttgtttgtgacccatgatcaagaagaagcactggcactgtcggatgaaatttttgtcatgaatgatggtcaggttcagcaaagtggtaccccggttgatatttacgatgaaccggtgaatcactttgttgcggatttcattggtgaaagtaatatcattcaggggcatatgattaaagatttcctggtcgaatttaacggtaagcaatttgaatgtgccgatgcagggatgcggccgaatgaaccggtcgaagtggttttacggccagaagatcttgatatcaccgcagccgatgccggcaaagtgaacgttgaagtcgatacccaattattccgcggcgattattatgaaatcgttgcttacgatcagcttaagaatgagtggttgattcactcgaccaatccggcaaaagacggcgagacggtggggttgacgtttgatcctgaagacattcacgttatgcggctaaacgaatccgaagaagaattcgatgcgcggctggaaacttatgaaggcgattaagcacagtattgacagcgactttactgtgaccgtgtccgttaacgcacggtttcggctaagcaccgtttgatttctaatctgaggagggtcatcgtgaaaaaatccaccacgaatgtagcattttacacgccttacgtgatgtggctcgcgttgtttgtgatcgcgccaatggtgttgatcgtttatcaaagtttctttgatattagcggccattttaccttggcaaattatcagacttattttcaatcaggcacttatattatgatgacgattaattcagtctggtatgcctttttaatcacacttgcaacattgctaatcagctatccgaccgcttactttctgcattatgccaagcacaagcagctatggttgttgctgattattctgccaacctggattaatttgttacttaaagcatatgcctttatcggaatctttagtcaggatggcggcgtgaacagtttcttgggcatgttcggaattgccccgcagcaatttttgtttactgatttcagctttatctttgtcgccgcttatattgaaattccgtttatgattttaccgattttcaatgcgattgaagaattgcctgaaaatttggtcaatgcctcacgtgatttgggtgccaaagggtggcagacatttaccaaagttgtctggccactaaccatttccggcgttaaatcgggcgttcaggcagtgttcatccctagcttgagcttgttcatgttaacgcgcttgatcggcgggaaccgggtgatcacattagggaccgcgattgaagagcattttctcaccaccatgaactgggggatgggttccacaattggcgtggtcttgattgtggcgatgtttgtgattatgttcctaaccggtgaacgaaagaagaagggggtccgccgtcatgaagcgtaagtttaagtggtccaacctttatctgattttcgtcttcatctgtttatatgttccgattttttatctggtcatttattcattttcaaccggcgatcgcatgagtaactattccgggtttacctggaaacactatgccgaactttttgcggatacccggatgattcaaatcgttttggatacactgcttgtggcgttactatccagcctgatcgccacgattatcggggcattaggtgcgcttgcgattgatcgtaccagtcggccggtggttaaaaatacggtgctgtcattgaacaacattttaatggtcagtccggatgtcatcattggggccagtttcttaatcttttataccgcgttaaaagtaccgctgggtttctggtcggtactgatgagccatattgccttttccattccgattgtggtgttgatgattttaccgcggctacaggaaatgagccattccatgcttgatgctgcgcgtgatttgggtgcttcaaactatcaggtgctgacgcgggtcattgtgccatatatcacaccgggaattttctcgggtttcttcatggccttcacctattcgctggatgattttgccgtaaccttctttgtgaccggtaacggctttgaaacgctggcggtggaaatctatgcccgtgcacgtcagggaatcagcttggaaatcaacgcattatctggcgtgatgttcgtctttgctttgctgctggtggtggggtactactttatccaacaagcgggacagagcaggcgggcaaaacacaagcgagaaagcgaggcgttactcaatgaaacgactcattagtattgcagttgcgatcctggcagtctgtctcggattagctgtttggagcgagaacttacaaaaatcgcaaggagataccggtgacaatacactgaatctttttaattggggcgattatattgatccggccttgatcagtaaatttgaaaagcaaactggctatcatgtcaatcaagagacctttgattccaacgaagcgatgtttaccaagattcaacaggggggcaccagttatgacctgaccgttccttcagattatatgatcgagaaaatgaagaaggccaatttgctattaccgctggataaaagtaaattacgcggcatgcagcatatggacccgcgtttaattaataaagaattcgatccaaacaacaagtacagcattccgtatttctggggcacgctgggcattatttataatgacaagtttgtcaatgccagtgaggttcaacactggaaccaattgtggaatccgaagtttaaagactcgattatgttgatcgactcagctcgtgatgtgtttgcgccagccttaatctcgctaggcaaatcggtcaacgagaccaatccgcaaacgcttgctgttgccaaagccaaactcgatcagctctcgcccaacgtcaaagctgtcgttgcggatgaaatcaagatgtacatggcagaaaatgaagctaaaattgccgtcgactggtcaggtgaagccagcgaaatgttagctaacaacaaacacctgcactatgtcgttcctcaagaaggcagcaatctctggtttgataaccttgtcattcctaagacggccaagcatttcaaagcgatctatgcctttctcaacttcatgatggagccaaagaacgccgcgcaaaatgcagaatacgtgggttacgccacaccaaatgcaacggctaaaaagctattgcctaaaagtgttcaaaacgatcgccaattctaccctgatgacgaaaccatgaaacatcttgagatctattccgatctgccaccggctaaagttggtctatacaatgatttattcttagaatttaagatgtaccgccgctgagggttttggtaccattcagtccgctacggttagctgaaaaagctgacttggcgggcttttttgtttggacttttggctgctttaaataccttcgaaacgatgctttatatttttggacaacaaaaatagccctcaaaatcttaccgcttatggtggagaataagcgttgacaggaagattttccgagggccgattattgcgcctaaatgttacttcacgttataggttttggtgccaatagtttggaaactggcattttcaaacgtaacagtcactggattatcattttttagttcataaataaagacaccttgaacagttttacctggtagtaagttattatgcatagcgttctcttgcgcttcgaaaggatttgagccatcgtcattcattttaggcattccgctggttaagtcgacatttgaagtgtcatttttttgtttaacattcatcgataccattccagccattggcatctgttctttcttggaagtgtttgtaacgtccacaaataagacaagattcttctttccttgctcgtaggcatcctggacttctgctttagtgaacttgaaggtcatatttgctgtgacccaagtatcatttttaaaggaccaaccactttttggggtagaggttttgttttctgccttttctgctttttcagcagtggaagttttggcggctgacgagttatccttacttgctgaactggaactactgcaaccggctaaaaaaaatattgataaggttgcgactgtcactaaaatcagttttttcattttctcctcctaggactatcatgctgactaagcaactttgttttgcttgcgtggatgttgcaaaaacaggaacacaatagcaataattaatagaacaatagcaggaaacgcaaatacagcagaaatgccaaagcagagtgatccaatgactcccaggattccgccgacaagtgaaatatggtgtttgtagctctgccatagtgcaacagcgtttagaactacgccaatccacgcaacggtgtaaaagaaaatgcctgcgccagatgtgacattggttttattggccgcgtcattaacggcagttgcaaagataacaaaccaagatgatgcgaagataaagcaggcaacaatgtcgtaaatggcagtccaaatattaatctttatcttgcccataaaaatccaacccctttacaaaaagcttttgtatcataacgacacttaaataggatcaacaccaaagccttgtgtgataatacttagatacaacaattaggtttattttgatttgggatatcacttctttcataaatgccaacgtttcatgtaaatagtgcaatgggatttttattagttcgtaatttcccaataccgttttaaatttaaggcagtgagatagattaatgcaaactttacgcttgggcgtgcttattcggtttttttaaatgagtagtacaagcagctgcaatcgggtaccataggaatgaggtgatcgcgatgaagaagcatagtcggcatagtgaaggtgtgtggctggatatcgtttgttgtatcagtctatggctggcggttggaagtttggtggccgcggcaacggtgattcatattaatcggccatatatcattattatgttggcattagctttttgtgcgattggcgaaacagtggcggtttttaaaaattggtgattggccagaatgatctgcatcagtcaggtaaatcctgggtgtgaatccgctctcatttttcgcgacgagtgtagcataagtttatcttgcttatcaaaagatatgcatggtaattttgatttaaaaattaaaagtgacactaaaaaatggcctcggaaagttcaaattccaaggccattttcttagtgttgcttattcgacacgctttaccttcgcatgggctaagcgccgacgattgagccatttccgtccttcttcgattaagaagagtggaatcgggatgatggctaggaagatccaatcggtgagggctagtgggcccgtgtggaagagttcctgtaagaacagggtgtaactgagtagggccagcaggaaaatttcaaagataatgccgaaccagacaagtcgattggcaaacaaaccgactttgaagactgaggcattttccgtgcggcaattcatggctgcggcaatttgacagaagataatcgcagctagggtcatggtagttgccatgacataagttgaaccgcttgtggctaaaccatgtgtcggccagccgtccagatgattgacgaagaagtaggcgccgctagagatgattgaagcaatcagtccgtaccacgcgaaggctttccacaagacggttcggctcatcaggtgagcattacgtgcgcgcggtggtttgtccataatcccgggctcggctttttcagatcccagtcccaaagcaggcatcatgtcggttccgaggtcaacggttaagatttgcatcacggttaacggtaggggaatagcgccacgtgagaagaggaaaagcgcagatggcacagcttcaggcaggttagagttcaaaatataaatcaggaacttttgaatgttgctgtaaacagttcgaccttcttcaatcgccgcaacgatagaagcaaaattgtcgtccgtgagaatcatatcggctgcatctttggcgacgtctgttcccgtcacgcccattgccacgccaatatcggcttttttcaaggcgggtgcatcattgacgccatcaccggtggaagcaacaatttcacccatttcttgaagggttgagacaattttatatttttgttccggtgctacccgcgcaaaaatgatttcgccagcaagcgcttgtttgaggtcggctttactcatagcatccagttcggtgccggtgacgacgcgggctttatcagaggttaagccgattttgaccgcgatagatttagcagtcaacgacgaatcgccggtgaccataataatcttgatactggcgttatgacattttttgatggccgcgtaaatctctggtcgtggcggatcggacataattgctaagccaacgaatgtgagcttggtttcagccgtttcaatcgtcagaccatcgagctgtttttctttgtcagctgcttgtgggatttcgcgatatgccgtggcaattgaccgcaaacctaaagctgcatatttacggttggccgcatcaatggcatctttgtcagcttgctttagcggtcggactttaccattttcttgaatggtatcgcaatgtggtaataaatcgcttaatgagcctttggtacagatggagagcgtctggggatcgtgttggtggatggtggtcatgcgctttcgatccgagtcgaacggcaattctttgagtcgcgggaacttctgggtgtaggcgttcgtatcgatgcctgatttttgcgccaaaatgaccagcgaggcttcggttggagtgccgagaattttcggtcgtgcttcgccttttgccggttcgacttcagtatcattattaaacgcgaccagtcggatgagtaaatccaggtccggatcgctaccatagtgaatcggttgaccgtttagctggatctcgccgttgttgacatagccttggccagtgacggtataagtgtgcgccggcgtccagacgtgatcaactgtcatctgattctgcgttagggtgccggttttatccgagcagataacggtggtttcaccaagcgtttcgacactgtttagatctttgagtaaggcgtgttttctcgccatccgctgaacgccttgtgccagcgacaacgtgacagtcggtaaaagcccttccggaataaacgcaacgatcatgcctagcgcaaaaataaagctttgcgcgaccggataatggacaaagaaaatagcagcaacgaagaaaagtacccctaaactgatcgcaatcaacgaaatctgtttggttaagcgattgagttccagttgcaatgggcttagactgcgcttttgttgctgggttaacgcggcaatccggccgaattccgtatgcattcctgttgcaaacgccaccgccgttgcagtaccggcgccaacagtggtaccggcataaacaaggttggactcggcaaactcgccttgtccggcatcaaaagcaacttttttggattcgggtacggattcaccggttaaggcactttgatcagcctgaacggaggtagctttgattaaccgggcgtcaacagggaccgcattaccggcttgcagattaaacacatcgccagggacaatttgggtcgcattaacttgctgcaacttgccatcacgatagacctgcgtataggtcggcagcattttcataagtgaattcgtcgctttttgagcttcatgttcttgccagtagctgaaaacaccattaataatattgactaaccaaattgcgatgcctagctccaatgtgccggacaaaatggcaacaaatccgctgacccaaagtaagatcgccatcacgctggtaaagttcttgagaaagatcaacagctgcgatgcctgcttttcgcgggtgatcgtattttcaccgtattttgctagccgggttgaagcttcctgttgactcaatccggttgaagttgtgtgtaaatcagtcattaaatctgcaattgattcagtggcaaacttacgccgcgtctccttttcattcttcatgactcaagcacgtctcctttgaaaaaacgtttaactccattctaacgttctgcgggatggaaaacaccaaaagtgctaattttcatgagttggcggggcaggataagcgacttctccttgtaagccgcgctcaagaaaggtgacggcttcattcaccgcggcgttgagatcaaattgtgattggatatcgagtatgaccggaagcagataactgaacactgtgccgaaaatgtactgcagaattcggatcaccggccaattaacgagaacgcctttttcttgatacgcggttagtaaatgcgtggcttcacccaaaaattgcgtttgaaactgttttgctagtgccttgctcaaagatgaatcgcgcaaaagggtggcaataagaatacgcaattgggcttgattggtgatggcaaatgtcatgcgatcgcggacaataaacgttaaaaaagtatgcaaatcaggcagatgatgctcgccaacttcatgaataaactctgtgatcgcactggggatgacctgttgaatcatcggagccaatagcgcacggagaataccttctttggtcttaaactgtttgtagacagtgccttcgctgacttgggcgacccgggcaatttcttgggtactggtgcgatcgtatccttgttcggagaagagctttaaactggccttgagtacggcttgctgtttggttgatagctgactatctgcaagggatgccgagaataaatcggtgatattatgcggtttcatcgagctacacttctttcataaattgaattaatttcaaacttgacgatatttgcgcattgtcaaaagattcaagtctaaaaatagcaggaaaaagcctaccaatgcaatgacatcagggtataaaactgctagtgattggcctttggtaataattccggttaaagcattggcaccataataaagtggcatcaaatgcgcaatgggttgcagccatccaagcatctgattgacaggaatcaatccggtgaagaaaatctgggggatcacaataataggaataaactgcaacatctgaaactcactgttggcaaaggttgaaatgagcaagccgagcgcaagggctgttgatgccagcaacaaattgatcagaaaaatggccggaatgcttccaagaatttggatcttaaagaccaccaaggcataaccgacaatcaaaaccgtttgaatgaccgcaaagatcccgtaaccaagtaggtatccactgatgatttcaccgcgacgaatcggagtcgccagcaagcgataaagcgttccggttgtccgttcgcgcagtaaggcaatgccggaaataaaaaagacaaagaagaagacgataaagccaataagaatcggtaacaaagtatcaaagtaagtggattcagacgagccgtagcgatagtgggttgtcatgcgataattggtctgcttgggttgttgcgggatggggacttgtaccgcaccgtgcgtggcttgttgtaacgcgtccgtcagtttatttaaggcaatcgcttgtgttttaaggctggtggccgcagcttttagtcttaacttaacggtggcagcctgtaatgtttgcttcaacagcgtgctttgtccctgatcggtgttggcaagcgttaacgtaagctgattgccatgttgcgttaaaacgcccgcataatcatgctgtttgattatgcgggtaggtttttcagtgccaacgtgatgtaatcttaaatgcttcgtatccatcgccttggttaaggatgtttggacgccatgcacggccaaatcaacctttgtcgttgtgttggactgaaataagaagaagattaacgtcatgataaacaaaggcgcgataaacattaaggccagtgtgcgtttgtcacgtaacatttctttgaaaattcttatcatcaaagcttcaatgcgcatcttgctgcctccctgcggctagaaataccgcttcaatcgaattcgcttgatagtcaacttgcaactgcttcggtgtgccttgagcgattgcttgaccattgcgaatcatcatgagcagatccgcttcttcagcatccgccatcacatgggtggttaaaataattgtcacgccttgttttgccagtcgatgcaattcctgccagatttggcgacgtaacgcaggatcgatgccaatcgtcggctcgtctaaaatcaacaattgtggtttgccaattaaagcgatggccaatgataaacgtcttttcatcccgcctgaataatccttgacgagttgtttaagggcagtttgtaaatcaacaacgtcagcagcatacattaactgtttggtcagtaagtaacggccaacgccttgcattttggcaaaaaaagtgagattttcggctccggttaagctttcgtacaacgcatcggtttgcgccataaaaccaatgcggcctaataataagcgattgggaacatgctggttaaaaacggtaaccttcccggcgcgaggacggatcatccccataatggtgctgatcaaagttgttttaccagcgccactaggaccgatcaaagcgagaatctgaccgcgattcaatgttagattgatgtggctaagcaccgtttttgtaccgtaaccctgttgaagatcggaaacctggacgattgcttgagttgacatttgattcgccaccttctttttgatagtgagtactcactcacctgcattgtaagctatttgttaaaaaatgcaactgatttacgtatctcgaccgatgcctaggaattgcggcgatgaggctaattgtgatgctgcgtttgaacttggaggctgtgaaggcggtgccacgcttcgtcatttgtttccgtcctcgcccgttcggtttctcgtggtataattattcagaagttcgatttttaacaataatggagggacgcggatgcgcacctatctcgcaaacttattaacttggtccacacttattaatctggttgacatcctcgtcgtctggtacgtcatttatcgcttgattatgctggttcgcggtacaaaggcggttcaattacttaaaggtgtctttgtgattgcggccatcaagatcatttcctggttcttgcagctgaaaacagttgggtatttaacggatttggtgattacatggagtgttccggcgctggtgatcatttttcagcctgaaattcgtcgcgggttggaacatcttggtcggggctcactgattttccgtagcaataataatcagcatgaagcagaagcgcggatggtcaaggaattggataaagcaattcagtacatgagcaagcgtcgaatcggggcattgatcaccattcaaaagaataccggccttgaagattatatcgagacggggattccgcttgatgccgatattagcggtgaattactgatcaatatttttattcctaatacaccgctgcatgatggggcagtcattattcgggataatcggattgctgtcgctgcggcctatttgccattgtctgatagcaacctcattcccaaagaacttggcacccgtcatcgggcggcagtggggatcagtgaggtcacggatgctttgacaattgttgtgtcagaagaaaccggggaagtcacgattacgaataacaacaacttgattcgcaatctgacccgtgaagactacatgaagtttctgaccgcacagctggtacctaaagaagaagcacctgatcccaatccggttgtcagtttcttttcacgtctttttagtcaacgtaaaaagaaggagggcaagcaatgaatcgcttatgggataaaccatgggtcaatcggttgttagccttgcttcttgcaatcggtttgtttgcctatgttaatgtcgagagtattaataatacccggcaaagtgccaatgatgacaccaccttggtcgctaataaaacgcagaccgtgaaagtgccgcttcaggttaatgccaataccgacaagtattttattactggatatccgtcaaaagtttcagtagcattgacgggcacggcttctttagtcacaatgacagcaaacacacagaattttcgcgtcattgctgatttaaccaatttgggtgtcgggaaacaccgggttcggctgaaggcggaaggattgaataaggatcttagctattctatttcgccaaagtcagtgaaagttgacatccaggttcgggataacaagacgatgccgattcaggttcggtataataaggcaagtattgcatctggctatgcagctggtgaaccgaaactttcaacgcgcactgttgaagtgaccggtgcccgctccgttatcgattctattgcgcaagtggttgcaaatgtctcgttagcgcataatacgcgtaagtcggttgatcaagaagtcttattacaggcactggatgacaatggcaataccatgaatgttgttctatcaccgcaaacagtgcacgtcaccttgccaatttcccagcccagtaaaaaaataaatgtcgagctgaagcaaactggcaatgccgtctccggacatacgtatgccttgtcgtcagatacaaaacaggttaccgtatatggagatcaacagagtttggacaagctcagtaaattgaccgttcccgttgatgtcagtgacataacatcaagtactacccgaacatttaatgtcacggatttaaacgatggtatttctgccgctagtccggaaacgattaaagtgactgtcagtgttggtaataccggtagcggtgatgacgacaatagtggtaataatagcagtggcgctgagagctcggctacttcatcaaagactgctagtacaagtgccagtgcttctcaatcaagctcttcaagtgaaagcacatcgacaagtgaagattaatgactggaagaaatgaggaagaattaagatgacaaagtattttggtaccgatggtgttcgcggcattgctaacaaggaattgagtccggaaatggcgtttcggttaggccggacaggcggatacgttttaacgcagcataaggaagatgccagtcgccgcccattggttttggttgctcgcgatacgcgaatttctggccagatgttggccgatgcattgattgccggtttactgtcggtcggaattgaagtgctggatcttggtgttattaccacaccggctgtggcttatttgattaaaattcaaggggccgatgccggaattcagatttctgcttcacacaatccggtagcagacaacggcattaagttcttcggcgccgatggttataaactctccgatgaaaccgaagaagaaatcgaagccttgctggatgcaccggaagacaagttgccgcgccctgctgcagaaggattgggaacagtcgatgattatcctgaaggtgcccttaaatatacgcagtttttggaacagacgcttgctgatgatttgagtggcatccatgtttgtctagacggcgctaatggtgctaccagcggattggtcagccgtatttttgctgaccttgaaactgactttgatacgatggcgacaacgccggatggtttgaacattaacgctgatgttggctcaacccatccgcaagccttagctaagttcgtagttgaaaaaggggccgatgttggcttggcttttgatggtgacggcgatcgctgcatcgcggttgatgaggaaggcaatattgtcgatggcgataagatcatgttcatcctgggcaactacatgaagtctcaaggtcgattaaagcaggacacagtcgtcacgaccgttatgagcaatctcggcttgtataaggcgctggaagctaatggcatgaagtcggttcaaacggcagtcggtgatcggcatgttgtcgaagcgatgcgcaaagacggctataacattggtggcgagcaatccggccacatcattttgtttgactaccacaacactggcgatgggatgctcacgggtattcacttgctgaatgttatgaaaaagactggcaaaaagctttctgaactggcagcaccggttaaggattacccgcaaaaacttgtcaacgtaaaagtggcggacaaagaaaattggcaagcctatccggaaatccaagcagccattgataccgtggaaaaagaaatggcgggtgatggacgggtactcgtccgcccttcaggtactgaaccactgttgcgggtcatggcagaagccaaaaccgaggacttggtgtcacgatatgttgatcaaattgtcgatgttgttaagcaggaaatgggaagctcggaagcctaactctggtttgaattgaattgtcagctcgcttaggttgagttggatgatgaaggtctaaacttgatgctgaggtggatcagcattcgataaatctttccaaaagtgaatcggtcgtagtgacgtgtttgtcgctacgaccgatttttttagtcaacttttttcagttgccgttgctaggcgtattctttaaatttttttaagactaaagtgcgcgtttgtgcaaaaccttgttataaagggaaacgattaaccgaaatgacggcttttggcgatctgatatagaccggttttacttactaaagtataccactgaaaaacaggtgttgacatatcgctttgtaaaacatatagttagccttgtttttaacaataccaataaataaacctgtctaaaccaattttgagacagtcggaaaaggatgttgactatgtgtggaatcgtcggtgttatcggtaagaaaaatgcaacccaaatcttgcttaagggacttgaaaaacttgagtatcgtggttacgactcagcaggtatttacgttaatgatcaggcaggccatgatcatttgattaagcgggttggccatatttcgaacttggaagaagcagtaacgcctgatgttcaaggcgtgatggggattggacatacacgttgggcgaccaatggcggtccgaccgaagccaacgcacatccgcaagtttccaatgatgaacgcttttatctcgtgcataacggggttgtgaccaacgccaatgacctgaagcaacagtatcttcaagatattgaattgcacagtgatactgatacagaagtcgtggttcaactcatcgcgttattcgctcgggaaggattgtcagccaaagaagcctttcggaaaacgttgaaaatgattcaaggttcctatgctttttcgatggttgatcgtttggatccgacagttttgtatatcgctaaaaataagagtcctttattgattggccgcggtgaaggcttcaatgtcgttgcttcagatgcattggcgatgttgagcgaaaccgatcagtttgttgaactgaaagatcaggaaattgtgaccctaaccgctgatgcagttcatatcgagacccttgatggtaaggtagaagatcgcaagccgtttaccgtcaaagtcgatgatggcgaagtttcaaagggaacctatccattcttcatgctcaaagaaattgatgaacagccaattgtgatgcggcgactggttgaaaagtataccgataatcagcagcatgtggtgattcctgaaaacttaatgaaagccttacagaatgcagatcggctttacattgttgccgcggggaccagctaccatgccgggttggttggtgctcctttgtttgaacagctggctggcattccaaccgaagtccatgttgcttcggaatttgcttatcatcagccattactctccaaacatccgttgtttattttcctgacccaaagtggtgaaactgctgatattcgtcaggttttggttgaagtcaaagcgcaaggttatcagacactgacgattaccaatgttggcagctcaacccttgcccgtgaagcaactttcaccttgttgctgcatggcgggccggaaattgcggtcgcatcaaccaaggcttacaccgcccagattgcagtagaagccttggtagccaaagccgttggtgaagcaaagggcttacaaaacgctaaggactttgatgtgattcaccaattaggtttggcagcaaccggccaacaagcactgattgatcaaaaggatcggattcatgaattggcaaccgatatgttcaaaaccacgcgcaatgctttttacattggccgtggcggcgactactatgccagtcttgaagccgcattgaaactcaaggaaatcagttatgtgcaggctgaagggtttgcggctggcgaattaaagcacggcaccatcgctttaattgaaaaggataccccagtcgttgccatcatctccgacccagtgaccgctgctcggacccgcagcaatgccgatgaagtgcaggcgcgcggagccaaggtattacacattgccatggcgagccaagcccaaaaaggtgaccagattatcgtcgacgaaattgatccgcttctggcgccactggttacgatcatcccagcacaactgctggcttacttcacgagttccgatcgtgggtatgacgttgaccgtccccgcaacttggctaagtcggttactgttgaataggtctaagctcataatggcatgaaaaattccatgacggttaagttgatatttaaatttaatgtcagtggggattaaacaaaaaaactgttcgccaaatgtggcaaacagtttttttgtttattgaaggctaccgagcgatctaaagaaggctacttaagatacgcttcacttaatgccatgaattgttgggcatctttagcggctaaatcaattccttgctgccaaaattctggttgggtcaagtcaacgccgaggtgctttttcgctagtgcttccgtgctcatgttggcggtgtcccgcaataaggcaatataatcatcttcaaaatgatcgctttgctgtgccttagcgtaaataccgctagaaaacaggtagccaaatgtatatgggaagttataaaacggtgggttgtcaaaataaaagtgcaacttatcggcccaatacatcggatcaaatgaactcaagccgccagcgtaagccttctcctgagccgcggtcatcaaggctttcaggcggggaacgcttacaataccgtgctcacgttcttgatagaaactgtcctcaaacaagaatcgcgcatgaatgttgagcagcatcgctagtggattggccatttttgcgtctaataagttgagcttttctgccggttcgctagcagctttcaccgtcgcatcggcaacaatcaattcggcaaaagttgacgcagtttcggcaacgttcatggcatagttttgtcgcaaaaccggcatatccttcaaaatagaactgtggaaagcatgccctagttcatgagcaatggttgatacaccagacgccgaaccgtcaaaggtcatgaaaatgcgactttctttgacatccggaacactggtcatgtaaccgcctgcccgtttgcccggtcgatcttctgcttcaatccagccattttcaaacgcatgttgcgcaaaggcggccattttaggtgaaaacttcgcaaaattattaacaatgaattctgcagcttcgtcaaaagtgtaggtcttcggcttgaagtcgccaacaaccactggtgcccattgatcttgccattgcatggtggactgcccggttaattgggctttgcgcgtgagataggcagcgaaaggcgctttattggcgctgatggtttgccacatttgatccaaggtggcacgcttcatccggttatattgcagtggcttgtatagataatctggatactgatgtaagcgatagttggtcaagcggaacccggcaatatggttgagggtttcgccaaacaaactggcatgatcgctccaaacttgttcccaaacattgaaaacgtccttgcgcgtcttaggatcaggtgcaccttcaaacttattttgcgtttgaccggcacttagctcggtcgtttcgccattttgagtgatcgggaacttaagactgccactgagcgttgtatagtgattactccagccggtgaatccatcaaccgccaagtcattgatcatggtttcggttttatcatcaagcaattccttggcctgatcacgaatttcacttaaaccaaaacgactctcagccaatgtaccagtagccgtcaactgatcgaaagcagtttgtggcatggcggctaatttctttgccaaggggttgttaatgttttgaaaacgggtttctagtgttgtaagttgtcctagcaggggaccggtttttaagttggcagtatcggcgctggcaatcatttcgacaaaactgcctgtggtgccgagacctttactgatatcttcaaaaagttgccaaagcgttttgaaatcggtaaactcaggggcatcatcttcaggcgaccacgctgctacttgggcttcaagttggggcaattcgtcggtcactgtctgaatccgtgcggtaagttgtggcgagtcgatgccacctgggaagattgaatcaagattccaattaatggggtaagacataacagcacttcctttccaaataggttcattatacagtagatgagaaaagtatgagtgaaagtaggttgaatttgtgaattcttttaaacggcattggggattatggttgacggccgcaattttatttgttttgttcgtcagttctagcatgacctataaggaacaaacaaccgtcccgttaatggaacgtttgttgcataatgagccgttcaagccattcttaagtagcattcagtttaattatgccggcgagacacagtcagttgctaaagtcggatattttaagttcgttgagttttttgtgcgcaaaggggcccacgttagtatctttttcttattgggcttgggtttgacgcaagggacgtttatgtatcaaaaaaatcggtggttgcattggccgctgatggtgttgagttgtaccggaattgcagcatttgatgagtttcatcaaatgctgacaggcgggcgcacgccgttgtttcaggatgtgatgctagacacggttgccgctgcgattgcagtgaccttcatgtggggatggttgtggcgtcagaagcggcgttgaataaccgcgcgttctttgctataattttagcgatccatatgcttctatacttatgaaaagagggtttatcatgtcaggacattccaaatggcataacattcagggccgtaagaacgctcaggatgcgaagcgtggtaagattttccagaagttatcacgtgaattatacatggcagcaaagcaaggtggtcctgaccccagtggtaacccatccctccgtttggtcatggacaaagccaaagctgccaacatgcctaaggacaatatcaagcgggcattagacaaggcgagtgatcgcgatgcggctaattatgatgaagttacctatgaaggctatggcccgggtggcgttgcaatcctggttgaagcgttaacggacaatcgaaatcgaacctccagttcagttcgggttgccatcacccgtcatggcggcaatatggcggcagccggtgcggtttcttacatgtttgatcgcaaagggtatctcgttatctcacgtgaagcgtatgatgtcgatgaagatcagatgttggaagatgcactcgaagctggggctgaagatatgcaaacttcagacgatgcttacgaaatctacaccgatcccaaagaattcgcacaggttcgcgatgctttggaagaaaaagggtataaattcgtccagaacgaattgacgatggtaccacaaaatctgaccccgattcctaaagataaagtcgaacaattccaagccatgatcgatcagctagaagacgatgatgatgtgcaagaagtctacacagctggcgactggccggacgattaatgagttgaataaatgagtgaagaggctgggctatcattcccagtttcaaactaaaggcgtactatttctcgaatttgacgagaaatggtacgccttttagattctctacattagtatcaatagcatttaacgattttagcaccaaggcggagtaatctctggctagatggatggcgttgcatagctagggcggaaacagcgcggctaagggacagagtgtgagcatcttgagacataatgatcgtatttttaatcaccgtgatcaatgtccttatgtgcaaacgatgacacccgaaaaagcatgacgggtaaattttttatgttaatgacaaactcgtccttgcctgcgaattcttttaatgcaggaggaaaaaatatgcagtcagtgaaaacgttattgaccaacgcattagacaaaggagccagcgatatttactatttgccaaatccgcatggttatctgattcggcttcggttaccgacagggttagtgactttagggcaactggaaacgcgcataggtcagcaagagattaattatctgaagttcatggctgggatgaatgttgcagagcatcgccgtgtccagttaggcgcattttatcatccggactctgatgtttttctgcgtttaagctcggtggcagattttcggggccgcgaatcattggtggtgcgactgatcagtggtattccagatgcgcagggtgcacgtcagttgttggatcgattaatgagtattttgacgcaacgccgaggcatgttgacattggctggcccaaccggatcgggtaaaacaacgttactgtaccagcttgcaactcgcttggccgcctcgaaaatggtgctgtctatcgaggatcctgtcgaaattaatcagccccagtttctgcaacttcaggttaacccagaagcggaaatgagttatccgcagttgttaaaggccgctttacgtcatcgcccggatgtattgctgattggtgaaatccgcgatcggcaaaccgcccagagcgcctgtgaagctgccattagcggtcatattgtgcttgcgaccgtgcacgcacgttcggccaacgacaccccactgagactgactagctttggcttacctgccgaattggtttctgccgccttaacagccagtgccgcaatcacgttgcagtatcgtccaacgattcatccggtagctgaagtggttgtttttgagccggcgcatcaaagcggtgcaacggaggtggtttcgtgaaagtgcctctgatcgttcaggaacgtttttgtcgtcaaagtgcagccttaatgaaggcgggtttcaatctgagtgacgtattcgcctatttgcaagtgagtttgcctaaacacaccgcgatttggcaaggaattgaaaatgaattggctaacggcatagccttttcggatgcagttgcgcgccaggatctggcaccgattcttttccaacaattgcagttggctcaggttcatggtgacttagcgaaagcgttgacgattgcggcggattatcttcacttacgggttcgcaatcggcaacgcattgtacagttgctggtttatccgtgtctgttattggcaatgctggtggtcttacagattgtcgttgtttttggcgttcttccggcgctttctttaccacagtcgaatttagtcgcgcttcaattgattgggttgggcgtggtgacagtgattggattcttgggttactgctactggcatcgtttgtcgccgctcaaacgtctactggtgttacagaacgtcccggggatgcgccaactgctacgaacctattatcagtttcagtttacagcaggagcggctcaatttttgttggcaggtgcagatattgccaacttttgccagcacttagcaaccttagacggaccgatggggaaattaggcatccgcattcaggcgaaggttcaacagggatacgaattaagtgtggcgcttcaagagccgttgattcccgctgaagttgcccgtttgctaaccatgggccaatcgcatcatttggtcgcaaccgggttaaaactttttggtgaacagcttttctcgcggcttcaacaacaattggaacgactggtgagcttggtacagccgtttttgtttctaatcatcggcggagagattttactggtgtatttacaaatcttattaccactttatcaatctatagggggttaagcatgaaacgaaaaaagttgcgcgcatttaccttaattgaagtagttgcggcgctgggagtcattattctactgacgctcgcgctggttttgaccattcagggccagatgaaacgtgttgatactcagaacctgaaagcaaccgtggcgacggtcaacacccagttggaaatgacttacaatgagccagatcacggcggggttgattttagttctccggatcaattagttaaaaaagacgtgatttcacaaagccaggcagacacccttaaaaaaggcgggtttaagctgacagcaggatcaccaccgacgtttagcaaatgaaacggctacatggttttaccttgattgaagtcgtggctgtcatgtttgtcataactgcattagcaatcgttgcggtcccggttggccgaaatgttttaacgcaataccgcgaacgtgaatttatggaagccttggtggaagaatgggaaatgcttaaaatgcgggcaagagctgaaccatcaagtggcaatatgtatgtgaatggtgaaaaaagggaagttagattcgtgactcaaggcaagacaaagatccttgctttccctgaatcattggcatttggtggtgaaagtaggatggaatgtaacccaaacggaaaaatagtcacggcaggatcgttatatttcagacattttaaagacattacttggaagataagttttcagctaggatgggggcgagcaatattgaccaaaaattaagtggggtgttgttagtcgaacatcttgcggctttgggcgtggttctcatggctgtgggttggttggcgttattgatgaggacttatcagcaagttgtcatacctgtccgacaagaaaccactgcttactatgccgctcgcgttgctttaatgcgggtgcctgcgcgtggtggggaaactcaggttagcgttggccctgatgtttggaaggtagtggtgagcgcaaaggaggttcgggttgatgccaataactcgacggccagctatacctttaacccttagcgccttcaccttgatcgaagttgtgattggattaggaatcatagtcgcggtgatgttgctttggtcgccgcttttgacaggcgttcaacgttttacaaatcaagatcaatatttactgcatgcactgcaagcagatgcagacttacaggctaatgtgcggacccatcggatgaaactcgagtcgcttaaacagaaacgggtcaggcttcagggaaaagatggtcatcaatcgaaattttatgtttttgagttttataccaaaaatggcaacagtatgattcgcgctagaaccaatgatgggggccatattccattatttatgcaaatcaagtccggccaatttttggggtccgttcatggctttttgtatgagataagattgggtactaaccagacttttgaaggcggggtgcggcttaatcaatgaaattacgtggaagtgtgctggttaataccatcattttattcggtatatttttgacgatgacaattgggatgtttaagcagtttaaccgctggcagcagcattatcaaattattaagcaagtcgaaaagtcccagtttaagtcggcttattcgcagtggcggcaaaatgcggaaggagtcaaccatcatgataagtcagaaacagctgacagtgcgagcttgaaatctagtcaggcgagtgaagtaagtgtcagtccaacgaggtcaatgccagtggttgaaaagacggtcagtgagacagataccaaatcggtgccctaggttaaagaatgatcccgcttgaataaggtatttccaatcggtacactggtaaatggagcgttgaaggggcgcgttagcagcagactcccaataaaatgcttattggccgtatatggtcatgatgatgcgcggcttcaaccataacgcgctcaccggcgcagggatctgcatgtaaggaccttggtcgcaatggccaagatcgggccatcacgcccaaggccacttacactcgatccctaagcgcgccggttcgcgctcaatcataacgcgctcaccggcgcagaagtctgcgtgtaagaacctcagtcgcaatggccaaagtgcggccatcacgcctgaggctgcttacactccgacttctaagcgcgccggttcgcgctcactttatttagggggttgtctttgtggcgaatgaacatcttgagaagctttatcatgttttggatgaaagcaccacgattttgcatcagcagttgaaatctactgatattgcggcaattactgaagctggcgaagatctttcttctggtgaagtgatgcaagaagatgggttgcctaatgatgaagctaagaagaaactggaagctttgtttggtcaggtgaagttggcaacatatgaaccggaagaaatacggcaggctttgcagctggtactggttaaagccatcaaagttgatggcattgaacccaataaacagatcacaccggatgccatggccagtcttgcaacctttatggcgaccgtttttgatcagcagcaaccgaaccaactcaaagtggcggacttggcagttggaagcgggaacttgttgtttgcagtgatgaatcaactacacaaagcacgtaacgttacggtaaaaggttacggtgttgataatgacgaggccttgttggcggttgccgggatgagcagtagcttacaacacctggacgttgaactgtttcatcaagatgcactggatgggcttttatttaaggatattgatgtggtggtctccgatttgccggtggggtattaccctgtagatgaacgggcaaagaaatttgcgactgcagccaaaaagggtcattcatatgcgcatcatttgctcattgaacaaagcatgaaagtattgaaaccaggcggattggggatgttttatgtaccaagtcgggtctttcagtccgaagaagctgccggtttaaccgcatggctggcggaaaaaacttacttccaaggcttgcttaatttgccagatgatttttttgccgataagcaagcagaaaagagcctgctgattcttcaaaagccaagtcaggacgtgaagcgcgctaaacaagtcttactcggtcagttcccgaacttgaatgatcgtgaggcattcgccgccttcattgcaaaggttaaagactgggctgccgccaatattgcacaatagggcgcggcggcttgtctgtgaagactatgcggaattgcgtcaggttccggcgatacaatgtggcgagtgggatcatcgctaagctggctcttaaagggaaaaatcaatcctgcctattgctgattgttagaaatgaatcgttagacgtcagaaaactggcgtctatttttgactcaaaataagctaccgagacgattcttcaaagggcattttctgctttttggggaacaatcaggtagaatagatagttataaacaggaggttggttatgtcgttattgagtattgcttacgtactcattgccattgttgctgtcggcgtcacgatttttgacattgtgcaggtacggatacgagcgcgtccgaaagcatggcgtattcttttatatctggcagttgcggcgtttagtctggtgttaaccttgcaacaaagccgttcctttgacgacttgatcagcggcgggttcattgttgtcatgtttctttgttttgcaagctggcaaaaaggtttagctgatcccgctatcattggtggtttgggtagtattcgcatgtatcagaatctgaccggggttgtcttacaagctcagcctaaaggaacggttttgttggcacaggcgggaaatctgacggtgttaaaattgcagtttcgtcaggatccgccgaccattaacgcatttttagctgacaagatgccgcctgaccgcattagtattgacgattaggtgtgaatgatttggggttttctgaaaatggtgtataatttttctaataccgcatgctattattcagacggcaacaactattttggccgtctctattaataagtgtgacacaaggatagtcagacaatgattagttttaagcttggttcgcgccgttgaaacaagatgaaaaataagtttcaagactgttttatgcttttaaaggaggatgagtatgcaagccgaaaaagatgatcggcctgaactagcacgtcatttgaagagtcgccatgttcaactgattgcaataggcggcacgattgggactggcttgtttttgggctctggtcaatcgattcactcggcaggaccgtccattttatttgcttatttaataactggtggcatttgctttttgctaatgcgcgcattaggcgagttgttgatgtctgatgtggattcacatacttttattgatttcatcacaaaatacttgggtaaggatgccggatgggtgactggctggacttactggatatgctgggtagcacttgcgatggctgaagtgacggcgattggattatatattcggttctggttgcctgatgtgccgcagtggctacccggtttaattgctttagcgatcttgttgttgttgaatctggtcagtgtcggattgttcggagaagccgaattctggtttgccttgattaaaattgtggccatcattggactcattgttttgggcatcttcatggtaattgttcgctttaaaacgccacttggtcatgccagtcttgacaatcttgttaacgatggcggctttttccctaaaggcgttggcggttttctcatgtcgctgcagatggttgtgtttagttttgtcggcattgaaatggtcggcttgactgctagtgagaccaaaaatccgcataaggtgattccggaagcgatcaatgaaattccaatgcggattttgctgttttatgtgggggccttgtttgtcatcatgtgtatttatccatggcggcatgtctccccggttaacagcccgtttgttgaagtctttaataatgtggggattccgtttgcggccgatattattaactttgtggtattaaccgcggcggcctcggcttgtaattcatctatttttagcacagggcggttattattttcgctaacgttgaacggaaaaagtcaatcagcgcagtggactgccaaactttcacgacgccaggtgccagcccgggcgattctagtctcaaccggtgtcattgccgtagcggttgtcttgaacctttttctccccggctcggttttcacgctggtttcaagtatggcaacgatcagttttctgtttgtttggggcatgatcatgttggcacatttgcggtacaagaagttgcatccccacagtaccgactttcggatgcccttgtacccatttgccgattatctcgtgctgggttttctgctattaaccgcagtgatcatgatgtttgatcgcgcaatgttatcggcgctgatcttcgcaattgtgtggattgccacactctttatattgcggaggctgcggcgagcggaaaaagcggcataacgcacattgtcgacaggaagaggggctttgcgtggtaaaagttgtgacttatcagcgactaaccgatgatattgtgactgcccctaatcaaaaagatcggcttcctgctaattactgttggaagccgacgttgggttttcgcttcaaggccgatctggtttatgccggtgcgtggctgtttgctcaggggtattgccgcatcggggtgcaggtgcgtcatcgcagcgttttacgccaggcagccggtcgcggttactttgtttatggcaaccacacgcagccatttggggatgtttttacgccgatgcgcgttaatcaggcgcgacgggtggcgacattagcggcaccggcaaatttgagtgtcccgattcttggacggttggttccatacggcggtggtctattagtccccaaacagttgcaccaactacgcgcctttaatactgaaatcaaacggttaattgcggccaaacaagttgtgatgatctatccggaggctcacgtttggccatattataccggtatccgcccgtttgagtccggtgcatttcattatccggctgaactaaatgcacccgtatttgtcaccaccatgacttatcaacggcgacactggtggcctcggcctaaacgcattttgtatgtcgatggtccttattggccggatcagcagctgccattaaaaatgcgccaaaaacagttagcaaccacagtccggaccgtaatgaagaagcgagctaaattgagcaacgttgcctatattcactatcagcagcaaaaggaggcgcaaccgtgaccatgaatattttattttgcggtgatgccaacatgaccgatggtgttttgcttgcaaccttatccttgatgcggcaaacgcgtgagccgctgcatatctttgttttgaccgcgacactgacagttaacgatcatcgttataagccgtttccagttgcgaccgccgcgcaaatgaccaagttgatgcaaaaagaaaacccagtgcatcagttcacgcgaattgatataacgaatttgtttgaggcaaatccgccgcgcgctaatctaacaacgatgtttacgccttattgtatgttacggttgtatgccgatttggtgccacagttaccggatcgcatgctttatctggacaccgatgtcatttgtcggcggccatttgctgcgttttaccatgagtccatgactggtgttgatattgccggcgcgttggaccactatggcaaatggtggtttcatcaccggttgatgtggtttgattatctcaattccggcgttttgctgatgaatcttgctagaattcgcgcagatggtttattagcgcgctgtcgtcagttgttacagcagcggtggctgtttatgccggatcagagtgccttaaataagctggccaagtgtaaacggattctgccgccaaaatacaatgagcagcataagcttgagccggatacggtttttcagcactttacgacatcgtttcgcttttggccgcgttttcgcattgtgacggtcaagccgtggcagattcatgccgttcatcagcagctaggattgcatgaatatgatgatttgctgaaagactatcgccggctagcacctaaattgaaagaagtgtcctaaatgccaactccaactacggttccaattttcttttccgtcgatgatggctacgtcccttgtctggccgttgctttgacttcgattcgggcaaataaaaatccacgcgttaattttgaaatcaatattcttaataatggcttattacccgccaatcaaaagcggttggctgctttagggacatccaattttgacattcgctttatcgcgatggataaggtcacgcgacaaatcagtggtgatacaaacaaactgcgcggtgattacgtgaccatgaccatttattttcgtttgtttatcgcggatatgtttccacagtatgacaaagcgatttatattgatgcggatacggtggcagaagacgacttgaccactttgtttgcaacggatttaggtgataacctagttgccggtgtggctgatccggtaatgatgacttatccggaaaccatgacttacattcaacgcgatttcggcattcagccaggtaagtatattaattccggtgttttggtgatgaatcttgcgcagatgcgtcaggagcatttttccgatcggttcttgcacttgttgaagacttaccactttacgatgattgctgccgaccaggattatatcaatgtcatcgcacaacatcgcatcaaatatttaccgaaactctggaatatgcaaaccggagtccctgcggctgcagaagctggtggaaagttgattcactataatttgtttggcaagccttggcattatcatcatgctaaattaggcgatcgcttttggcggtatgcaccggattcgggatttgaggcggaactgaagcagcagttggcagcatttacgttggcggatcagcaggctgatcggcaaagtatgagtgggatgttgcagacggctattgatgtttgccacacggagaatacaattttgaatgccgttaaacatggcgagcaggtggcgctatgaaatcgggccggtttgtcggtccggatcgcgcggaagttgttggcaatattcggcgtgcggtggcggctaaagcgtttaatattaaagttgaagaacatgatccggtgttttccaagtcggaggagcagcggattgtgacacattacttacaacagcgtcaggacaagctgtttaagctcaagacactggtttgtcgcttggtcgttaatgcctatgcgttacaggtgaccaaagatgttgaagtagtcggggtcgataaaattcggggcatcaaaagtggcggtgtgattacaagcaatcatttcagcccatttgaaaatatggccgtgcgtaaagccgtgcatctggcaggacggcaccgcatgtatattgtcagtcaggatacaaacttggcaatgaaagggctgctaggctttgtgatgaactatgatgatacgattccgctgtccggacgccccagtttcttaaatggtccgtttaaacaaatgttaaatgcggcgtttgcgggccatcactgggtgttgatctatcctgaacaggaaatgtggttcaattatcgtaaaccacgaccacctaagcgcggcgcttatttctatgctgccgaggcgggcgttccgattatctcctgttttacggaaattcgtgatctgccagtccgcgagaatcagcaactgcgcgaagtccgttatattttgcatgttcttgatccaatttatccggatccgcagctttcggcgcgcgacaatagtttttacatgatgcagcgtgattatgcccaaaaatgtcaagcgtatgcagccgcttatggcaaaccgttatcctatgcttttacgcagcaggatattgctggttgggatcctgaacggtaagccacagaataagctaaccaaaggcgaacttttctttcgatgggaagttcgtttttattttgccatttggcgcgatctgcttaatgggtcgaaccaagccttaacgaaaacggtatttttgtcacaccgatgctgacggcagaatgccacttatagaaaggtacatcaaaacagtttatatgctataacaaaggtgatatttatcgcggaaaggagaccctaattgatcgatgttactgacgatcatgcttttcatttatataatcaaaagatcagctatatttgtgcgttattgccaaatggtcagttgggccatctctattttggcccaagattatcgttgacgactgctgatttgacctatctatcgcaaggttccagtccgtttgcgtggatggctaacttttccgacgatcagccgtttgcattaggtgatgcgcaacaggagtatccggtttatggaactggcgattttcggcaaggcagtttaagtgtgacccaagcagacgcacccgtgtatccgaattttgtgtttaaagattatcaggtgagtcacaccaaaatgcgggatttgcatcatccaacgagctttggtaatccagccctgaccgatattttgacaattcaccttgaagatgaaacggcgcagttattattaacgctgcagtatacgattttttcggatagtgccacggtcgttcgggtagctactttgacgaaccaaggtgctgagccggttatgattgagcggatgttgagcggggcgctgaatttaccccaaggccgttatgatgttgttcacttgtcaggtaactgggccaaagagcggcatattcagacacagcctttgacgcaaggaacgttttcagtggaatctttgcgcggggcatcgagtcatgaacaaaatccgttcgtcgcattgcacgcagccggacaaccctttgctgttggcgatgcttacggtgcgaacttagtctattcggggaactttctggatagcattgaagttaatgaatgggatcagacgcggcttttggctggcattcatccggcttcttttagctggcgactagatccgaaaaccagttttactacccctgaagtggtcttaagctttagttcagcgggactagctggtttatcccaagtcaatcagcgttttgtggcccggcatattattgacccgcaatggcgccaaaagccgcgtccggttgttttgaacagttgggaagcgacctattttgacttgaatgaacaaaagttgctgcatctggctaaattgggacgtcaggtgggggttgactgttttgttcttgatgatggctggtttggtacccgtgataatgatttaagttcattgggggattggttcacaaataagcataagtttccggatggcttagggcattttgctgaggaaattcatggcctcggccttcagtttggcctgtggtttgaaccggaaatggtatcgcctcgatcgcaatttttcaaggaacatccggattgggtggtccgtcccaagcgcggccgaatgtcgatcacgcgtcatcaatatgttctggactttagtaatccagcggtcgtgaataatatttttgcgcaaatgcaacgcgttattaccgaaaccaagcttgattatgtgaagtgggatctcaatcgcagtattaccgaagcctattcaccctacctggcaaaaattgggcatcctcaaggtgaattcttccatcgctatgtacaaggcgtctataccctctatcaaaagctgctcacggcctttccccacctgctgattgaaggctgtgctggtggtggcgggcgctttgatttggggattctcttttatagtccgcaaatctggaccagtgatgattctgatgcgatcgaacggttggcaattcaatcaggaaccgcactggcttatccgttaagttgtatgagcaatcacgtgacggcgataccgaatgaacaagtcggacgctccacaccgttggctacgcgatttcgtgtggcagcatttggcattctcggctatgaattggatttaaccaaactggatgatgcggcattggcagcaatcaaaaaccaaattgcttattatcatgaattacaaccattagtcttaaatggtgattttcggctgcttttgccacgtcaatccaacagccagaatcaagtagcatggctgctaagcgatcattcccgcaagcgtttagtcttaggcttcttccgcgtccttgccgatgcagacagccgcgccgtgcagtatatgaagataccggttgcccagccaaaccaacgttattgggtaaacggtcacactgggccggtttccggtgatgtcttgcagcgggttggcgttcgcttaccgatccaattcaatggcgctaaccggcaacaagcccaattgatcggtgactatcaatcggccttattgacttttgacggggtgacagcaaccaaaaccggcaagcatcaacctgagactcgcaagcagcagaaggttggacatgcttgagacgttactacgcggctcgggtttagttaatcgcctagtttgaaatttgaacaataacaaaaaaaagctcgttgcaacgggcttttttcatttcatgatatttgattgtcgccattcaacaatttatgatggcgaatggcggcttttcaccagtagtaagatgcctgaagcaagattcatagcgccggcaatgatgctgaggctgccagcaacaattgttatgatactgagtggtaaatggttggcttttttcaagtttgacattcctttctagagttgcggtgggtcatagctggcacaaaaacaatggcgaaggttgatgatttctttctttcgtttaatatccgtattttaacaaatgtaactggttaaaggtgaagtttatttggtcacgttaagtgagattcttatggactgaactcactttgaataggggatttcaacagctaagatcggacactaaacgtacactttttgtgcacttcacttcaaaaacacccctaaacagcacaaaataaaaagccccgaaacgctgatttaacagcatttcgggactaaccagaaacaagaaaaagggtcaaaatggaggtgaggagtctccaactcgattgacctcaaccactgatataacagcattcgtgcggtggccttactccaaatgttacctaaaatgttacccgttccatatattctgctaacttgtcgatgccttctcgagcatctgactgattcatgccagcatatatgcgaagcgtcacatcgggcgtagagtgaccggcaagccgctgtacagttgaaacatcaacaccgctgcgaatcatattcgttacaaaagacttacgcagaccgtgcaatgtgatgcgaggtgaaaggtggtttgcttcaataatatctttcaaccacttgttaggcctgttaatgcctaaacgtttttcaaagtgttgtggagatggaaacagtggccgatcatctctaatgctgataatcttgcttgcatcaagtaatgctatccactttttaagctgtattgtcactttcggggttaatggtattgtgcgcatacccgcggttgacttggtgcctttaattgattccttaccattcagaccagttgcataggctttattgattgagagtgtggacgttttgaaattaacatctgatacgttcagggcgcatagttcttcacgcctgataccggtgctaaccatcagtagaaacattgtgtacttttctggatcgttattaggatcaatgcaagttaggaatcgggcgacttgcttgttatcccagtaaactggtgactttccagatcctaccccgcgtggcaattcgacaccgtctgcggggttcttttcgatgtactgcatcttaacagcaaatgagagtatcttctttaaataaatgaaacgttccttgtatgccttggtggttgtttctcgccactgactgacagcactttgaatgctgccggtttttattgcggtgagagttttggagccaaacatagggatcaagtggttatggaaaagctgctttgtcttataggctgtacttccttccacagtttgaacatagattggccaccactgattatacaaatcactaaaggtctgaaccggtggggtagtgtcgttttcatcatataaaccattagccacgtctagcttgagttttgactctagtagacgtgctttttgcatgctttgaacattgcgaacaatattcttgcgttttccagcaaacagcccagcattgaccgttacgcggtagcgaactgcaccagacttaagctttactttcttaattgccatattcttctcctatccgtcacgctgggcaggcggtgttagattggagagttttcgccgaaaatggcgaaaaggtggagcttgattcattaccagttaagcagttgttaaatctataggaatcatcggaagtgatcccttatgttcaggatcactgaaccagattgcatatgcttcactaacatccttaaagacttcaggggcaagtctatctcgtgcgaaggttgtggctgatatcaatagctggtctcgttccgtgtgtgtcaaagaatcgagatacttttttgattcctctaaagtgtatgtggatgttccagcagtgtcccgatcaaaaaagtgagaaacagaatgaggtgtgagaccagccttaacaactaacgtacttcctttagaagtttctggcagctcaataaagaatgggtgccctctaaaacttgttgttaaaccttcgctcatttgtttggcaattgatatgggaagcagttcaccagaaaaaagcaaagttttgtctattcgttccggtcttgttcctaccgtaatatctaatgagtcattcttaaattgtaagatatcgttaggggtacatgctaagaattggcatattttatcaagtgtttcaaattgaattcccttagaatcgccacgaccaagaacactaagtgtgttcatcgaaatatgagttgcgttggctatatccgttagggtatagccttttttctttgcagtttctcttaaattaattgatatcaatggcagtccctccttataacaatgactatacgccacaaaaaagttactgcaagcagtaattagctattgactttatacagtcaattaggttactgtattcatgtaataaagaaaggggacgaattcaaatggcttcaatgaaagcagaactattgttgtccgaggacttcgataagcaactacaagatcgtattcatcaggaagtgatccaagcggttagtaagcttgcaccacaacatgatgagcctaaaaagctgaacatcggtcaagcagcggtttatgccggtgtggctcgtaacacactgttgtcttggactagaaaaggtttgccgatgcaagtggttggtggcgttaagcggatcaataccgcagacatagacgattacatgaataactacggcaagtaatcacgctgggcaggcggaaaattgtaagcaacttatggcaggcgcataaagccagagaggaaacattatgaatttgtttagtaaagaagagatagcactagatcacgagcttggaaatttgattgacgacattcagcttaacgttcatggcattgcagaagacagtactgtcacggttgatggcaagtatattcccaatagcgagttggccgttacgactgcaaaagagctgctgcgggtatcggaaatcctaaagatgtatgaaaacgaggatgatgccgatgattagcattattacgtggctactaagccacccgctcattgttccggcgctctgtatggctttcatggtcggtagcgtgtttggaacgtatctgcaatttcgagaggatgatgaccatggcacgaatggctagcacaaggctcggctttcagtggcatgactacgtccaagctgatgcagaatgtgatcgatactgggcgtttaaaaaagctgaacgtcgttcactaaatgaagccacaaaaaaatcgccaagagcggcaactcaaggcgagaagaagacaagcgaaaaaatctacatcgacttttagcttgcctcgaattggttactttgtcaaggaaaatggaggcaattatgatgaaaaatgtttcaaacagcaccaaagcgcctgatttagatatggcgtctttgaacctcagcactgcaaaaggacttttagaagcccttagtgatgaattcgacattatggaagactctgtcgtttcatatcaaagcaatcgtaatgaaaaaaatgctgcaatcttggcatacggtacggatcgctcattttatacatggatggcgctactgaaagcaattcaagaatacgttgatagcagcttggcaacgattgacgaggtaaacaaatgatgaaggaagattactatacaaccgcacaggcgcttttaagtgatacaagtgcaatggtgaatatcttgcgacatcagatcaacgatgaacagcaatcagcactggccgacacagtcgctgacatgattattgatgctcgccgtctacttatggagggagatgcggccgatggtagacgtgcttaaagtagcgcttggctatcagcagcatggctttgcagtctatccacttgcgcccgggaccagaacaccactcaaaggctcacacggctataaggacgctaccaaagacccagaacaggccaagaaatggtggggcgaacatcctaactacaatattggcttggggcttgatggcgtgctggtattcgatattgatgtgggtcataaaagcgggaccaatggcagtgatacgttggctaagttgtgtgctgatggtcgtgctggtcaaattccttcgagctatgcggaaatcagcccaaacggtggacttcatattttcttcacctatcccaaagaattgaagctaactagtcgatcggatctgttctctaagaatggcgagaaaaccggccttgactatgttgcgactggtgtaccggttttccctagcattcgcgaaaacggcatttatcaaccacttagaggtcgcaagatcactaaactagccccagtacctcagtggttactagatgaaatccaacgtgtcagccaccctaaccaagtgtttagtggttcaacggtttatcggggcaaacgatggacgggcaagttgctagatgaaatagtaaacggcgctagcaccggcaatcgcaatgattttctgactaagattgctggcaaaatgctcttcacaggtgcagagccgcagacagtttataacttgctgtttacaactaatgataactatctagatacaccactggcagaagccgaagtgaataagatttttaagtcagtattgaaagccgaagagaggaggcgtgctattggttaaagcaatgcccgaagatgcaagaaaactagccagtaatgttgtacagatgaataaaaatgagcctgaatggatattttacgatgaaaatggtaatcgcaaggtatctgctacaaagttaggccaagaaattataaaagaaaatcctatgttacgtctcgatacacttagtcaaggcgcacgttttgacaaagcgactggtacgtggcgcttggataaactaagtgaatttctcgatacgatcattactgagaaactagaaagcgttggaaaatggtcacaagggaaattaagcgaagtaaaacactatgttcttattaaagtctatcatccggaaatgattgaaagtccatttgaacacgctgatcctaatctaatcacattcgccaacggaacttataatcttgttactgatacgctacaaccacatcgaccagaggattacattttgcaaaaccatccttacgacctaaagatgaaatcgggaaatgatctaaagacagttgattggttagcacatttgactggtgatccaatatctgcaaattttctaatggagttcattggctactgtttttaccatcgttactcgccattccaaacactaattatcttacaaggtaccggtcaaaatgggaaaacaacatttatcgaatttgtaaagcaaatacttgacaaacgaaatgtatctaacgttgccttacaagatctggctaataaagataatcgtttcactggaagccagctttatcagaaagaagccaacatgtttgcagatcttgatgacagtttcctaaagaccactggtcaaataaaggcacttacgggagacgatacaatctttgcggagtttaagggtaaagatggtttttcgtttatgaattttgccaagctgattttttcagctaataagttgccaaaattctcagactttaccagtggctttatacgaagattgtacgttgttccttttccgaaaaaaattgataacaatttcaaaaaagagtttgatctcaatcaaatctatgatgagataccagctttcagctatcaatgcttgcgagcgttcaaacgtgcaattgaccgcgacagcttatcaaaatcacccagcatgatagcagctaaagaaaaatggcttaaagattctgacaacattgcaagatttattgaagatcgttgccgaattgaattagatacaaacggtggcgattcatcacgcaatatctacaaagcatatcaagattattgttgggaagaaaatattaaaccattttcacaaccagaatttacaaggcgattagaagcacaaggaattcctagaaagaaagtacagtttaataacacgagaatatcgcgttacttgcatttgtttattgaagacaattaaagccagccaacgagtcgaaaaacaagggccacttgggacacatggctttaaaacgttgatatatcagcaatgacagtcttaatcgcatggacactattgggacacttcagggacacatcgctggacacattggcaagtgtccaaaaaagtgtcccttaagtgtcccagaattggacatatatttagacgtgaaaacgttgatatataaaggatctgggaaaaagtgtcccaagtggcccacctttttccactcgttggcttcaaccatatgaagaagctaaaacgtggagaaatatacggcaatatataacagacaagcaagtttaaaactacccacaaggagaaattgaaatgacaaaaacggcatatcgcaaagcagcacttgtagacgttaaacacgatcgagacaaatgggctgaacttggggcacttgtaaaagaacgctacttagttcgtagcatgacaccaaaagattggttcatcattgttaagcaacgtgaaggctatgaaattgaagtatatccaacgtttgaaatgtcagatggttttcaattctcacacgttaatctattgacacgatcttcatatgaaagcattagccacattgcataacatgaactttgctcctcagcaagtgacactattagttcaattgaccgcatgattgatctcgtcaaggataagagatattaagaacccccaaggccgagatgaaagcgaagtgatgcaaatgagtgtgcctttgcacatttgcatgcaccccgggtgccgtcgcatgatcccgttcaatcaacgcttttgcgaggagcataagcaagataagaacaagcaagcaacgaatcaggaacgcatgcaatatgaagagaaggaattacgtttctacaagtcaacaacatggacaaagctttcaaagtcattcaggttgcgcaatccaacttgtgctagctgtttgaaacgtgggattattcgtcaagctgtacttgttgatcatattgagccaatcaaaacagcttatggttggcaacacaggcttgatgagagcaatttacaaagcttgtgccagacttgtcataacgccaagaccgcccgggaggtagcacaacgccggatgagatcccccgagagatcgacccccgcccgcaaattttagagcgaaagaacggtcggcctcttttcttttcgatgaataccgaaaatcatagaacataggtataataaatgtgttataattataataggtataaacgaatacaaattcagaaaggacgttacacatgggagcacccctaaaatcagtgactaacctaagtgcacatttatccaaaaaacagttagctgatcgtgttgcctctgaaaaagcactgttcacttacaaagaattgcaagtacagccccctacatggcttgatgactatgctgtgaccgagtggcaccgtattgtaccattgctcaaaaaagacattccagtgagtgaactagatgccgccctgattgccagtcattgccaagcctattctgacattcagaaagctgccgagctaattcaaaaacaaggcatgatggttgaaaccaccgatagtgtgaaagctaacccagcagttaaaatgaagctcgatgccacaaatcaaatgatgcgcattgacgaagtattgggattgtcagtgtatagccgggcgaaacttgccttgaagagtgagactaagaagaagcctgacgatccgttcgcggagctggtgtcatcgtgaactatgcgactgaatataccgacaaggtgctaagtggtgagattgttgccggcaaaaagattaagcaagcagcaagacgttatcgcagagacttgaaagccagcaagcgcaaaaagaatccatggccgtattactttgatgaggactttgccaacaaagccgttgagtttatcgaactgatgccggcacgtgatggatcaccactcaagctagaacttttccaaaaatatttgatctcagagcttttcgggtggagagacaaagaaaccggcaatcgtcgttatgatcgagcctacatcagcatggcgcgcaagaatggtaagagcttcctgacggctgatctaggtgcactttatctcctcatggagaacaaaccagccatgaaccgcgaaatcgtctacacagccaatagcaacgctcaagcacatttggcttttgatatgctgtctagtggtttgcgtcaggtctccaagatgtccaaatcggtgcgcgatcgtttgaagatcaatcgcaacgaaattatcgacttgccgagcaacagccgagctgttccgcttgcgtctgatctgcatagcttagatggttatcaaagtgacttggccattattgatgagttcgccttagctcgtactgatgagattctacgaacactaaaatccggccagatcaacagcgacaacagtttactagccgtcatctcgaccacggggccagacctgaatggccctatgtataaagaatataaatttgtctccaaagtcttaaccggtcgcgaacaagcagatcggtattttattgccatttttgaacaggatagcaaggatgaagcctttgtaccagagacttgggagaagtcaaatccactactggctaatactgaaagagcgaagacgatgcgacctagcttgcaagctgatgttgatctagcagccaagcaaggaacgttgcggccaattctcgtcaagaacttcaacatgtggcaatcagccagagcagacagttacatcagtctggacgactgggagaaagccattatcgagccaccagacactatgggcaaggacgtgtatatcgggcttgacctctctaagtctagcgacctgactagcatttcgtggctggttccagaagatggctacctgtatgctgacagccattcattcgtgggaacgaagtacggactggaagaaaagatcaagcgtgacgggttcgattacatcagtggtgctagtcgtggcgaatgtagcattaccaaactggaaagcggcatgatcgactatgacgaggtgctacgcttcattctcgacctgatcgagcggaaccagtggaacgtgcgtgccatctgttacgatccctttgccatgggctacctgattccagaatttgaaaaacgcgatttgccactgcttgaggtgcgacaaggtgttagaacactttcaattccgacaactcgttttcgtgatgatctcttcaatggccagttaaagcaccctgataatcagttactggcctatgcggtgaacaacgctattctgaaatatgacgctaataacaatccaattatcgacaaggcccacaacgctacaaagatcgatcccgtagccgcattgatgaatgcctacacaattgcaatggatcaaaacaaggaaagcgaggtggcagacaatgacttttattcgagcgatgactttagtttttaatgtgcagaccgtgctattactactggggctgatctgtatggttgtcggtatctggtggctgttcgggtttggtgttggcatgatagcagccggcacggccctgatctccatcgcagtcattatcaacttcaacaaagggaggtgaaacaatgagctttttcacgaatgacacaacacaaccacgcgatgacaacagcgaaccgttcttagatgcgcttgtcagcatgaccagtaacgacagcggcctatatgtgggaattggtgctttacgtaattcggatgtgtttacggccgtgcgcgtgattgccagtgatcttgcaactaatccgattgaatacagtgacaagcgcatcagcgtgcttcttaacaaggcacccaatgaccacatgaccgcgtgggcattcaagtttgccctagctgctaacatgctgctgaatggtaacagctttgcacgggttactaagaatcccagcggacaagttactggcttcgagttggtccctaacagccagatggtggttaaacaagacgatacgaccggcattatcagctacgaatacacgcctgacagcggtcgctcacagcgtttaaatgccagcgaggtcttacacttcaagtgcttcacacaagacggttacaaaggaatatcgccactttatagcctccatgatgaggttggggtacaaaagtctgggcatgcgttgctgaagggattctttaacaccggtattcaagggacaggcattcttaaagtcaacaagacccagctagacagtaaggccaaagaaaacatccggaataaatttgaagctgccaatagtggtgataatgccctaaagaccatcattctggacaatgatatggattacaagcaactcgaagttaatactgacgtgctgaatctagtcaattctagcgattggaccacgaagcagattgccaaagcgttcgggttaccactggatcggctgggtatcgaaagcgagcactcaaatgccgtacagtctaacgtgatgtacttgcaaaacacgctgattcagtattttacctgcttcacaagtgagatggatgccaaactgtccacaggtgacaaccggtacagcttcaacactgacaagctgttttcagcggacccagccacgatgcaagaactagcagttaaggggctacaaggcggtgttctgaccactaatgaagcacgagccaagttaaacctgccgccaattaccggtggagatgagattatggccagtctgaactacacgccactaagcaacctgacaaactatcaaaacacaagacaaaggagtgatccagaaaatgaatcaagatgacgtagaaaaacgtctgaatcctaacgctggtctaactgccaaagcagacgacagcaaaggccaagacgatccagacacacaacaacagaaagacaccactagcagtccaaagaaactaagtggttatgcagtagttttcaatagcccaagtaaagacctcggtggctttaaagaagttgttgatccgcacgccttcgatgatgtggacttatcagacgtctatatggtttcaaaccatgattttagccaagtcttagccagcaccaaggccggcaccttgaccttaaatgtggatgataaaggcttgcagtttgaagcaaccttacccgatacgaccacagccaacgatgcctataacaacgtccaagctggtaatctgtcagccatgagttttactttcaatgctgcgccagacggtgacacgttcactaaggacgacagcgggcaagtgatccgtaccatcaagcaagtaaagagcttgtttgacgtctcactggtagctattccagcgtatgacgataccaacgtccaagtggacaaacgcagctacactgagtggcttaaaactaatactgaacaaccagaaaaaggagataaaaccatgaccgaaaaaactattatcgacaacaaagaacataccgaatcccgcgcttacgaagactacatccgcagcatgggtgaacaacgtgacggcataacgacaaccactgctggtgcggtcgtaccaaaagaagtcatcaatgacgtattcgatctaaaagaatctgattacgatctggctaaatatgtcactgtgaagcaagttggaacccccgtcggcacgtacccgattgccctcactaacaatggtgtcttagccacaaaggcagaactcgcagacattccagatatcgattcaaacctattccgtggcgttgactacaaagttgctacccgtgctggcaagatttatctgtctaatgaactggtagaagacagtgaagttgatattgttgccgaggttaagaatcaactcaagaagctggtacaaaacacggacaatagcaacattatcagtgttctgactggcaagacgggaaccaacgataacttcaagcacatcacaggtactggtctcgatgacctcaagaaaaccttcaatattgagctagacccagcattgtccttgtctgttattgtcaatcaggacgctttcaactaccttgataccctgaaagacagcgaaggccgctacttgttacaaccgtccatcacggcaccatcaggcaagcaactatttggggcgccggtgatcgtgattgctaacaaagtattgccgactgataaggcgggcacctatcggatcatcatcggggactttgctcaagcaattttcttagcccaaaagaacgaagtcaacacccagtgggaacggttcgacagttatagccaaggcttggctgttgtcatccgcaacgactatgaagtggttgatccagacgctgctcgaattgttgacattacaccggtagcagccacgccagcagcataatttagtgggggtgtgccttagggtacgcccctatttttatataggagatgaacacatgagtgttaccacagaagatttaaagagagcactgcgcattagccacaacgaagatgatgctatgttgtcagcctacttgttgacggcaaagcagttcgtgattagcgcggttgaccagacccttacggatgaaaactttggagatgatcctcgttttgactttgctgtctcgttgttagcacaacactggtatattaaccgtggtgtcgatggggcaacgtatgtaccagatagcgttgtgagcatgattcagcaattgcggggtgttgactatgccactggtaaatagcatcagccaactaaatgaacccattactttagtgagctacacgatgggtaatgtaaatggggttcctgtgagcagcgtcaggaaagagcacttcacgacatgggcacttgtgttaagccaatatttaagcgaagtgaaggcgtcagttgggacgaagctcgaagatacggtgacctttgttattcggtatgatcagccagaaactatccttaactcatggtgcattgaatggcagggaaagcagtacgacatcgtgaaactgacaccggacacagccaaaaaaaaatggacaacgatcatagggaaaccagttgccaataaataagtattaacttataattaggatagtcctaggcgataagcgggcagaaccgttttaactgacgcacggcatagctaaccggtggcgcattttatagaccaagtcagattgatttctcgtagcaagtgaaggacattcctcaaccctcgctgatacgatagtcatagttttccttgacttgtttcatttttttcatctaaagtagcaatatcattgggcaaagcgggcagagatgcccgtttttttgtgtgctgatagacgtattctaatgcaagctgaacaatagtaacttgaggaatggttgtcgcgaactacgataaccatgtaaaaagggggtcatcaatttggtggcccctttgaatttatctcgaacatatttgttgactgcgttcgctggcttgaccttaggtaccgatttggtacttcaaatgtttgggcgtgtatctgtaaatacacagctcgttgttgtgctgagagacgcgttctggtgcaagctgaacaagtataacttgagtatggtcgttctggcaatataaatgggggtcgcaaaacacgaccccctctgatattcaatgattgctcgataatattgaagcaactaacaggccccgaatttcgtgtcttgctatccaagtcaaaaatattgacctgcttatgggaagcaagtgacaaatagtcacctagtcaacctagtcaatggatacaaaaatagccacctcatagcgaagtggctattttgtgttagtcatgtagcttttcttgtagtttatctccagcattatcaatgcccttagctgcgaagactgtacctgcaactaaaacaccgccaacgattagagtactagcaaccataaacttaaatgcagcttttaaagcgtccataaagttgtcctcctatcagtctttggatctgccaacaaagaaggagactacggcaacaacaataattgccccgataattgatggaatcaaagccattcctgccagttgtggcccccaatggcctaaaagcccttcaccaatagcagaacctactaaccctgcgatgatattagcaaaccagcccatcgattttcctttgctagtgatagcaccagcaattgcaccaataatagcaccaacaattaaagcccaaagaaaatgcataataattcctccttcaattaaattgaatatctattgcacaatttaattatagacacacaaccattagaatgtaaaataatcagccttagcagcttaggattacgtatgcaatcatttgctgttttgaagcaagtcacgtatttgtgtaagcagcagctcttcttttgatactgtgggaacatcgctcttctttgcgggcataattcgattgacggctttgacaagaaggaagacaacaaatgcaactatcaagaagttaatgacatcgttcaagaagttaccgtacttgaacttggcattaaatagcgtaaaatacagaccacttaaatcagtctttcctgcaaacattgaaataattggatttattaagttcttagtcagtgaagttaccacagaagtaaaagcgcccccaacaataacaccaacggctaagtcaagaacattgcctcgcataataaagtcccgaaattccttaatcatattgttcgcctccaaaatttatgtaacgcaccatagtatagcagacgatagaattttctgaaagcgaaaaaatagccgtccataatggacgaccaccgcctgcctagcagattaaaatgttacctaaatgttacctgatgttaccaactaatgataatcagcgactatctgccaaacataaaatgctgttacatcggcattttgaacaccgatgaaagctaatgataatgataagtggaggtgaggagaatcgaactcctgtccatcacccctgctacatgcggctctacacccatagccgatttatttaaaattcgctgcgatgtcgcgccaaccgacaaggctaacacaaggcagctaacctactagtctcttgttgatgcctcaggtggcaacatcaaccgtagctcaatgatttgagacccagacccgacccttgagcgaagtcggaaggatcacgctagctggttattaagcagctaaagcgtaagaattttcgttctttgcagttatattaactgttccgttgatgacggagccgagcctccgaggtgcaccgcatgcgcgaaaagcaatgtcgagaccattacacccccaagaaggtgcaaatgatatattaccacggtataattaaacttgtcaaaacatttgcagttatcattgtactgacgcacacttaggttttaagctatttttatgggggcatgtctatgatcttacttgttgcaggatgcatgcaattactaatgggcatccttcttgctatttttcgaccgcgtcatcaaaccggcctgtggggctacacatcgtatctcgccagtgtcaacgctgatagttttcggttggcacaaaggtggttttatcaggcgttaattgccacaggcgccgttgaaggacttgctggctgggcaattcaccggttagcgtgggataactattttattatctggctttttctggctgttttgttattcttgcccggttttgtttataccgaaagtcgactgaagcattatctggaggcacacgatgcgctgccgtatgattatgttgcgccggatgatgcgccaaggcctaaacgccgtaaaggttttaaagatctgtgaaatgagggattcagcagtgaaactattaatgattgaagataatacaagtgtggccgaaatgatggccatgttcttccaaaaagaaaaatgggaagttgtcaacgcctatgatggtgaagaaggactggcgaaattcaaagaggcacctgacagctttgatatcattacgcttgatctgaatctgccgaaaatggacgggatgcaggtggctaaggaaattcggcaaattagcgaaacagtgccgctaattatgctaactgcgcgtgataccgaaagtgatcaggttttggggttagagctcggcgctgatgattatgtcaccaagccgttttcgccgattacattaattgcgcggattaaggctttgcatcggcgcgccgaggttggagccgaagctggcgcggaacaagcaacgccggaaactaaagcagacgggtttgatgttgaaaccgatcactttaaactcagcacaaagactagggaagcctatttgaacggcaaacagatcgaagggttaacgcccaaagaatttgatttgttgcataccttgtccaagagtcccaaacaggttttctcacgcgaacagctgctgcagctggtctgggactatgaatactatggcgatgaacgaaccgttgatgcgcatatcaaaaaattacgtcaaaaaattgaaaaagtcggtccacaaatcattcaaacagtctggggcgttgggtataagtttgatgattcggggcttgatcaatgaaaatgctttatcaacagctaatcggttttttttcggtcatcatggtgacgctggtgatcgtgtcgattctgtttattcgctcaaccaccaatacggtttgggaaaatgggttcaaacaacttgaacagtatacggatgttttgaaaaataacgcggttgacgaaaatacgtatgtcatcaatgcgcggtttattcagaatgccgaagaaattttgagtgatcagcatgttcattttgttatttatgatgcgaataacgttgcaaaatatcccgtttcgcaaaagggtcggatgactgcgattaaagcgagttattggaaaaagttgaagcagggatcagcagtggcagtgccggaaatgatgacgaatccgattagcggtagcgcacaaagcatgacgatttattatcagccggttttcttaagtgaaaaactgttatttgtcattgctgcatttgcgccggtagagcagatccaaagttcgattaacaaaaccgaacacaatttgttgatcgcatttgtgctatcaacattagcagctttcatcattagttacttcattgcttcttatcaggttcgtcgcattaatcagttacgtcaggcgacgcatcaggttgcggaaggtaattatgacgtgaccgttaaaatgaaaagccgcagccatgatgaagtggccgaattagcggatgattttcgcgatatggtgaactcgttaaaagcaagccaacaggaaatccaacggcaagaagatcgccggcgtcagttcatggcggatgcagcacatgaaatgcgtaccccgctgacaacgattaatggcttgttggaagggttggcttacgatgcgatccctgaagaaagcaaagggaaaagtatcgaattgatgcgcaatgaaacgaatcggctgattagattggtcaatgaaaaccttgattacgaaaagattcgcaccaatcagattcttttaagcaagcacacgtttaatgcccgtaaagatcttgacaacattaccgagcagctaacgcaaaaggccgaagaagcaggcgataccattacgattaaagcgccagcccaattaccgacctacgctgaccatgatcgttttgtccagattctgtttaacattgtccaaaatgcggttcaattcaccaaaaacgggcagattacgattggcggtaaattagggtatcaccaaaccgaatttaccgtcagtgataccggtatcggcatgtccaaagatcaaatgaagaatatctgggaacgctattacaaagccgacccatcacgcaaaaatacgaaatacggcgaatccggacttggtatggccattgttcatcaattaatgggcttacatggcggaacaattgaggtggattccaagttgggttcaggaacgaccttcaccttaatcttcccggatgaggcgacggcacctaaacaaaagcagccgggaacaaaatcatcgtcaagcacaacgtcatcgacagccggtgcgtccaaagaaactgacgctgcatcaaacgaccatcccaagtccgagtaacagtagcttttctggacgtgcgggtggatagtgaagcgtcagacatgatttttgataggtaaaagcaaatcacatttattgggcgccgatccccaaacgcccctcaagcagtgtgaagcaaacaaataagcactaaaaaggagacccttatgaccatccgacgaatacagcagagtgattttgctgatgtagacgcattattgcataccgcatttagcgccagtaagcgcggctatcatgacgaagcagcgctcgtagcagaattgaggcgaaccactgattatgaagcggctttagaagtcgttgccatgattgatggacatttagtcggctatgggctcatgacggcggcaacgattacgccggatgcgcatatgaacggagtagcactttggccgttagcagtcgcaccggcgtatcaagggagcggtttaggcacggccattgtctctgagcttgatatgcgggcaaccgatctacgccgcgattttgtcagtgcgattggtgatcgtcaattcttcggccggttcggatttcgtaaagcagccgcctacaaacttgaaccgccattttcgattgttgccgaagatcatctcattaaggaactcgtgcccggtgttctagccagtgtgcacgggaaagtcaattatgcacgcccatttcttgccaaaatgccaaactagacaaattaattgaatccgttgataagttgcaggttactctgcagcttattttgctggtcgttgccttcaaacattacttttctttgtggtgggctgattgatgtgccttatgtaaggtgccgatacacaggccgccactgaccaaagcaccgcccattagtgtgttgtcagtgacatgtggccaatattctacaaagatgacgaaaccaatgataatgactgctgtcaatagttgccatgacagatgatagggttgccgtgccttcatttaaaagccttcttttttgggtcttaactaactgattgcgtttcgaaactagcaggtgtggagccctgacgcgtggaaattttccaacctctacacgcaggtttctacgcccgtcaaaatcatcatattttcttaataaaaagtcaccatcagcctactgcaaaaatccttgagtttaaagcccttacctgtgagttgctgtgatgatcgttgcatatgtgtccatttaacgattgattcggttgatgattcatggcctggcgaaatcttttaaacgacagggtttattaggtatcacaacatgtcaagtcggttacagtttaacgattactttgcagaagtgacaatgactgttacaatatgaacatattcaaacggctatcaggtagttcgtaaggtgtggtggctgtcaattattttggggggattttgcgtgaagcagttttatattgttgacagttcaattcttccagatgtggttggcaaagtgattgccgcacgaaccttactccaaaatggtgaagttaaacaggtcagcgaggcggttaagcaagttggcatttctcgcggcacctattacaagtacaaagattatgttttcctgcctgatcatgaaatggcatcgcgaaaggcggtcatttcattaatgctccatcacgatcgcggtattttgtcagaagttttgacggtcatatcgcatgcacaggccagcatcgtgacgattaaccagaatattccaatccataattgggctagtgttgtgatctcatttgatatttcggcactgcaagggaccattgatgatttagtaaccaaacttggcgatattcgcggcgtcagtgatgttcatctgatttcggtagaataagcggcatgtttttttggaggctttatgaaaatcgcatttaaattattgctctgggtgttagtagccggagttgctttatttccggcgctattattgattttgtttgtcattggcctgagcgttgttatttcgggtgctttggcagtcagtgccgttggttttgtaatgggcactatttttgttgcattggtagggttgggcattatgattccaagtgtcttgctcattattcgatttatgactttccggacagttaatgcccgatttcagcgcggcggtgaacgcttagtccttccggtgagggttcatttaactgggcgcgcgatctaccatgctatttatgaaaattacaaagctgggcgtcgtcagggaaaacatgtttttcaagcgtggagttttggtttagagacgtattttcatgaagatcttcaagcgtatctggcagaccagattctcgcgcaacacggtccggagatggcagaggcttttgtcttagataaacgtcattcatataccattgcttattaacaaataatcgaaggtaagttcaccgttttgggatgttctcgaaaccggaaatagcatgtttaaaaaattggccttagcgtttaacaatttcagttgcgctaaggtcttttttcagctaatgggttcagtaaaacgaagcactaaaccttggcaccgttaccaatcggcatgataaaaagtgtcggatcgcttaattgggccacgtttcgtctgcacgtgggcgtcgttgaatgagccgattggttcgcggccagcgcagttcctcgaaaccgatgaattcaatggttaggcgggtctgttgccgcagtaagccgataaaaagctctaattgcgccagatcatagttgtgcaggctgtgcaaggggatggaacgcaggcgttgatcttttggttggatgttaaaaaagaagttaaatgccggcgtgtaggtctggttgacaagtgaaatccagtaccgtgttttccggcgccgtttaaataacggggtcaatcgttccatgataatcttgagatcgttagtcatagctattgccaccattatggcctcctacaagtgatgcgcgctgaatggcggtaccgccgtgcatggcgcttttggcgtagacgagtgctttaaagccgaatcgattgcggatcgcatcaagcgttcgttccaggtttgttgccttgatttgctgatcgatcggttcaaaaaaattgagttgttcgccggtgtccggggccaagcgggaggtgtagactgctacattacgaacgacttcgccatgccagttatcgcgaaaaatttcgcgtaaagtcgtcacgatatctgagtcgcgattcgttggcagcattcgtttagcttgtgaaaacccagtgcgaccgtctgcttggctctcagcgtatgaaaagccaattccaagtgtgatttcaccggcccgtttgcggtgatgacgcaagcgggcggccacttgttcgccgatttccttaatcacaatttcgatttcgaactgattacgataatcgcgtggcagcacttgagaattaccgatacttggctggcgcgtgacgatccgctgactaatcttggtgcgatcaatgccccatgcggtcgcaaaaagctgcgtgccaagaatgcccagctcttgttttaaggcgtacggattggcgtgagcaagttcatacatacttgtgatgcccattcgtgctagatgtgcggcggtacggtgaccgatgctccagacatccgtcatattcttgattcgccagatagtttcaggcaccgttgcatatgtaatttcgccgagtaaatcggaattgtgcttggcgtatacatccagtgctatcttggcctggactggattctcacccataccgacagtggtgcgtaaaccgagctgttggtgaaccgttgcctgaattaacttggcaacggcgcgtggtgtcttgccaaaaagtcgccaagtatgggttaaatcgagaatggattcgtcaatcgagtatggccataaatcttcatcggcaacgaactgacgaaaaatgtcattgatagccagattcttcttaatgtaaaggttcatacgcgggggcacgacaattaaatgtggttcattaggtaaatcgcgttgccggctgacgttactcttgagaccatacatttttttggccattggcgatgtggctaaaattaaaccgccgttcgtattttcctgttcggacatcaccacgaggacggttttgagtggatcaagtccacgctcgatgctttcaaccgatgcatagaaggacttgttgtcgatcaaaaaaatgacgcgatgcggttcatgcgaatagtcatagcgcatatcaatcacctctgtggctattatacgaacgtatgtttgcaaaggcaagttattttctgcttacgttgacaatgcgcaaataaaaaatccacgctgcctgaaaaaagacaccgtggatcaaaagtttatcggttgaaactattaactgactaacgcatgcagccacccatatgccaggatgaagcccaagatgtaaaaccgtgcatcatggtatcaggggcaatggctgtccagccgtgggtaacgaatgctaaaacgaataaggcggtaaagattgctgcgataacactcaaagtaacgattaaaggccgccatttttccgataacatcatacttcgcctcctgctattgaatgttaacttctgccattagtatagcaccatgaacttaatagccaagttaagctgcaggcaacaccgtcgttcagcatgatcgaaacgtgaatcaatcacgctcccatttgatcttgaggttggtttcgattaagtcgccatcatcgagtgcaaatggttcaaccacgctggtgccatctggtttcgtgaatttgatgtttaaaatattatcatcgcggtaaaccacctcccaagtaccgttgcttggggtgttgttgttagttgctgtgtatgtgccatcgctattgaaattgaacgttgcccgatcgccggattcccaccggccaacaatgccgctggttgagtgattatcgttgcgttttgaagtgtcagatgggtaggtgcggttggttttggtcacgccattgtcgtcatagtcatcatcatcgtcgtcatcagtgtcacgacgaagcctgatgatgacgaggcggtgttggacgaggcagctgctgcgtctaaagtgagtgcagcggcttggcctttcaggggaacgatcacgtcacgggtgaaatctttagtagcaccgtcatgcgtgccgctgagtttaagggtatagcggcccggaagttgattgttgatcgtgtattgaccattatgattggcagcttgcaccggcgtatgattcagcgttaacgctgcgtttttaaggttagtcttcacggttaccgcggtggttccaagcttgactttatacttcgggaaaaacagcatttcctgacctcgcttgaccacctgtaccatgccgctggtggacttagcccgaatcatggtatttaaaaggctgcgataatggcgatcctcaatgagttgggccagtggtttgaggtcatcttcatgcaaaggcgttccatcgctggcaacggcaacttccgccatatcatcagcatcgccgcttgtcatttcttcggcaagctcggcaacttgccggtcttgactataataggcggcgccggctaaataggcacaaccggctattaagatgacgacaatgccgacaatccatggccagcgccgatgtgagtgcggcgtatgtcgggttggcgctggggctgctgcagttgttgatgcaggggtcgttggcggttgcggcgtggacgcttcgttttcgcttgtttgctgcgcttgcaggcgggctgaccgtaaatcaaagccgcagtttgggcaaaagtcatcgtccggtttaatcggttgcccacagttagggcagaatcttaacggtgtttgcatgtatcattcctccaaagttttaatgagttgagcagcaatttgatcatggccgcgttgattagggtggaacgtatcccgggggccattggcagtgaaatccggaatgacagtgccagccggtccggtgacatcatcatgaccttgccagatggttgccaagtcaacgaccggtacctggtaggtttgccccactgctttaacaacggcatcgaatttcaagtcggcattaacgtagggcccttgatttggtgaccaggttgtcatgaggatcagttgtgccgaggtttctttttgcaacgtggtgacaatggttgtcagtgcttgttgataggcagcgagcgcagttggggttgcgccaccgacagcgtcattggtgccaaactcaatagtgatcacatccggatgctgagcaatgagttgcggtaaagcggggacgcccaagttagtagccgtttttcccacttccgcaatgccggcctcggtgacggttttgctggttaatcgggccagctgccgggcaaaaagcgatgtaaaacgagtggcttttttatcggcaaaaaggccaactgaaagactgtcgccaaaaggagcataaactaactgtgttttgcttttggccttcaattgcgccagtcgggtcgggcgcggcggcgttgaagcggcgctggcctgccgactgcgaactggcgcagaggagcggcttgacttagcagcttgccgcgaaaccccacagccagccgctagcaacaatagtaaaacacccaatcccaaccaaatctttttcatcccaatacccttcttgaatcgactgatgacatgctggttataaatggtctttagctaacaaatcgggtattgcgcgctttccaatcttctagcttgataaagacccagaaactgtaaatgccaagcgtgatgatcgatagcagcagccacttaatccaattgccaaataaaccgacagcggaaccgtaaaaatgcatccgatggccttcaatcacggtatggttgatcttccagccatacaacatggtcaacgcccaaggatagcagatgccaaacgtggcgattgtgatcactgtaccaagaatggcccagccaatataagccaataagccgccatcgaaaaaagaatttcgtccatttctcatttccataatcgttgcatcctccaacttctttacttaagtgtatcagagtcatcgggcaacgcaatgaatatgcgctatagtgagcgcgagccgactcctgcgccggggagcgcgttatgggcgtaaaggagaactagtggccttgggcgtggccattgcgaccaaaagccctacttacacgcaagcccttgcgccggagaacgcgttatcgtgattgtctggctcacgcttaacgccaaagtttggtacaataggtcaaggaatttttcacttggcttttctgaaaggacgattcgttaaatggtaatggatgccgcattaaagggtatgaatgataagcaggcagaggcggtgttagccactgaaggaccggttttgattatggcaggggccggttctggcaagacgcgggttttgacccaccgaattgcttatttagttgaagaaaaaaacgttaatccatggaacattcttgccattacgtttacgaacaaggctgcgcgggaaatgcgggaacgggtgggtaaactggtcgatcctgaaattgcccgcgatatttgggtttcaacgttccacgcattgtgtgttcgtattttgcggcgcgacattgacaaactcggttacaatcgggcgtttacgattgctgatccagccgaacaactcactttggttaagcacattttggctgacttcaatctggatcccaagcgttatgatcctaagtcgattcttggcgcgatttcgggtgccaaaaacgaactaatcgacccgcaaacttattcagacgagcaggccaacagcccatttaccaaaactgtggcccaagtttacgcggaatatcaaaaacgcctgcgcagtgatcaggcactggactttgatgatctcatcatgcagaccattgtgttatttgaaaaggatcccgaaacgctcggcttttaccagcgcaaattccggtatattcacgttgatgagtatcaggatacgaacgaagcccaatatcgcctcgtgcatatgctggcggaaggttatcacaatctgtgcgtggtcggggatgccgatcagagtatttacggttggcgcggcgctaatatgcaaaacattctggactttaaaaaggattaccctaaagcccaagtcattttgcttgagcagaattatcgctcaaccaagacaatcctgagtgctgccaatgatgtgattaaaaacaacttgaatcgccaggccaaaacgttatggacggaaaatgccaccggcgacaagatcacgtattatcgggctcaaagcgaaaccgatgaagccatttttgtgattcgccgcattgaagcggaaatggcagaacatcaccgcaagtacggggactttgcgattttatatcggacaaacgcccaatcccgtgcgattgaagaagcgttcgtgaagtccaacattccttataaaatggtgggcggacataaattctatgatcgtaaggaaattcgcgatgccttggcttatttccggttggtcgtcaatccggatgatgatatgagctttaatcggatcgtgaatgaacctaagcgcgggattggcaatacaagtgttgctaaactggaagcctttgctaatcagcatgattggtcactcttggaagcagcggcaaatgctgagcttagtccgatttcaggcaaagcccgcggcaatctagcccaattcggtaaaatgattcaacgacttggtcagcggcggaaagatttgaacgttacggaaatgatgcaggcaattctggatgatagcggttatttagggacgttacgtgccgccaacaccttggaagccgaaacgcgagtggaaaaccttgaagaacttttgtcagtgacccaaggatttgatgcgcgctaccagccagaaaatgaagacagtgatatttttgtcgactttttagctgaattggcgctgttgtctgatcaagatgaagttgaagaagatgcccaggaagtgacgttgatgacgttgcatgcggctaagggactggaatttccagtggtctttctggtgggcatggaagaagggcttttcccgttgagtcgcgcggccatggatgaaggcgagcttgaagaagagcggcgattggcttacgtcgggatcacccgagcaaaacaaaagttatatttgaccaatgcctatgcccggatgttgtatggtcagcgtcaaaataatccggcgagccgttttattgaagaaattgatcctgaattgcttgatatttccggtgctgcccagccgaaaagtgatataccgttcatcaaccgcaccgatcgcgcctttagttcgccttatagccgtcatcctgaaaccaccgggacgccggtaaccgttaaaccggctccaaccactggtgccggtaagacaagctgggaagccggcgataaagtcgaacaccgtaaatggggaatcggtaccgtggtcaaagtaaccggcaccggtgacgatcaggaacttgatatagcctttaaagcgatggggattaaacggttattagctgcgtttgccccgattaaaaaagttgaagcttaacgatgcatgaaaggttgttaaccgcgtagtgaataaggaggttcgccgtgttaagtaaaccagctgctcaatttacacttgaagaagccgaagccgagattgccaagcttcgaaaacagttaaatcaatggcgcttggagtattacaccaaagacgctccaacggtcacagataatgtttatgatgatcattatcgtgacttgcaagcgttagaagccgcttttccaaaactggtgacgcctgattcaccgacgcagcaagttggcgatgtgattaattcggattttgccaaagttcggcacccgattcccatgctgtcaatgggcgatgtcttttcatttgaagaacttagcgaatgggatgcgcggatgcaggctaatgtggggcatgcggttgattacaatgttgaattgaagattgacggccttgctttgtcgcttatttatgaaaatggccgcttagtgcaaggctccacccgtggcgatggtaatatcggcgaagatgtgacgaaaaatgttttaaccattgcttcggtgcctaagactttgaagcggccactatcgcttgaagtgcgcggtgagtgctatatgcctaaagctgcgtttgccaaattaaacgcacgcaaggaggcagatggggacacgccatttgccaacccgcgtaatgctgcggccggttcgttgcgacagctcaaccctaaaatcactgccgggcgtgaattggatacgtttatttacacgttaattgacgccgatcggtttaatgtcaaaacccagcatgaggcgatcgcatttatgcaggatcttgggttcacaaccaatccaagttccgaagtggctagtgatatgcaagcgatcgatgcttatataacgaaatacaccagtgatcgggatgctttgccgtatggaatcgatgggattgtgctaaaggtcaatgacttggctttgcaggcccaactcggaaacaccgtcaaagtaccgcggtgggaaattgcctataagtttcccccggaagaagccaaaacggtgattcacgatatcgtgtggacggtgggtcgaaccggggttgtgacgccgactgcggtgatggatccggttcagttggctgggacaacagtcgcacgggcaacgttgcacaatgccgacatgattcgggataaggatatccgcatcggcgacactgtcatgttgcataaagccggcgatattatcccggaagtttcacgcgtactggttaaaaaacggccagccaataccccaccagcgccgattccggaagaatgtccatcatgcggtcaaaaactggttcaccttgatgatgaagtggcgttacgctgcatcaatccgatgtgcccggcgcaagtacaagaacagttgacccattttgcctcgcgtaatgcaatgaatattgatggattaggtccgaaaatcatcgcgcaactgcaggctaagaagcttgtgacggatgtcgccgatctttatcgacttacggccactgacttggaaaagctggataagttcaaagaaaaatcaattaataatttgttaaatgcgattaataatagtcggcaaaattctgtcgaacgcctaatctttgggttgggcattcgccatgtcggtggcaaagcggcacgtattctggccgagcattttggcagtttggatgagctcatggcagccgaccaagaccaagttgcggcaattccgaatatcgggccaaccattgccgaagcggttgtcacctattttaaaacggatacggtgaagaaattggttgaacaattgcgctctgccggtgttaacctgcgttataccggtccaacccgtccggcagtaagcgatagttttgtttctggcaagaccgtggtgatcaccggcaagtttgccgagttctcccggccggaattgacgaaacgcttagagcagctgggtgcaaaagtaactggctcagtgtcgaagaaaaccgatctcgtcattgccggggatgcagctggtagcaaactgaccaaagcacaggatttgaatgttccaattatggatgagacagcgttgttgacgaacttgaagaattgaggaacttcatcaatgaagaaattttttacgttaaccttactgacaggcgccattgtgctgttggcggcgtgcggcaagctaaatcttgacagcggcagcagtagcaccggtggaaccaaaaccggcagctaccaaacgactggaacggttgataatagtatgtaccaaggcgtgatcaagaatggccgctatcagaccagcagtgcacgtggtttgatgctgcaacaaaacgatcaaggcgaaaatacttttaacatcaagagtatggaaagtggcttggagagtttggccaaagcccaattttcaacggataaatattcgtttgaagaagggcagttattgagcacggcaacagcaagaagttggcttaagcgggaatcaaagagcaatcccgatggcttaaatccggttgataacgggaagaaagatcctgatacccgtaatccgatgtatctacagcagattctggagcaggacttcatggtgcaagacggcaatagcatgaaactaggcgggattgcgattgcgcttggcatgaatcaggtcgattactacaccaagaccgaatatggcgcgcaatatcaaaccgaaatttccgaagcaacgctgaagaaacaaggcgaggccatggcagcaaaagttgtcgcacgactacgcaaaatggaaaaagtgccgagtgatgtaccgattttggtaggtatttacaaaaacgccgaacaagatagtctggttggcggcgtttatgtcgaacacgcgaccagcaagagtggaacggatctcggttcctggaagaaacttaatcagcaaaatgaaattctgccggttgtcagtgaccataaagcgattaacagtacggttgccaatgacttttcgagttttacaaatcaggtaaaaggcttcttcccgaccttagcagggatcacggctcaggcgcattatgaagatggcaatttaagcggcatgaagattaccgttaacactcagttctatggcttgacggaaattcaaagtttcacgcagtacatttcaactgccgccaataagtatttgccatccggtgtgccaattgaaattaccattcaaagtacccaaggcatccaggcatttgtctcgcgaagttctggggacaaaggcttttatacgcatgtatttggaagttattaaaggaaactatggtaaactacgaatgataatgaaaatgaaagcggggatagcatgatttcaaaagacagtgtggcacacgtggccagtctggctaagctgcaattttccgaagccgatttggagaagtataccggtcagctttctgaaattttggatatggttgaacaattggaaagtgtttcaactaaggatgtaccagtcaccacccaaagcattcatcttgagaacgtgatgcgtccggatgttgctaagccgagcgaaccagtcgccgaattgcttaagaacgttccgactaaaaaaggaacctatattcaagtgccggcgatcattgacaaggaggaggactagggcgtggattattttaaaacgaatcttgatcaacttcatgaacagttacgttctggcaagctgaccagtcgccagttggttgatgagacgctggctggtatcgataaaatcgatccggaagtggccgctttccttgccataaatgcggacggtgccaagaagcaggcagccgcaattgacgaagccggtattgccgatgatcagccgttatccggggtgccgatcgcgattaaagataacatcgtgactaaaggcgttgtgacaaccgccgcttcgaaaattctggaaaactttaatcccatttatgatgcaacggtgatgcagaagctggccgctgccggtgcgattaatgtgggtaaaaccaatctggatgaatttgcgatggggtcttcaactgaaaactctgctttcaaaacgactaaaaatgcttgggatcacagccgcgttcccggtggctcttcaggtggatcagcagcggctgtggcggccggtgaagtgattgccgctttgggtagtgacacgggtggttcgattcgccaacctgctgctttcaacggcattgtcggctttaaaccaacttatggccgggtttcccggtgggggctcatcgcgtttagttccagtctggatcagattggcacgttgacgcgcggggttaaagatgccgctcagattctgaatgtgattgccggacatgatgaacgcgacagcaccactgccgatacgccggtaccggacttcacggccaagatcgggcaatcaatcaaaggcatgaagattgcgttgcctaaagaatatttgggtgaaggggtcgaccctgaagtggcagctaaaatcaaagctgcagctaagcaacttgaagctttaggcgcaaccgtgtcagaagtttccttgccacacacccaatatgccgtaccatcttattacatcatcgccagttccgaagccagttccaacttacaacgttttgacgggattcgttacggtttccgtgccaaagatgtccacaacattgaagatgtctatgttcgttcccgttccgaaggctttggacccgaagtaaagcggcggatcatgttaggaaccttcagtttgtctgctggtttttatgacgcctacttcaaaaaagccgggcaggtacgtacgttaatcacccgggattttgaagctgtcttcgaggattatgatttaatcattggaccgaccacgccaactgttgccttcaagattggggaaaaagtcaccgatccggttaccatgtatatgaatgatattttgacgatcccggtcaacttagctggcttaccggctgcctctgttccggctggatttgttgatggtttgcctgtgggcttgcaactgattggcaaacatttcgatgaaagtacgatcttccaagttgccgcagcttttgaagcgcaaaacgactacttagcacagatcccgggaggcaagtaagatgaattttgaaacgacaatcgggcttgaagtccacgttgaattaaaaaccaaatccaaaatgttctcaccagcgccagtcacttacgggcaagagccgaataccgagaccaatgtcattgactggggctttccgggcgttttgccaagcatcaatcgcggtgcgtaccaacttggcatcatggtggccttagcgttgcatgcagacatcacccggcagacgcattttgaccgtaaaaactacttctatccggataaccccaaagcttaccaaattacgcaaagtgaaaaaccacttggcactaacggttgggttgaaattgaagtcgatgggaagaagaaaaaggtcggcatcgcggaactgcacgttgaagaagatgccggcaagaaccagcatgaagacgacggttactcttatgtcgacttaaaccggcaaggcacgccgttggttgaaatcgtctccaagccggatatcacaagcccggaagaagcatacgcctaccttgaaaccctgcgccaaatcgtgcagtttaccggcgcttccgatgtcaagatggaagaaggctccatgcgggtcgacaccaacctatccgttcgcccaattggacaaaagcattttggaacgaaaaccgaaattaaaaatttaaactcctttgttcatgttcgtgatggtttggcatatgaagaaaagcgccagcaagcagttttacttagcggcggtgaagtacgtcaggaaacgcggcgttgggatccggatactaaagagaccattttgatgcgggttaaagaaggcgccgatgactatcgctatttcccggaaccggatttaccgccagttacggtttcccagcagtggattgatgaagtgcaggcaacgttgccacagccaccggcagaacggcgtgagcactacattaaggactggggcattccggcctatgatgctggcgtcttgacgcaaaccaaggaaatgtctgacttcttcgaggccaccgttgcccaaggtgcggacgccaagcaagcgtctaactggttaatgggtgaagtttccggttacctcaatgccaaacacacggagcttggtgacgttgcgctgacaccggaacacttggctggcatgattaaactcattggcgatggcacgatttccagtaaaatggctaagaaggtcttcaaggaaatcattcagcatgacaccgatccggatcagtgggttcacgaaaaagggctgattcagctttccgatccggctaagttgaccccgatcattaccacggtattggacaacaatcagcaaagtatcgatgactttaaagccgggaaagatcgtgcaattggtttcctggttgggcagatcatgaagcaaacccatggtcaggcgaatcctaaagttgtcaatcagattttgatgacagaaatcaaaaagcgttaaaggcatttattgaaaattgtggtacggtattcattgaccacatacgattgcaaccgattgacggcggtccgtggtacaccattgggccgccgtttttcgggtattggtcaggttaaacatgcttagaatgtgatgaccttagaccacgtgaaaagaacccgcaagtcagttggttttggaattggcttgtgcattgaaggagcagagagtcatgagaaaacgggcgcgcttgatttacaacccgacatccgggaacgaaggattaaaacgtttcgttcctgacattttaaacatcatggaacaggcaggctatgaaagctcggcctttcaaacaacgccaaagcctttttccgcgcgtgaagaagcaaagcgggctactgaagccggctttgagctcattgtggcagcaggcggcgatgggacgatcaatgaagttgtcaatgggattgcgccagccaaaaagcggcctaaaatggcgattatccctgccggtacaacgaatgattatgcgcgggcactgcggatttcccgtgatgatccggttgaagcggcacgggttattttaaaagggcaaactttggcgatggacatcggtcaggcaaaccatcattattttatgaacatcgcagcaggtggtttgttaagcgaattgacttattcggtcccatccgaagtcaagtctatttttgggtattttgcttatgtcattaagggcgccgaaatgttgccagcggtccggacgatgccgatgaagcttgaatatgacggtggtgtctatgatgggccggccagcatgttctttcttggtttgaccaattcagttggcggttttgaacaaattgtgccggatgccgagttgggtgacggtaagttctcgctgattattgtcaagactgccaacatggccaatttgttgaaattgatggcgcttgtcttcaacggtggacgccatgttgacgatcccaatattgtctataccaagaccaaaaagttgaaagtcaaaaccagcggccaagacacgcttaagatcaacctggatggcgaatatggcggcgatgcaccgatgacgtttgttaatttaaagcaacatatcgcgatgtatgctaatgtagatgagatcccaaccaagaatttagggacggatgcccagaagcaaagagactacatggcagaagtcgaatcgatctcccaccgcgacattgatggcgatggtcaaatcggcgcacaagatgaaaaggatgactaatttggcccaaccagctgttaccaagaatcaggatctggaagttacgattgaggatctcacttatgaaggcatgggcgttgcgaaagtcgcgggttttccgctatttatcgaagacgcgctacctggcgaaaagatgcaggtacatgtgcttaagacccagaagcaatacggttttgccaaagtggtgaagcgactgaccgactcgcctgatcgcgtggccggcgctgatagtacttacattcgcaccgggattgccccgttgtcgattttggcttatccagcacaattaaaattcaaacaacatcagatccaggaactctataaaaaggcccacttggcgatcaaagtgttgccaacaatcggaatgaagcatccactaggttatcgcaataaagcgcaagtgccagtgcggttggttcgtggcgaacttcagactggtttttataaaaaacacagccatgacttagtgccgattgaggactttctgattcaggatcctaaaatcgatcaggcaatcgttgtggttcgcgacttgttacgtaaatatcaggtgccgccttatgatgaacgtacgaaccgcggcgtgattcgtaatattatggtgcggcgtgggcgggcaacgcaccagatgatgcttgtgttggtggcgcgcacatggcaagtaccgcatctgaatgatattgtcgaagaaatcacgttggctcttccggaggtcaccagtgtggtggttaacctgaatgatcaacgtaccaatgtgattctcgggcgtaagtcaaaaacaatttacggccgtgactatcttttagacaaactattaggtagtgagtttcagatttcgccagtcagtttttatcaggttaatccgattcaaactgaggtgctttatacgaaagccattgaagcagcggggttaaccggtaaggagaccgtgattgatgcgtattctggcatcgggacgatttccttaaccatggcgcggcacgcaaaacaggtttatggcgtcgaagtcgttgaatcagcggtgcgcgatgcaaaggctaatgcagcgcgtaatcacatcaaaaatgtgacgtttgaggttggcaaagcagaagacgtcatgcagaagtggaaggacgcggacctgcccgttgatgtcctaatggtggatccgccgcgcaaaggcttggataaaacctttatcgacgcggtggggtatatgaagccgccaaagatggtctacatctcctgcaatcccgctaccctagcgcgtgacttgcagttgctgacagcgtttggttatacagccaaagaaactcagccggtggatatgtttccgcagacgcagcatattgaaagtattaccgcgttgacgttgggttaaagcatagcgggttaaatctgggttaattgtgagtatgtgccaagtatcgaggttggttctataatttacaactccgaaataaagacgtactatttttgaagtgccccataattgttaggcagatactctaacgattgtggggcacttcaggatggtacgcctatttatattttgcggcttgacggcagaatcatgataaccgcctaaatatttgctcattcaagttgctatgtttggctggtttcgattatgatcagtatcagtgacacgaaatgggggagaatggtgcagcacaagactttggcaatgaagtggttgtttttgggatcactaatcaccaataccggcattagtttgatttggccgttaacaacgatttatatgcatgaatatttgggtgaatcactcacagtggcgggaatcgtcctttttttgaattcaatgtttatggtcattggcaacagtctcgggggctggttgtttgaccattggcaaccgtatggaacggtattggcgggtatttgtctgaatcttggcgcaactggcttattgatctttttccatggctggccggcgtatccgttactactggttatttccggttttggcagtgggattacggccacggcgattaactcttatgccacgcgaattcgcgacaagcgcccaagtgtggtgtttaatattttgtatttcacatcaaatctaggacttgtgatcggcacgctgattgtcggatttgtcttgccttatgggattgctatggtgtttgcattggccgcgctgctatttgcggtctttttagtggtcgcgatctggcattatcgtattgaaaaagaaactccgacagccgccgaacagccagtcgcccacggcagtcgcaatccggcgcgcccacggttgatcatgctgatggtgacgttgtttgtgacgtggttaatgtatgaacagtggcaaagcaatatttccgcctttatgttaagcgaaggccttacagtcaaggactacagctttttgtggacagttaatgcgctgctgattgttttgttccagccggttttgactgcgtttgatcactggttgttgcagcatatccggttgcggttgatcggtggttttgtgttatttgccggttcttttttgattttgctaaatggttccgggcaatatctgacatttattgtcgccatggtggttttgactttaggcgaaattctggcattgccggcagtttcaacttatgtcactttgtttacgccgcttgcacaacaagggcgttatcaaggattgattcaaggttttgcatcagcgggccgggcactggggccactgttaggtgcaatggtgattgaaggtacgcaaagttatcggttgttgtttgtcggtgccaccggtttgattttattagcggtgttgggctttgccttcacggtccgcgaaagtattccggcactgaatgatccgttacacccagcggctcattaaccgccaaatgatgcagattcagttttaggtttcatgcaatagggcacgttcaaaggcacagggaaggggattttttcttgcactatcggttgattctgagtgatattgatggcacactgcttaattcaaaacacgagttgactgtcggcgttaagcaagcaattcagcattatgttgctgcgggcgggacttttgtacttgcttcggcgcgaccgcctttagccatgactgcgctcgcgcaacaaatggggttggcggtgccgcttgtcagtcttaatggtgcggtcattgctcagccaaccgatgataagaagctaaaagtgttggcaacgacgccttggccagcaggaattgcagccaaagtttataccgcattatttagcttaacactgagcttgaatgtgttcagtgacacgcattggtatgtcgctgatacgagtcagtggacccggcaagaagcagcgatcaccggttttgcaccggaaacagttccgattgaaacagggttagcaaacggtctgccagtgcataaacttttatgtatgggggagcctgacgtgatcgatcgtgctgaacaaatcgttttagcccatccggaatggcagttggttgccagtcggtcgaaggcaacttatctggaaattgtccggcaaggagtgtcgaaagaggcggcgttaaaaacgctcagtcatttattcgacattccaatggcggcaacgatggcactcggcgatggtgaaaatgacctgccaatgttgcaagcagccggcctaggggtgaccttggaaaatgctttgcctcaggtgttagatgtcattaaaacagttgtacctgataatgatcatgatggggcagcagtcgccatcaagcagtatgcaatgggtgaaggttaataaaaaagcgagtcgaattcttggtgatggaagtcgacccgctttttattttaaccaaaatagttttatttaaacctaatcttttaagtcaataatcgcctgttccaactcctgcttctgagctgtagagatttccggatattttagcggcaaagcggtgacttcgcggttgatgatttgggacacaaccagtcgggaataccacttatcgtctgacggaatgacgtaccaaggatttgttttggtggcggtgtgctgaatggcctcttgataagcttgctggtaatcatcccaaaagcggcgttcgtgaatatccgccaatgagaacttccaattcttttcgggaatttcgattcgttttaagaagcgatttttttgttcggctttggaaatgtgcaagaagaacttgagcagcaagatgccattgcggtgggcatacgtttctagcgccttgatatcgttgaagcgcctggcccataaatcgtcatggacatcagcaacggtatcgattcccggcaggttttcttttaatagcaactcgggatgaacccggtcgaccagcacttcttcataatgagagcgattgaacaccgtcagttcgccaccagccgggaaagcgttatggatgcgccataaaaagtcatggcctagttcaagctcagttggtatcttaaacgataccactgaggttccctgcggattgacgccggacatgacgtgttcaatcatgctgtctttgccggctgcatccatcccttgaaaaataatcaagacgctgtattgtttctgcgccgccaagtgttgctgaactttagagagcaccttgatgttatgatcaatgtctgctttgatctgctcttttttattttgaaaatgttctggcggcgcggtcgcaaacgcttgaatgttaaaggtgctagtgccgtcaaaacgatatttttccaatgtcatcttatcaccttcgatttatgcttagtttcaacatagtagttacgcctaggatgtgcaagcaattgacgccttggcggattaaatctatgctgagattacgacatgaaaacggaggcaattgcatgacattaccaagaattcaagatgatttgtacctggccgtcaatggcgaatggcaagccaagacgccgattccacctgacaaaagtgttgtgagtgcggatagtaatctgaccgatgatattcgccaaaaactagtggctgacttaagcacgatgatgcaaacagccaaaactttgccgctccagtatgcagcgcggttgtttgccaaagccaatgaccaaacccgccgtcagcagctaggcattgagccagttcgtgaccggataagctttttgatgacgctcacgacgcttgatcaatttcgcgccgctatgcccaaactggttgctgaccaatacgtcttaccaatcagtccctacgttgatgctgatatgcacgatgccgagcataatatcctgaatcttggcggaccagacacgattttacctgatgcggcgatgtaccaacaggaagatgccgaaaatgcggcggatctggcagcgtggtcgcagatggcagctgccatgctggctgcggcgggattcagtcagactgatcaaacagcatatgttgaagcggctaaacgatttgatcggcgtttggctgattatgtgccagcaaatgttgacttagcggtagatagcacgtatgacaatccattgagctggcaggcgtttgaagatgcggccggttatttggggatcccacaagcctttgcaacttacatgctgcaaacaccggcgaaagtcaatgcggttgtaccggcttatcttccgcatttaagcaaactactgacggcggataactattcagaatggcacgcatggatggtgattaacgaattgctaacctgcgccacttacctcagtgatgatttacgtcaattggccggacagtatgatcggtttttggcgggtcaacctgaggcgtcatcgtggacgaaacacgcttttgggattgccaatgagtattttgacgatgtgattggtcagtattatggtcaaacctactttggtgccgatgctaaggcagatgtgacggccatggttaagcagattcttgcgcaataccgcgtacagctagaaaacaacacttggctgagtccggctacgaagcaaaaggcgatgcgcaagttagccacgatgcaagtcaaaatggggtatccggagcgactcttttccttgtatgatcacttgagcgtggatgctgacgatgatttgttgacggcaattctgaaactgagcgcacagacgcaggccttttggtttaaacaggtaggccagccggtggatcggaatcaatggaatatgccgggacacttggtgaatgccagttatgatccgctgaaaaatgacatcacttttcccgctggtatcttgcagccgccgtattattcactcaagtggacccgggcggaaaacctcggagggacaggcgcaacgatcggtcatgaaatctcgcattcgtttgataataacggggcgctgtatgatgaacatggtaatttgcataactggtggacgccagcggataagcaggcatttgatcagctggtaaaagcgatggcggcacagtttgatggccgtgactatgaaggagttaaggtcaacggtacactgaccgttagtgaaaacatggcggataacgccggcatggatgtggcgttggcgttactaggcgatcagccggatgttaaggatctgcaggcattcttcatcacttacgctcgttcatgggccaccaaaatgcgaccggagcgggctaaaactgttttgcggcaagatgttcatgcgccggctaccttacgcgtgaatgtgccggtgcagaactttcctgcatggtaccaggcatttaatgttcagccacaagatggtatgtatcggcaaccacagaagcggctgacgatttggcatcggtaatatttaaataaaagagttttatgtgaacctttttcgagaaccgcgagatcaactgtgtgtcacacttgttcatggggaagcgtaaacaaaaaggcaacgattgccgtgagacaatcgttaccttttttcaatcttgggacaggtcgtggtagtaatgcagccagccggtttcgcgttcgccgatttgatcatacaaatgttgagcgccaagattgctggtgcgagtctgccaacttgcgccgctgtatccgtgcgcttttgccaggtcgaacgctgcgatcatgagttgacgcgccaacccgtgccgacgaaactttggtgccacgtagacgtcattgataataagcagtggtttcagcgcccgggtctcaaagctgcggtataaaatcgcaaatccggctaattcttgatcaacggtggcgaccaataagtgaccaagactggtatcggagcgcaagcggtcaaggtgaagagccattgcctgtgagtcaatggtcagcggcaccgggctatcatgatagtaaccttgaacaagcggtaataagagtgggatatcggttgccactgcagggcggactgccataataaaatcctccttgattgaagtgagcgtgaaccggcgcgcttagaagtcggagtgtaagtggcctcagtcgcaatggccgggctttggccattgcgactgaggtccttacactccgacttctgcgccggtgaacgcgttatggagtgtgagttgacgggttagggaccggagtgtaagtggcccgggtttgaccattgcgaccaagacccttacatgcagattcctgtgtcaagcaacgagttatgaaacacgtgatgaagccttaacgattgtgaaaataagcactgcacacaagttcatctgcaactattttacctgcaacaacagcaaaaagctgctaatgaagtctgagcttaaaattttttgaaagtctaacttatttccgctccgaagccgccattgaaaagaccgccacacagccaaagccggtgtgactggcgatggttgggccgatgttaccgatctgcagcggggtttgcggggaggcttcatgcaggcgatctttgacaaagtttgctgcctcaaaatcgccggatgttgagataataacgcgatgttgcggattttcctgaatggcttttaaagtctcgttggccaagtcaatcagcgagcgtttgcgggcgcgaaccttgcgcacaacgcgtaatttaccggccgtatcaacgtccatcaccggtttgatgtttaacatcgttcccaatgccgcggaagtacgcgacacgcggccaccgtggtacagaaagtccaatttatcgaccgtaaaccacatccggtagtccaatcggtgcgctgtgagccagtgcgccagttcatcgattggcatgccagcatcgcgtttttcaatggcatccagcaccaattgtccttcgccagcacacgcagccagggtgtcaaccaagtaaatctgcgcatctggatacttttccagtaacatggcacgtgcttgagtcgccgaattgaatgtgccacttaagccgctggagaagccgacatataagatgggcgtgtttgctttgacatacggtgtgaaaaagtcaacgaactggccgacatttacctgtgtcgttgtgggcatcacattttgcttcagttgctcgtaaaatgcattgatatcgtaatgatcttctccaagatcgtcttcataatctgtgccgttgacggtgaagtgcatggagacaaattcaacttgatgatcatgcaaagtctggtagggtaagtcgcaacaagaatcggttaacagttgatacatggtttcacctcaaaatatccgcactaaaacggatctgttttcatcaatactacgctgtttggggttgttctgaaagctaagggcggatggcgtaccataaagtcgttgaacgataccagccttacctgatgtgatacgcagtagcggaacttaaaaagtcgaatggcacaatgcgattcgactttttaaccttacttttccttggtggatgctgacggttgtttttgattgaatagggttcccacagcagggagactgcctaatgaatcaatcgcggtacttggtagcaccactgtgttggcagtgcccttagccaaggcttcaagtgcttcgacatttttatatttcaaatataaatcgccattgtcaatcaagccggcattgatcgagttaatttgatccttaaccgccgctgcaatcagccgttgactttctgcgtggccttgtgcttgaaggatttgcgtttgcttattggcctcggcttcaagaattgcggcctgtttttcaccttcagctttagcgatcgctgcttgcttatgaccttcagcttccatgatgttggcttccttttcccgtgaagcgcgcaacagtttgttcatggagtcttgaatggtagcatcgacttgaatggaatcaatgttgacccgatcaacattcaagccgtagccagctgtggtttcggcgatttgctgaaacaaggtttggttaatggtttcggtgccgttcaagacgtcattcaaatccatattgccgataatcccacgcagattagcccgcgtatcttgaaccatggacagcacggaatccttgttttgataaacataggcgttaacatccgtgatatgatatttcaacgtttcggaaatacggacgacaacgttatcttttgtaatcacttcctgttcatcgaccttcagcggaatctgcttcatgttgacgatttcggtgatccgatagatgaacggtggcaccacatgaaaacctggctccaatgttgccacatatttccccaaccgttcgacaatgccaacttcaccggtatggataatggcaacgctggtgaaaagaattgcgatgacgatgactaaaacaatgactagaacagaaatcaggataatattcatgcgaaagccccccgtgtgagcgagtcaattacgactcaatctcaataatgtaagcgatgttctggtttgacgacgctaagataaagcggcgaaactgcattgacaacaacagtatcgccagccgcagcgtcatcagtgacccggtaatgataatgaatgccataaagcgtaatctcaccctcttgatgcgatgttggtaagacaaacgttgtccctaaaaggcgatcgtcaagcatgggcgctactcctttctggtcatcttcattgattgctttgttacttgacgctagcaatgattatcacaagccaattttaaagcagggttgaatgaaagacaattgggacggcttagaaagaaaaaattatgctcgttattctatgctggaactttagtacagtctatgcttcattccgtaattagttcaaacactttttattgtggaagactttgttacaataagaccattgtggaatgaacagccagagcagttgtcgtaggtgtgcgtctttgattgtgctggttcttgctccataacgcgttcaccggcgcagaaacctgcacataaggaccttggacgcaatggccaagagcgggccattgcgtccaaggccacttatgttccggtttctaagcgcgccggttcacgctcagcccaccataacgcgctcaccggcgcagaagtctgcgtgtaaggaccttaagcgcaatggccaaaacccggccatcacgcttaaggccgcttacactccgacttctatgcgcgctggttcgcgctcactttttagtaggagggatgttgatgcgtagacgacgagtgatttatgcaaatacttatcagcatcggcgacggttgtggtttttgctgattagcgcaggggtggtcgcggccttagtaatcggctggtggctgctgcgtaatccacggccggatccgaccgcttatccagtgttgggcgttcgccttgatcaaaccgatggcgttcaggattttgatcgtttacgtagcagccgggttagctttgtttatttgaaggccacagaaggcagcagctattttgacgataatttcaataccaactttactcaggcagcagggagtcgagtgagcataggcgtgtatcacgtttttagttttgaaacgacaccgcaagctcaagcaactcaatttatccgcaaagtaggttccaacattggcgacctgcccattggtatttacctaagttattatcgcgagcaaaagccaagttcctcgtggttgacacagcatctaaccgagtttatcacgttcattcaacaacgctatcatcgccaagtgttgctgatgggtagtcctgatattttaaaggtggtcaaaacagtggttccacaagcaccgcggtggacgatcacggacaagcggcctgctaataacggcggcttttggcaatatactgacggtgcgcggttgccagacggtcctcaggcatcctatcgagcagcggtattcatgggcaagcgcggcacatttttgaagctggctcaatagtcggaccaccattaattcgtgcaaaaagccgagcattgcactgatctaacaaaaatgttcgttgaatgttcgccgaaactatctacttaattgaacgattgggacatactgataagcgaggtgaacagataatgaaaaaagtcctgatcggcttggttgtgctgattgtgctcgtttttggcggtttgaaaatttttgaaattaccaactatggcggaaccacatactacacaaaaattaccaacactggtcagcgggtgacggatcgcgatgatgaaggcaacaagtacatcatttatgcctatgatttgcctggatatgatgagaaaggcggtctgcagcagttgaagtttaatgcgaaccaagatcgaccgctgagaaaaaatgcttatctaaaagtaacatacaatgataaaaaaggggtcaccagctgggaaagtgtgccgcgttcggaagttcccaaagcagccttgtcaaaacttgaataaagcaatcaaatgcatcactttctataacgcgctccccggcgcagaagtctgcgtgtaaggaccttggacgcaatgaccaagcccaggccatcacgcccaaggccacttacacgcagactcctaaccgcgccggctcgcgctcaccataacgcgttcgctggcgcagggatctgcgcgtaaggaccttggtcgcaatggccaagcccaggccatcacgcccaaggccgcttacactccgatccctaaccgcgccagctcacgctcacacaaaaaaagtgcgatccgattttcggatcgcactttttgcatcttatgcgctgggaatgataatggcgtaggtagcatcttctgcctcgtcataaatggtttgcggaccgttatcatccgccttaatgactaatttgtacccataatgatcgagaaaagtcagctcgttgatggtgatgccgacaacttgcccaggtagcgttttattgtcgatcttaatctgcagttggggcgaaatcgctagcgagtgggtcttattggtttgctcatcaagaaaagcaaaactccctgtgaaattctttgccaacgccaatgcgggattaggcgccttgtcctgtgccttctgatgatgaccgtggtgcgcgagtaaatgtttcagcccgcgtaaaaaactcgccatgtttttcgacctcccatttctgtttaagcatagtctaccatgagtttttagtttagtggttacagtggtgctgtttttctgttactgggctgttacaataatcatgagtagttttgccagcttgatgttaaatcacggcagagctggatatcatacgtacagccgtgaatgactgttataatgcttgataacgcgtttactggcgtaggaacttgcgtgtaaggagctaagttgcaagggtcaagttcgggccgtcacgcctgaggacaccccttacaccccgtcttcctggcgcaccagcttacgtttagaggaggattttaccatgttgaaacttggtgtgattggaacaggatggattactaagcagtttgtggatgcagcggcggccacgaaggcatatacgcttactgccgtttattcacgtcatcaggagagtgctcaggcgttcattgatcaaactgcaccagcaacagcgtataccaaaatggacgattttcttggtagtgatgtcgatgtggtgtatattgccagtcctaacagtttgcatgcgtctcaagccttggcagctcttgatgccggcaagcatgtgattgttgaaaagcccttggttgcaaccgccatggaatttgaaaaattagacgaggcattacgcaaaaagccttctttgtatctttttgaggcagctcggcatgtttatgagcacaattttcaggttgtcgatcaatttacccatcatcatccgattgacggggctaccttgacttatatgaagtattcttctaagtacgatgcttttttggctggcaagttgccgaatgtttttaatcccgagtttgccggtggtgcattgatggatctgggtatttatttggtctacgatgcggtggcttggtttggggttcccgataacgctgtttacctcccgcattttctcaagagtggtgtggatggcgatggggttgcgcgcttggattatgatcaattcgcagtaacgttgattacgggtaaaacaaccaatagtttcctgccatccgaaatttattccggtaagcaaacgttgacgatggacaatgctgctgaacttgaaactatcaagctcgatgatcaagtgcttagtaccgagaaattagccaacccgatggaagcagaagcagcttattttgccaaagctatcaccggtcatgatcgcaatgcgtttgataaggcatggcagctggccaaggaagttcatcaagtcatgtcaattctgcggacgtccgcaaatcttgatttttagtgagcgtgaaccggcgcggtttctgcgccggcgaacgcgttatggaggacaaatattgtgacaattgcaaccccgtttcaaaaacgttggcaggctgccgggtatacggagcagacacccattcaagcagcggtttatcagccgttgaaaaccgatgaggatgtcatcggtttggctccaaccggctcagggaaaaccttggcatttggcctaccattactggaaaaaatcgtgcccggtgatggtttgcaaatactgattttggcgccatcgcaggagttagcgattcaaacacgggatgttttaacgccgtatgcacacgatatcaatgtggcggtgcagggcatcatcgggtcggctaatgtgaaacggcaattgacgaagctaaaagaaaaacccgaagtcattgtcgcaacagcgggtcgtttgcttgaactgattcaatcgcacaagctgaagttggatggcttacagacgctggttgttgatgaagccgatgagatgttacgggatccgggattcgatcaggttcgcgaaattgcggctgcggctccggccgatgcccaacttgctttcttttcggcgacaccgagtccgtattttagcgagatgcataaatggtttggcaagacgcctaagctggttgatgttcgtgcgattgatcaaacacgcgggacggttcggcacttattcttgcaaacggatcgggcacatcaaattgattggttgcgaacgttggcgcacactgatggcttcaaggcactggtgttttttaatcaaaatgcatcgttggaacgcgcggccggcattttgcgccaccaagctgttcgttttgccgtattgtcacgggagggccgacagactagccgccaaaaagcgttgacggattttcgtaacgggcggattaccttattacttgtgaccgacatggctggccgcggattggatattcctaagcttcctgccgtggtcaatttcgaaccgcctaagcgtgctgaagcttacattcatcgtgcaggtcgtaccggtcggatgggtgaacccggactggtggtaacgttaggagacgaccacgatcgccgggacttgaaaaagctggtaccgcaatatgccattcagcgtgcctatatgaccgatggaaagttggtgaccacaccaccagcccgaaagccagataacgaaacgccggtgacgctcaaatcgccagcaccgagtcagcataaaagtcagcaggttgcggctaaagatcggtcggttgttactaatgaacctgagcaaaaaccgcggcgtaagcataaaaaaaagcgactacgtgatcagcgcaataaaggcaagcacaaaaacaacacatgaggctgcatcagcggtatgataaggatggagggcagtcatggcgagtatgaaggcggaacaaatggctgcaatgatgacactgatgagtgcagccggtgatgcggaacaggcaacaatggcagcgattgaagcagccaaagccgatcagatcgaccgcagccgcaaattgttaaagcacgcggatgccaagttgaaacaggcacatcaagcacagacccaaatgcttacgtatgaggcacgagggcaaaaagttgacgtaacgttattaatggtgcacagtcaggatcatctaatcagtgccatgacgattcgccggcttgcggatgatattattgatctttaccagcaagtgcacgcacagaagtaggtcaagggtttgttggtagaggttgtttgtctggcgaatgcgttggggcacgggttcacgctcataacgcgttcgccagcccagaaacctgcacataaggaccttggtcgcaatggccaaacccgggccatcacgcccaaggccacttatgctccggtttctaaccgggctggctcacgctcaccataacgcgttcaccggcgcagaagtctgcgtgtaaggacctcagccgcaatggccaaagagcggccatcacgtctgaggccacttacactccgacttctaagcgcgccggttcacgctcactttataaaagaggtaatccccatgaaaatcgagaaaacattacagacaccggcagcatttttatatagtaaaatcgttgcaccggttcaggccgatattgcggcggcgagtcatcgtaaggttgaagttgatgaacttgctggttatacctatcgcaaacaatttcctgatggtgaatgggcaaaggtcaagattacgcaaaatgttatcaatcgtgaatttgcgatgctgacgatgacccgtttttctcgctttaaggttcgttatttgatcacgccgcttagtgctgatgcaagtcgtgtgcaggttagtgaaaccgtgcagccggttaattgggcggcgcagcttaaacagatggtcaccgagctatttgtcggccataagcggcggcgtaatgttggccggatgttggactcgattgagcgttcttatatgacggcttaatgaggctaagaggaacgatatcgttgagctgcagctgctgagacaacaaatctatttgaattgcgctgctgcttttggcataattgactttgtctggtgcccttagctcagcaggatagagcgactgcctcctaagcagtaggtcatcggttcgattccgatagggcacagtcataaaaagcacagtcatttggctgtgctttttattaaattgaaataggcatctttcaatagcaaacaaggaggggccttacatgcaggcgtttatggccatctatgttccgggttggctgatttttattggcgggatcgtgttgatcagtacggtcaacggggcgacagttcaagccttggttaatcgcgttggtcggtctaatacgcagatctggtatatgaagccgggaatttttgtccatgaattacttcatgcaattgttgcgcggctatttggtttgcaggtgacgaatttttcgttgcgggctgatccgcgacaaggcagtgccgctcatgttagtttgcaatatcaacggcataatccgattgcccagctaggactgtttctttctagcagcgctccggtttggggaattagcctcattttgctggtactagggcggtgggcttttttctcggcaggtagtcaagtgtggcaggtgtttgcgaccacggccagtctcggtgaaaaatgggttatgatgcgcgaaatgatgcagattaactggcgttggctgttgatttttttcgtgttaaccttagttttaacgccaggggttgctttgtcgcatcgggatttgcaaaatatgtggcagagtgcgccgattgcttttctggtaacaattgtgatcttttatagtttgctgacgttttggccagcaggatttgcttggtgggcgtgggtaaatttgaatttgttactgttgaatttagtgatgctgagttttagtctgctcatctggttactggtcagtatgttttagttgctgtgatgaagtagcagttggcgttatactaatcagaaatttttaaaagggaaattcaattgcgatggcataatctatgattgagtcagtcaagtttttataggaggaaaaagatgcttttgccgcagccagcgacgattttaaaagaaaaatttgggtacgatcactttcgagccggtcaaaagcaggcaattgagcgaattatgaccggtaagagcacgctggtcgtgatgcctaccggtggcggcaagtctttgtgttatcaggtgccggcgatgattctgccgggcttgacgctggtcgtttcgcctttaatcgctttaatgaaagatcaagttgatgcgttaaacgacaatgccattccggcggcgtttattaatagcacgttggattatcgtgaaattactgcacgtctggaacaggcgcgcagtgggaacattaagttgttatatgtggcgccggaacggtttgatgcggattggttccttcagcagctcggtgacatgaatatctcgctttttgctattgatgaagcccactgtatttcacagtggggacatgattttcggccgagttatctcaacttggctaacgttgcggctcaattaccctcgcagccgccggtcattgccttaactgcgacggcgacaccgcgggttgctcaagatatttgccaacgcttgatgatcccggacgatggggtcatcaacacagggtttgaacgtgacaacctgagtttcaaagtggtgcgcgatcaggatgaggatcggtacttgttggattatctaaaactcaatgttgatcaatccggcattatttatgcaagtacgcgcaaagaagtcgatcggatttatgcgtttttgcagcataagcagttgccggtagccaaatatcacgccggcatgactgaaaagcaacgtgctgctaatcaggaagactttttgtttgatcgtaagccgattatggtcgctaccaacgcgtttgggatggggattgataaaagtaacgttcgcttcgtgattcatgcccagattcccaaagatttggaatcgtattatcaagaagcaggtcgcgccggtcgtgatgggttgcctagtgaggcgatcttgttatttagaccgcaagacttgcaggtgcaacggttttttattgaacagtctgaaggtgacgaggcgcatcaacggcggcagtatgacaaactgaaaatcatggagcgctatgccaataccgatcagtgtctgcagcagtttattttgaactattttggtcagactggcactgccccgtgtggacgttgttcgaactgcctagatgatcgtgaatccgttgatgtgaccattgacgcgcaaaaggttctgtcatgtgttgttcgattgcacgagcgattcgggaaaggcgttgttgcccaggtcttggctggtgcgcacaatcaacgcgtcttgtcgtttcatctcgatcagttgtcaacatatgggctgatgaaaaatcgccggcagcgggatattacgaccttcattgatttcctgacggccggtggctttctggaaacgcgtggtggtcagtatccaacgcttggcttaaccgcaaaaggtgctgaagtgttacgcggacagacaactgttttccaaaagaccgcgcaaaaagttactcagacgcttgaagttgatgacacagtcttccaagaactgcgcagtactcgccggcaactggcggagcagcagcatttaccgccgtatatgattttttccgataagacgttaaaagcgattggcaatgcgatgccgaaaacgttggatgagttgctggcggttaaaggagttggccaggcgaaacttgataagtatgggcagattttcttggatgtgttgcaggcgattcaaacggagaaagcgtgattagggctcacgcttgcgataacgcgttccccggcgcaggggcgtgtaaggacctttgccgcaatggccaaagcccggccatcacgtctgaggccacttacactccggtttctaaccgggctggctcacgctcacacaaataataacgcatagaaaaaccgagccgttgatttttgcagaatgagtgcaaaaaagtcgcggctcggttttttactaaaataacggtagcgatgagaagttaggcccagtcgccgttgcggaaaattgggatgatggttccgtctggtttgatgccgtcaatgttcatcgcggctgagcccatcatgaagtcaacgtgggtcggactttggtttaatcccaccgccgcgcgttgttcgttggtcatggcaaccccgtctttgactgagaacggataggcttgaccgagtgccatatgatcggaagcattttcgtcaaacagcgtattgaagaaaataagtcctgattgtgagatgggggaaggatccggaaccaacgacacttcgcctaatgaacgagcacccggcgttttcagcaggttttgtaagacgtcatcaccttgtttggcgtgggcttccacgacttgcccgtctttgaaagtaaagtgcatatcttcgaggatgttgccgccataactaagcggtttggtggaagcaacggtcccgtcgatgcgccgaaaatcaggggcagtgaagacttcctcggttggcatgttagccataaattcctcaccacgcgggttaaaagcgccggcgccttcccaaatgtggttctttggtaaaccgactaccaaatccgttcccggagccatgtaatgaagctgatcaaattgttcgttgtttaaccaagccgctttttcccgcagcttttgatcgtgggctttccaggcagcttccggatcgggttgatcgattcgggtagttttgaaaattgcctcccagagtagctcagttgcttcttcaggggtggcggcatcaggaaaaactttttgagcccagcgcggacttgcagcaccgataatcgtccagctaatgctcatggaactgattgcttccatgagtcgtttgtaggcttttgcgaacgcttcttgatacttggcaatgcggttggaatcaattcctgccaagttatccggatctgatgaaaccacggtaatccgcttggcttggtgatcaacccaataatcgaattgacctttgacaaacgccgggatgttgaaaaggcgctcgtctgccatgtgcgccatatctaaacgcttgagtacatcatcgaaccactgaacctgaacttccgcggcaccgcgttggtaagcagccgcaacgatcaagcgtgccagctgtgcttgatccactgaaatttgcacgtaaacggtatcgccgggtttaacggccaccccaatatcgactgccaattcggcatattttttaaggctttctttaaagttagataatgtcataaaaacgctcctcctcaaagtgattggcaatagtttaccatagggcggcgaattctcagtgcaaaatgctgctgtgccgtggcagaaatcttcaaaataaattaagaaaaactgaaatttattagtaaattctgtttccttctgacttcatgtctggtaaaataacaccaagacatgaagttggtcttttggagtggagatttaactttatttgtcagaattaagttgtgtgcaagttagttttaaataacttaaagaaagtaaggggaacaatatggcacgaaaaaaaacgatcacacatgatcagattttaaatgcagcatatgatctcgttgtggaacagggctttaaaagtttcacggcgcgtaatatcgctaagaagatgaactgttcaacgcagccgatttatttggaattcaagaatatggcggaattgaaacaggccgtgatggatcgtattaaagaactgctggctttaaagatggcaaaacactacaccaatgatccagtggttgatttaggtttggcgtatatctattttgctcttgaaaatcggccgctttaccgagcagtatttgttgaagatcactttggcgttgatgaaatgcgtgaatacgttatgagtacggctatgcgcgtgtttgatgcgtatgaaccggctaagaatttaagtgaggcacaattacgcaatacgatttgcggggtatggatcgtagcaaccgggattgccaatctcatggcgccagggttcatcgacattacacgcgatcaaatggttgatatcttaacggcggtcacacaagatttcatcgttaacggccgcttctcagatgacccgcgcatttcttggttcgaaaaagcaaaagtcgcccaaggctattaaaagtttaattggggctaaccgttccgcggggggagcggtttttttgttgagcgtgaaccggcgcggttagggatcggagtgtaagtggccttgggcgtgatggcccgggcttggccattgcgaccaaggtccttacacgcagatccctgcgccggtgagcgcgttatgggcgtaaaccagaacgtaagcggcctcgggcgtgatggcccgggcctggccatcgcgttcgaggtccttacacgtagattgctgcgactgcgaacgcgttatgggcgtaaaccagaacgtaagcggccttagccgtgatggccggtctttggccattgcggctaaggtccttacacgcaggtttctgggctggcgaacgcgttatagaaagcaaaataaaactcccaaattgcccaaaagagaatacctctgtccctgctgcgattttcctcaaatatatcatattaaccaccgcctccaacccctttacccacagccacctcacctcagcccctgatcgccaaatgcacataaaactggaaaactggcggccaatgcgctacttttgatttaataagtaagtgccatgctggtacaaatagctgacatgcaacataacgcgctcctcgatggaaggatctgcgttagaaggcgttcgaaagaggttattatgggaagttcatcagatctaaaagacttattacgcgaacgagtcgccactaagtacacaattgacgacctcaaggaaaccggtaaaaagattcggcaagcggttccgattgaaaatctaggggcggtcagcaagattgaccgtgatccagtccagtttattaacagtgttgagcagaatcttatcaaatcgttgctgccgatgcgccatcagcgaatgggtgcatctcaggcggcttttttccgcggcacggccgaattaatggcttatgatttgcggcaaggcgaaaaatcaggtattaatctattaattgacggggatgcccatctgcagaattttggcttttatgcctcgccggaacgcaatttgctgtttgacctcaatgactttgatgaagctcagatcaatagttttgaattcgacatcaagcgcctgctgaccagcgtttatttgcttggcgatcagcaagggtttgacagtgatgatctcgacgatttagtccaaaacgatgccagtatttatcggaaaacattacgggatctattcaagctgggcgcgctggatcggttctatcaatcgactgaagtagaacgtttagtgcaggtcatccccggagccgaagattcaccgttgttggccaaattcattaaaaaggcgaccaaacgcaacaacgattcggtcattaaaaagtacaccgagactaatgaagcggggcacatgcgatttaaagatgatccgccgagttcggttcacattgatcaaacaacttatcaggcaatttatgatggctttacccagtatcgcaaaaccacgcgtccggacattttggttttactgagccaatatcgcattaccgacattattcatcacagtgtcgggattggcagtttcgggacgaattgttatttgatcctgctgagtggtttaggcggtagtcatttggtgctacaagttaaagaggcgttaccgccacgccgggaattattgcccaatatggaacgcatgaccttgcaacaagaagtcagtcaggggcagcgaattattgcggctcaaatgatcctccaaaaagcgtccgatccgtttctggggtggtttaatgtggacaacaagagctactatgtccgccaatttcgcgacatgaagggctccgttgatcttgatgagcttagttttcccgagttcaagtactatacgcaaattacggcttatcttttggccatggcgcatgcgcaaaccccgcaagcagcagtcgtgaccggttatctggataaacatttcgatagtgcggtgcaaacttggagcaagtggtatctgaatcaggtgaaagccgattattctgcgtttatgcgcgcagtcaagcaacgtgttttagcctaaaagtgcttgattagccggtgtatttatttaccggattcatttgcaaaatttattcataaaaataagtttagcttgttttctgcggattgcttctggcagaattaaagaggatgatcgtctgcgattaacgagcaaggctgggagggaggtaaagtatgggacggaagaagcacccgttgaaacggtcattattgtcggcaaagcaagcagctgacattcgctcaggacgtacggctttagcagacatgaagctaccaaagcgcaccaagttctgggttttcatcaagcttgccattaatcggatttccgactccaacattgggcaaagtgctgctgcattggcttactatacgttgctgtcgctttttccgttaatcttatttgttgccaatgctttgccgtaccttggactgaagtatagcagtttggccacgtacttaacgcaggcagtgccggcaaatgtcatggaatggctcgatcccatcatcgcaaatttactggattcaagcagcgggggattgctgggaatcggggcaattgcaacgctgtgggcagccagtctaggtgtaaccggcttaaaaatgggctttaatcaagtctacggtgtggaggcaacgcaaaacttcattattcagcgattattatcaatgctcatgacttttaccttaattattgtgatgggcgccattttaattgcctttgcatttggccgccaatttttggaatggctgataccgttgctacgactggataccagctggctgcgaacctttaatacgttacgctggcccatcacggttaccgcattgttcattattattatgtttttggattattttttaccgaatgtcaaaatcaaaatgtggacggtgttacccggaactgccttcaccgttattggctggctcttaattgctcaggcattttcgttatatatgcattattttggcacgcgttatctttcttatggcacgatcggtacgtttattgcgatcatgctgtggttgaatttctccgcgctcgtcttgctttggggcgctgtgattaacgcgttaaccgcagaatacttcatcggccggttgcacagcagcaagggtaaagtgcacgactttttgaaacgccgagtgaagtcagcacattcggaaaaagaaactccgtgaccgccaatataagatgatctaaggcatacgaaaaggctcgcactgaaatcagcgcgagccttttgcctacttactattgcatggcgttgaacttatcaaccaactgttttgtaaaagcttcaagatgcttgatgtcatcttcttcaggagaaagatcaatcttaacattctctgctcctttggtggcgccggttttggcaaaggccttgtcaaaatcatcaaccgaagtggcaaagtcatcatagaagcggtcaccgctaccgcaacaaccatagacttttccagttagatccagctcttgcaattcttcatagaaatcaaccgcttcgtccggcagttcgccatcgccgacatctgagtacgtgtaagttgccgtgacacaaatatcgacatcttcaaaatcactcgcgagtgcttgggaaacttcagtggtcgtcacgtccacattcaggtcttcaaaagcttcttcaatgatactggcaatatcttcattattaccggtcaaactggcatatacaatccgtgcgcttgccatttttcttgtattcctcctaaaacacagcactcgggagcttacaagtcggcgaggctgtcattcttgttcattcgcctgattatagcatacgggaaagccgcttggggagattcactgaagttggctatgtgtggtggggtaggctttggaccgtcccccccttcgtctcctgatttacgtggaagtattttgttgacgtcaattctcattatctgtagactgtcattacggctttgaaaagggattcatcatctttttctttgagcccagtgatttggatggcacacacctctcgacattttgataaaacggaggtgacagccatgccaaaatcaggagacgaaaggggatcgccgcgttggacgtggcaacgattatcgtcgctataagcatattgcttactagcggtgctaaggcatacgcgataatcaaaaaagctaaccgaaacggctagctttacccaaaaacgtcatctgatatcacgttgaggtcatcggggctacatcctgatggcctcttttcgacttctaaagtataccttaggggctggtgaggcgtcaagatattgacgggtttgcatccattcaaaaaagctaaccgaaacggctagctttacccaaaacgtcatctgatatcacgttgaggtcatcggggagcatcctgatggcctttccctcgacagataaagtatatcttagaaactggtaaatagtcaatggcattaactgatttgccgatgggatcaactcgcatactaacagcatttggttgtttagaaaatgcgccgggtcgcgctctcttctaattaatgctacactaattgcgagttaaattcgtattggaggctggaagtttgatcaccatcaaatcagcacgtgaaataaaaggtatggctaagtcgggagcgattctggcggcgatgcatgttggcttgcgcgatattattaagccgggtatctcgagttgggaaattgaaaagtttgctaaggaattttttgaatcccatggtgccaaggctgagcaggtcggttttgaaggttataagtatgttacttgtgtcagtatcaatgatgaggttgcgcatgcggtaccgcgtaagggcttgaagttaaaagacggtgatgtcgtcagtgtggacaccgttatcagttggaatggttattttagtgactcttgctggacatatggtgtcgggaaggtctctgaagctgatcagaagctgatggatgtaaccaagaagtcgctttacttgggtattgatgaagcagttgttggcaatcgtattggtgatattggtgccgcgattcagacttataccgaagatgataacggctatggcgacgtgcgtgaattggttgggcatggcattcaaccaacgatgcatgaaagcccaaatgttccgcattatggcgttcccggtcacggtttacgcttaaaagccggcatgacgatcaccattgagccgatgattacggaaggtacttggaagattaagggtaaacaagttcccggcgatacatgggaatactatgtaaccgccgatggaagtaagtgcgcacagtatgagcatactctagtgattaccgacaatggtcctaagattctgacctcgcaaggtgatccgattgatgctaaatatcagttaaccgaagacgatctgaagacgcttccggaataacggggaccaccattactatttttatgtgttatgaggtgccagaagcatcaaatcgtcaagcaggaagcaagcagtcattgtttcctgcttttattttattgtttttttaaaatgttaaccggtttcgtttaacaatggagcaattacgttatactaaaacacgaaggaaaagagggacgatatggcaggtcatgaagcagtggtttcggtcatcatgccggtttataatgccgaaaagtatttgactcaggcactggatagtttgctcgctcaggactatcccaattttgaggtgctttgtgtggatgacgggtcaatggacactagcaaggttattttggcgacttatgcacgtcagaatccacggatacgtgttattcacgtggaaaacggcggacaggcacgggctcgacaaattggcattcaacacgccaagggatcactgattacctttatggatagtgatgatctggttcatccccagtggctagcaaccatggcagaagggatgcgggctccacgcgtcgatatgtctgtggtcaattactataactatatcggcggcaccaagctgaaagcccgttcttttcacgagaaggcatttaagattgccggtgatgacaagtaccgttattggcttgaggatcgcgacctgcgcggatatttgtggaataaaatgtttcgcgctgagttatttagccagccggtaccagtggcgaacttcaatctgcttgaggacgcctacttcattgggcagctgttgccacgaatagaccagatcaactttattgatgaaccactttactactatcgcttcaatgcgaccagtagcgtccacgccaagtttcagaagcgtgatttggaagccattcatcaattgggtgccgttttcttaacgttggctcgggaaaagccggagttaacttcactggcagttcgccggtatgctgccttaagcctgttcgttttatcgaaaatgtcgccgcggcagcttgtagctaactgggggtatgtccaacagttagggatggttttggcgcaatatgctcgcgagtttcaggggattatctcggctggggatgcggatgatttggccacagataagtccgataaagccagtttactggataaactgcgtgcttggtcgcatctgctgggattgccaacatttgatgacctgaacaagttggcaaatagcgaagatgagaatgttaaaaaggagtcttagcgtgtagggagggattcaagggtgagttgagttgtactttcataacgcgctccccggcgcagaagtctgcgtgtaaggacctcagccgcaatggccaaagtgcggccatcacgtctgaggccacttacactccgacttctaagcgcgccggctcacgctcaccataacgcgctccccggcgcagggatctgcgtgtaaggaccttggtcgcaatggccaaaacccggccatcacgcccaaggccacttacactccggcccctacccgcgccggctcgcgctcagtaaaaaagccatttgccaactttttggcaaatggcttcgtatcgagatcgaacatgccgcggcatgttggggtggggtgttggtgcaggcagttaagctggctttttctccgtggtgaagatttcggtgctttgagtttcagtcaccttggcgccaaccggagttgcatacaggccgatgccttctttcttgaacgcttgggcttttgcaaccgcatcggcgaaggtctgcgcctgctcagccgtgatatcaccttcgtacttgctgatccgaatacttgtggatttaccagcttcggatttgaaattaaaaatcagtgttttcattgattatccctccgtttaggctgtgacttctgcgttttgctgcaagacaatgctcgtcaaagcagcgtttggataaagcttggcaaaggcttgcccgatcgcgaccagttgctcgtccttcgcatcggcagcgacattgttcatccggcgtacctgcttaaatgcctcgttttccggatcagttagggtgtacacgatggtttgcttgttaacattgcgactcatgatgtttcctcctcagttagaatttgtgttgtccgaatgtggcctgcattccagacagttattactggatattttggtccaaaatcccgatcagtgtaggaagtttttgcgtcctacactgatataaatcggtgagttagtgaatatgacaacccttaacttataaatttgtaaccattgcagaatatcgaatgtctgctaaaataattaaggtatttctttagaaagagtaaggtttttgctgacttacaattttgttatgtacagtcagctatacttacagtcggattccttctggggtccttgattaatgaaaatttgaagggttctgattgtgtgataacagcgcaggcgccaggtaaactttatgttgccggtgaatacgcggtggtcgaaactggtttccctgcgatcatcgtggcgttagatcaattcgtcactgtaaccgttgaagcaacgaaacatttcggcagtatcgtgtctgaacagtatcaggaaaattcgttgtattggcaacgtcaaggcgatgaaatggtctttgataaccgagataatccgttccactacattctctcggcaattaaattaacggaacaatatgcgcgtgaacttaacaaaccgttggcgctgtataagttgtatattgattcacaactggatgctaaagacgggaaaaagtatgggttgggtagctcagccgcagtcaccgtggcaacgatcaaagcacttgccaagttctatgacttgaagatgtccaaggatcaaatctataaactggcggccattgcccatcttgatgttcagggtaatggctctttaggtgacattgctgcgtcagtttatggcggttggattgcttatcgttcgtttgacaaagcatggttggcggcagctagaaaccaaatgtcgctgtcggcactgatcaatgctgaatggccggagttgtcgattgaactcttaacggcaccggctgatatgcaacttctgattggctggacgggatcgccggcttcaacctcccaattagtcgataaaattacgttagctaaagccaaaaaaccacagctttaccatgacttcttaactgctagtcgtgagacgctggagaaattgatcaatgggttccgggagcattcgcttagccacattcaggctggcattcggcgcaatcgcgaattgttggatgaattggcacacttctcgggggtggcgattcagacgccagcattgcgacaactggtaacgttagcagagcaagcaggcggggctgccaagtcttccggagcaggcggcggcgactgtgggattgttttaattgattcccatcaggcgattcagccgttgctggcagcttggcgtaagcaccacattgagccattgaaattcaaagtacacgaaatcaacgattaatgacatctcagctatgatttggtaagcagattccggatggataggatccaatggcgaagcaaatacccagtagctgggatttttttatttttatacgaataacttatgaatttttctgggaattatcagaaaaggcgtactcttcgcaagcggtttctagtatagtagagtaggtagttaaattagtagagaagggacttgtatgagtgtgaaagttcgcaaagcagtgataccggcagccgggcttgggacccgttttctgccagcaaccaaagctttagctaaggaaatgttgccgattgtcgacaaaccaaccattcaatttatcgttgaagaagctaaggctagtgggattgaggatattctgattgttgagggtaaacaaaaacgctctattgaagatcattttgactcagcacctgagttggaacagaatctgaaagaaaaacataaagacgccttgctacagctggttcattccacaaccgacatcggcgtcaacttattcttcgtgcggcagccatatccgcgtggtcttggtgatgccgttcgcttagccaaatcgtttgttggcgacgaaccattcgtggtcatgttgggtgatgacctgatgaatgacaaagtgccgttgaccaagcaattaattgatgaatatgataaaacccatgcgtccattcttgccgttaaaaaggtgccgcatgatgaagtatcggcatatggcgttattgatccggaaaaagaagtttccaaagacctctataacgttaagaaattcgttgaaaagcccgctgttgctgatgccccaagtgacttggctatcatcggccgctacctgctgaccccggaaatctttgatattcttgataatcaaaaaccgggcaaaggcaatgaaattcagttaaccgatgcgattgataccttgaaccaaactcagcgcgtctttgcacatgagtttaaaggggatcgctacgatgtcggcaataagttcgggtacgtcaagactaatgttgaatatggcttgacccatccggaagtaaaagatgaactccgcgcatacatccttgatctggctgctaagttgcaatcaggcaagcatgtggggaagccggcaaataagaagtaaatcttaaagtcacgtatgataaacaaaagtaacttggtcatggagttcttaaaatggctaagttatttttttgtagttatgacactcgttctgttttgtgcaatacttttgcgagatctgtttggttggcaatggcatcatgagttcatgaatggtaaaattagtaatgtcttaattagcattgcaagtcaatatggcaaaataaaatttatatccgactttacctagcataaatcgttagtatgccggtttgataaacatagcaaggagtcttaatatgacaaaacgggcagtggttttttgtgtaaaagggttgcacattatgcttgtagcaatggctataacgtctttagttaaaaaataccattctgatcgggaaatgaaaatcctggttataatagaaggcggaaatcaagacgatattaactttattcgaagtatcccgagtttgtatggaaaacaacagatctcggttgatttttgggcgcctccatatcctctgctagataaagtttccgatcagtttgagacgggtacaagtttgcctaaaatggttctttggagattgttcttgccatactattttcctgattatgatcagattgcttatatggacaatgatattttaataacaaccgacattaacgatttgtttgatcagatgctacctgaagatgttattggtggtgtgttagactacgaagacgttacgcatcctgatcacgatcgttcaaaagagttctacctccctagtaccgatcaatatattaatgcaggggtatttgtcgccaattcaaatgcatatcggtcagttgttccgttcgagaaaatgatagagatcattaatcggcataactatccatatggcgatcaaaatattttgaatattgcgttttacaatcatatttatttgttgccatggcggttcaacttacaatacgataaccggctccttgataaatatgaaagtcttgcaccgcaacgtattaaaggaattcgtgaacaactaaatgagcctggtattattcactttgcagcaaacgggtttgttctcccgccttggtatgtcttcacgcctactacaagatgggagaaaatgtggtgggaaacctttgttgatatgcaaaaaaagcacctggatttcatagctaggactaccgaggatacagttcatgaaccttaatgggacatatgtagtgggttgctgatgattatcttcggacactggtttgtccttgaatctgaaaaaagaagcacaggcttaaagactgtgaccattattgaatgaggcgggccgatttccttgagattaggaaattggcccgcctcttagcttcaagcgtaatcaatctcattgcgcttcagcgttcttcattttcaaaagatcttcaatatatgcaagataagatgcgcactatcctctaaatttaatggcgtaagataccccagctcttacctagttatactagaatttaacgcgtaatcgactttaccaagctaaacacacgccagaaattttgttcgaattcatcccgtgaatacccatgttcccatggaagtgaacggatttcactaacgaagtgacggataactactttttttcgtgctgcttgcattttttttgcttgttttagattgtagtgaagtgcgtaaccgtttaaccattcatcatctttttggtaattatattgtaaaggaaggtggattgattggctttcaaacaggttatttaaaatggtttggtcaatgaacgaataatcagaagtgtttatagtattaaccaattgatcctgagtatacgcttgaatgtacttgtgggtatttataagtagcacgccagaattaaagtaactgtcaaaatgtttgatttctggccaaatggaaccctctttagtatcagcatatagaagggtctgaaaatcattgactgcaccgatggctttatcatccggtaacatgtcaaacataggtgatatgtcgtcacagataaggacgtcgttatctaaatagagcaaacggtctgtgtcactaaatatgtacggcgcaaacaaccgccacaagacaacggaaggatatctggtatttgtgttggccgtgtgaacctgatccatgatcgatggcttttgccagacgtcaactgtaatattggggcgcagaagttgtttgggaatgctctttaaccaaaaaatatcctgattaagataatcatcagccattaccagaattctaagaggaatattgactggccagtgtagtacaagggaagcaatggcagtccccgtaagttggatgtgactgccggtaacagtaaaaagtacggcgttttcgctcatttaatataacctcctaaagatgtttcggtaagggtgacacgagctggcatcacgaatcacaatatagacacagcaataggccagccgttgtttaactgttcaagatgttctgtagatactcaacactttaatcaaagagggctttaggaacttagatttattgctagatagcaaaagtagccacatatgctccagtgcaaaagtatctattaatacaatggtctgtggtggtgagggttgggcaccaactggcaaattttgtaaattggtttgctatgctataataacattatttatgaaattaggatgctgctaaacagtatggaggatttgaattaatggaatatgtaatttcaccattgcaacctgatactgatcaagcgaccgttaaagcaaaaatggatacggcctacttttttggaaaagttgggtttcgtgaattgtttttatcgcgttatgtattttggaatgatgagcactggcgatctgagattttagggataattgcgacagttggaaagggagatgttgtcatttatcagattcccacttatgctgaaccctccgtagagaaggccgttgttgagctggtgcataagcagggcgcacttattatcgcatttgtccatgatgtcgaatatttacggtttccggactcttatgacaaaggacaggtgcttagtttcttcaaatcatttgatgcattgattgttggtacgcagcttgtaaaagaaaaattggccgcagatggcgtcaatattccaatgattccgagtggcccgtgggggtatcgccaaccgattgcttatcgtcggcctagcttttcaaagacgcttcactatgcaggcaatctagttgatcgcaaggccggatttttgcaaaactttccagaaaacttacatattaaggtatatggttcagctgatggtaaaactgacctgcctttttcgctagcggattctgtagaatatttagggagctatcgtcaagaagagttggctttagctttaaatgatggttacggcttaatttgggatgaagataaggaacatcattttgacccatatgccaggattaatatgacccacaaatttagtttgtatctatctcttggtttgccggttattgcatgtaaccaaactgctattggccggtacgttagcgaaaacggattaggaatcgccattgactcccttgataatctaggcaacattatcgaaggtgtcacagaagatgactttaatcgcattgtcgataaggtagccaacatcagcgatctaatccgcagcggaaggcacaatcagatggctgccttacaagctgttttggcagtaaagggtacattaccgttctgatgactagaagatctgaaagagagagtacacaataccaaataaaaccattattgctaacagaacagataccgttacttgaacgactgtactgatctttaaatggtctttggatggtttcgtgatttcttcgttttctttatggacgcgctgggcaatgtctttgtcgattaggttctttcttttttgtttcataatactttgagtataaagagacaaaaaaacaaaagcaactctagatgaaattaaatatgaaggagattcatgaatgaatttctggggttctagctaccgatatcataaaaaagcaaaaaaaataattaagttgcaagagacgtatcgtgcaatgggcgatgaggaacttcgacagcaaactgaattatttcgccaacgacttgcaaaaggcgaatctttgcgatcgttactcgttgaagcgtatgctgttgtgtgtgaagcagactttagagttctccatatgcgaccatttcctgttcaagttttgggcgccgttgcaatggaatacaataacatcgttgaaatgaagaccggtgaaggaaagactttgacggcgaccatgccgatgtatcttcacggattgacaggtgctgggaatttcttaattacagcaaatgggtatttagctaatcgtgatgcggaacagatgggtcaggtctaccgttggcttggcctaacagttgcttccggtgttgcgcagcccgggcatgaaagcgaaaaacgcgatcggcagagaatctatcaagcagatattgtttacacgacaaattcggcgctcggatttgactatttgtttgacaaccttgcggccaatccagaagaacagtatatcaatcatttgaattatgcgttgcttgatgaagccgatgcaattctactcgacagtgcgcaaacaccattgattatcgctggtattcctagagtccagtcaaattattatcagtcggcagatcgcatgattaacatgctcaaggaaaaggtcgactataagcgtagtgatgatcgtaagtctgtttggtttacgcctgatggcattaaacgtatgcagcatttctttggtgttgatgatcttctaggcgatgaatggcatgagctatatcgtcatttagttttggctttaaaagcacacttcatttacaaacgggatcgtgattatgttgtggatgatgacatggtcgttttagttgatcgcgataatggtcgtgaattgatcggtatgaagatgcaaagtgggcaacatcaagcaattgaagctaaggaacacgttaagttgactgatgaaatgcgtacgatggcttccgtaacctatcagaatctatttcgaatgttcggccagcttgcagggatgacaggaacagctgccactgatgccgcggagtttatggaggtttatcgcttggcagtataccgtgtgccgaccaatgaaccgatgattcgcaaggatttacctgatcagctatacatcagtcaaacagccaaattattggcatctttgaagactgttcataaagcatacgatgagaaacgtcctattttgattgaaaccggttcactctcgctttcgattctctattcacgtttattattaagagaaaaaattccacatagtttactgaatgcgcgcagtgccgcaaaagaagcaaaaatcgtggctgaagctggtcaactaggggctgtaactgttgcaacctcaatggcaggtcgtggcacggatattaagcttggaaagggagttaaagaaaaaggggggctgcttgttttaggaacagagcgaatggccaatcggcgagttgataatcaactacgcggacgggcgggcagacaaggagagcctggaagcagtattttttatacatctcttgaagatcggatcgtcattcagaatgcgccgaaacgggttcaaaaatatgcttacaagcattcacatgacaagcatcaacagctcagtcgtcatggtcggtttcatagggtgattgacgaagctcaaaatcgcgtcagcaatgcaggtcggagtgcacgattttcaaccttgcaatacgatgaggttttccgtgcccaacgtgattgtgtttatgcaacgcgagacaaagtgatggttgcttcttcccttgaacgagttataaaaggagtttttaaacgagttgcagaagattttgtgaaggatcatgtgaaggatcataggaacggggatatttccgacttcctagactttgtatataccaacattgatcgcgattatctcccccaaatgctagaggaccatccaaatcagtggcaagatccgacaacagtcctatgggggcaatcaattggcttgaatgctcatttgacgcctacaaacagtactgcttcagttgcttggggcacgaatgcggctagcggcgttggtgcctttaccaacgttaacggccggatcaccagctttaaaacggaggcacccagcggcaataccaacgcggctttacaaaccaataacggcactccggttacattcacggcgacagcgactaacgatgataagaccacagtttccggcaaggtccaggcaacgattggtggacttaatccgttgacagtgcagcggggcacaagttttagcgttaagcctgcagcattagatggcgtgacttatccttctaagcccacttttaaatggcatctgtataaggatcaaaaaggcagtcaggactattcgccggtggctggtgaacaaatcacgaataataccgacactttaaactggcaaaatatccaggcggcggcagggacattgtattatcagttagaagttgaatttgatagcggccaaaagtcttattggtacagtaacatcgccccactaaccatcaccgcctccgctccgcagctgcacgcggttcctaatctgcagtttgcgcttagttcgggcgctaacccaagcattgccgatttttatgccgcacagggtgtgaccatggtgtatcagccgagcacaatcgctaaccagacaaactgggatggtaacaatcatggtgcgttggcgattgctggcggcggtagtacctggagtttgaatgttcagttttcaccgtttaaaaatcagacaacgcagcactatttatcaacggagactggtggcagtgcggctgtgaccttgcattttgctgatgggaccgcggttcaggccaaagataaccgccagccggtgacggtttacagcaaagtgaccaaggacgttaccacgacaaccgctaccacgacttcgctgcaggtgccgcaaacgtcaacgattcagccgggaacgtatcagtctaccgctacttggacgctggtcaaggcgccttagtcgtgtgaaaccaaaaaaaccccgcatcttcgcaatcattgcgagaatgtggggttatttttgcgcatcggcaggcttatgcgtcagattctgataagccgttttgccggatgacttgttgataccaataaaatgatcgtttccgataacgcttcaaagtaccgctgccgtcatcgtgtttgtcgacgtagatgtagccgtagcgtttggccatttcaccggtgctggcggagatgaggtcaatcggtgcccatgaggtgtagccgatcagatccacgccgtcttgaatagcatcatacatggcggcaacatgggcacgaagatagctgatgcgtgccgtgtcattaacggttttttggccatcttgttcaatcaattcgtcgcgcgcaccgaagccgttttcgacgaccattaccggcacttggtagcgatcgtaaatttgattaagcgccgtgcgtaacccgcggggatcgatttcccagccccaggcactgcgctggaggtaggggttcttgacgccagcaaagaagttaccgccgctggtttcgccgctttcagtggtcgccatggtgctggactggtaataagacagagcaaagaagtccacggtgcctcttttaaggagctcttcttcccacggctccatatccatgatgatattgtgatcgcgccaataacgtttggcaaaatagggatagcgacctttcacttggacatcgccgcaataaaaattattaagttcggtggcagtttggacaagggcaatatcttctgggtggcttgtcagcggatagagcatgcgataagccagcatacaaccaattttcaggttgggatcgaacccatgggcaaagctgcagactctggcactggccacaaattgatgatgcagtgcttggaggcgcatttgggtggaatcgatatcagggctgatgaaccggttggtgtcgtccacatacatgccgccagctaagtaggctcccatcggtcgggttagcatattgatttcattaaaggtcagccagtagtggacatcattgtgaaagttggcaatgacagtttgcgcaaatgtaacatattcttcgatcatgtctcgtgacgcccagccgttgaacgccttcgtcagtgcaattggcgattcaaaatgcgagatcgtgacaagtggctcaatgttgtagcgcttgagttcagcaatcaacgccgcgtaaaaggcaagcccttctttgcttgggccgtcgcttgcagaaccggttgggtaaatccgcgtccaagcgatggagaagcggtagactttaaagcccatttccgcaaacagcgcaatgtcttcttgataacgatgaaaatgatcaatggcttcatgactggggtaaaacgcgtctggacgtacctcgcgggtgagttgacgggggacattgtgagtgccgcccagtaacaagtcgctggttgctaaccctttgccgtccacgttataggcgccttcgagctgattggcagcagttgcgccaccccagagaaaattttcgggaaattgacaaatggacataacgacctccttcattaggtttcggggatgaaactgaatagcttatcgcctggccggacagatgctttttcatgcacttcaatccgttcgggaggcgtattcggtagtaaaacaatcaccgtgggatcaaaaccagacttttcaatgagcggcaaatcgatcttaatgagcggttggccgactttgacggactcaccttgagagacaagtggtttgaaaaagcgtccatccagtcgcacggtgtcaatgccgatgtggatcagcacctcttgtcccgaggccgtggttaagccgatcgcgtggttcgttggatataacatggagacagtggcatcggccggcgcgacaatggtgccgctctcaggaataatagcgactccgtgtcccagcgtgccagctgcaaaaacctcatcctggacgcgagcaagcgggatcatctcacccgcgaccacactctgaaaaggttgcgggtgcgttttagcgctggtgcttgcattggtcgcgacggtggcaaagaagtaggtggaaagaaaagtcgcgccaaatgcgatggccacagtcagtaaggcgttgcggaaattagtaggattagcgccgatgaagacggggagggtgaagatccccggtgaaccgaatgaatagcggaccagcccagtgagcccggcaaaaagaccggccagtcccccggaaaccacgacgcaggttaacgcgtgtttatacttgagcgtgacgccgtacagtgccggttccgtgatgccggacaacgcggtgacgctggcagagagcgcgatttggcgtccgcgggtttgcttttcacgcacggcaatggcggcagcggctccagcttgggcaatattgctggctaacattccgggacccataatcgtttcactaccaaacttggtcatggacaaggtcgctaatggcaaaagtgaaacatgcatgccaaccatgaccagcagtggggtgaaggcgccgccgaccagggttggaacgagccatggtgtatgttgattaatgaaggtgaccgcggtataaaggccatcgcctaaaagactgccgatgggaccgatgacaattaaggcaatcggagcggtaatgagtgcgactaacagcggtttgagcatggttttgatcatgttgggtgcgactttttccgcgaatcgttcgacatagctcataaaccagacgattaaaatgatgggaatgacgcttccaccataggatgctaggcgaatgggcgcaccgaataacgcaatgggcttgcctgctgcgaccagcgctgtgaagttagggtgaagtagcacaccggccatcatcattgccagataggtattggtgttgaacttcttggcggcgctgacggcgagcatgaatggtagaaaataaaacgcggcatcagccatgaaactcaaggtgagataggcggtgctttttggattgaggcccactaaggctaagatggcgatgacgactttgaacatcccgccggcaatgagaacggtgatgatcggggccatgatgctgacgatggcgttaagaatgcgtttaattaaatttttctcttgggttggtgtcggttgattcggttcgcctgcttcatgaagctgatattgttgctggatagcggcatagtatttggtcacgttagcaccgatgacgacttgagattcatcgccggccaccacggtactaagaacttccggcattttttcgagttgtgcctgattgaattgctgcttatcgcgtaaagtgaagcggaggcgagtggcgcagtgggtgaggcttttgacattttggatcccacctacagcagccatgatttgggtggcgattttggctggatcagacacggtcaagacacccccttaacgccacggtcattttgccgcgttgatgcccgaatcctttattcaactggttgctcgtgcgacagtcatgcttttgtacttgcaatatgaataacccccttcataaacaaaccctgttattggcagtaaaaaaacagacatagccaagaagatcgtttgaacgataaaacgatgatcaaagttctgtctgtttacccggtaacagtagatgtgatatcagctgttaagcgtatgataacggataccaaaataaaaagcaacctaattagattgctttctgcattgtttgtatccaactatttattatttatctaaaaataaacgataaatagcaagctgaattaaattgtacataaaattaaaatgaataccaacatgttcatgcctaataatctcagcggcgaatgtttaatcaaactgttacggctaacgacttttaggctggctgccagtcatcatacgcttgcgaaaacgcgggtgatattcatagagaatgagggctgcgaggccgatcagccccatgatggtgaccagccaaccaagcggtatccccggggtgtggtaagtgagggtaaaggtagtggcttttttagggactttaatcccaatgaagccgcgataattttgaattttcacggactgggtatctgcttgccagcctttttcgtaagggatagtgagcatgatgtagccactgttgtttttttgcgtggttaacgatagacggccgttttggatgatttgcttaggtgcgttggttttggcggttttaaccgtttgcttgaaggcttggcggttaagggtatacagcgcaaagtgatcgaggtcgatttggctgaaaccgcgattgaaggtcaaggtgacggtggtcggtttcgtggcattaagtggcaatgatacggtcttggagccgttgtcgggatcatttttaagggggatgttgttaatgctgatggtcatatccttgcgcatgccttcacccatcacgagatattgctgctcgctgctagggttgacacttaaggtaatgctggccccaagctttttgtttaccttggttgccacggcattggtgagggtggtcagcggtttgacgttatcgacactgatcccggagaaatcagaagtggtgaagatcggggccgtttgctggttcgtcaaagtggcaaaataagcattttgttgcaagaccggatttgcctgcacttgggttggaattttgctgaaaatctgagtggccacgggtaaggcatccggattttcataaatattaaagagctggttgtgaccgactaatttgtaggctggcaaatcatagcgggcattgaaaatattgcgcgaggaagcttgttgatactcggaagtgccgacttttttactcgtcgtgttgaggagcaataactgtttgacgccgagtaagctttctagcggccaggtgaggtcattgtttttgacccgcccggctgaaccgattgccccgacattggtgagggtattgatggtgctggtgtttaaaaccgaagaaaaagtgctgatcccgttgaagttatattggtagggatcgtccatggagcgttgggtgtcggcattaatgcgatagaacccggatggcccgatttttttagcatcgttgtaagcggcactaagcactttgctggtgacggtgaaatcggctttggagatgaaactgatggcgtcgaggctggcataggcattggcgcctaagtcgatgacaagcaaggtcaaaagtgcgccaaccgtccattttaccgggaataggcgggtggcataactgtagagcagcacggcggcggttaggagcaggataccggcgaggatcagatgcggtaaggtgacatatttgtgtgttcccatgcgcaaggcggcggggatgatgagcagcccgccgatgactagactggtgaggagtaaacgtaaccgagacacggctcgcagctgcatgagtccacggagactgagtagtaagaaccaaaaaatgacaatgaatgagtggcggtataaataccacaccggcgcgcggaacccttgccagataatggcgagaggattgagccagatggataatatcaagagtaacgtcatgccggccgaaatcaagcgttcgcgaaccggaatcgtgcgggcaaggaaataaaaactggcacctaataggccgatcatgcccatatacaggttaggcaggccattagagagctgatcaaaattgaaactacccggaagtaactttgatggcaagtcaatcagcgaatacaaggctttgaaactgaaatcagcacctgcactggaaaggcgggaagcactcagcgcgtaataggtcggaatgagcacgaccgccgcgatcataccgctgagtagcgagccaataacaaataggctgatttttcgcagtaattgcggttgatgttgaatcgcccagtgccagccaaagtaaagcgccgcaaaaatggcgaccatgaagccaatgtaataattggtgatgaatgccagactcagcgggatgacgtatggtagcagccgttgctcatcaaataatcgttcaatgcccaagaccacaagtggtaacaggattaccccgtccatccacatgatattcaaaaagttggcaaccagaaatccggatagaccatagctaatactgaagacaaagctataccagcggccgcctgtcagataattcgccaaggcttgtgctgccatggccgcggtgctgtatttaagcgcggtcacgaataaaaccgccactggtaatgcggagcggggaaccagaacaaatacgagattaaatggacttaacaaatagtaagtccagttggcatacatgccgccgccaagactattggaaaaagaataagctttaccggcagtacccagcagtgcgtgttttaggtaagtaaagaagtcgacatattgaacggccgagtcattagcaagaatggatgatgagccaaacggagccatttttaaagccgcaaaaacgatgaggctgatgacaaaagtaacaccgaaactaatgaagagtagtggccaggttgattgtttgtttgaacgcgacatatcagacgaggactcctttttgaaaaccttgaaaatcaaatattgtcattaattatgatagcaagcgaaataacaggttaaaaaatcaggtaaccttaactattaattaaatcataacgcagaatggctcggcacgcgatcgtcaggaactgagcgcgagccggcgcgcttagaagtcggagtgtaagtggcctcaggcgtgatgaccgtactttggtcattgcgcctgaggtccttacacgcagacttctgcgccggggagcgcgttatggcgatcgcaccgtcccgttcctcggcacacatgacaacttacgatttgaaagttacaatattgggaaagcactagcgggaggattttcatgcgcgcggataccgaagattcaggtttagtttcacagcttaaggccaatgcaatctggctattgccacttttagcgattattttggtgttgcttgtccagtggccgcagttacatttgacctacattttccatcaggatgatacgatgccgcagttacgccgaatggagagttatgtgaccagcgtccggcatggtagctactttccaaaagtctttcccgaagaagtacgcaatttcggctatgcttttgatgccttttacccgtcattgttgttattgccatatgtctggttgcgactggcagggatggggattgtcagtgcttattacggctatcagacgctgattctagtggcaactgtggtcacggcttacgttagttttttgcggattcgccggcagccactggcaggattcgtctttagtctggtttacacgacagcggtttatcgggccttggatgcctttgtacgcggggctttgggcgagaatttggcgtttattttcttgccggtgattgctgcaggtatgtatgaaatttatgccaagcagtcgcgtaactggttcttgctggcatttggcgtgactgggttgatgtatgcgcatatgttgtcactcgtgatggtgctggtatttcttgtcggcgggttcctggttttggtggcgttgcagcgggtaacgtggcgcatggtcagatatacggccatggcggcagtgagtgcgttgttgatgggcttgggcagttatttgccaatggtcgaactttcccggcacctgtcacttaaactcgcggattcggcaacgatttggcccaattatcttcaattcaatttaggtgatttagtcacgaactcattgagcatgtatgcctcaaccagcagcatgcaaaatgtcagtcaggcttttcggccggggattggcgtcttgatgcttgtgacggccattgcactcgccattttttgggtaaagttgtcgcgggcagtcaaagttgcggctggtttgggctttatcggtatttttctaagcactgatttatttccgtgggcattatttagcaaaaccgtgttaggcacgattcaatttccttggcgatatttggagttagtgaccttattcttcagtctggcgcttggtcttttggttgcagatcggtcgcaaccgcaaccattagctttggggttggtgctggcgacttgcatcgtcggctttagctatgccgttaatatcaacacgaccatgatcaatgccaacacttaccgcattacagataaaaatgcggtttcatactatcaggattctaccggtggcggaagtgaatatgcgccgcgagaattcgacatgaccacattctttaagaaaaatcatcagacggttttggcgtcacataaccttgagcatgttaccaccccgacccaaaactacaatgacatgcaattttcgtacacgagtcggcgtgccgtgacgctaagattgcctaagtttgcttatgttggttatacggtgacggttgatggccgcccaactgcctatcacccaagcggcaaacttgaccgtatcacgcttcatgcacccgcgggtacgcatcatgttcgggtggtttacaccggaaccgtcttgcaacatgtgaccgggtggatctcgcttgtcgctgcgtttgtctttttcgcttggtggatcgttgtccatgctcggaggcaacgggatgtggatgatgcgctggtttagtaagtttgcgaaaagcgttgaatgtgcggataacaagcattttaaaacacaatctcatggcagtttttgaacagcggcaatttctgaacttcctaaaattagatatattcggcgttcttggactgtgagaccccatatgctatgctttctgaagggatagatagggtaaattatgttcagcgaagagatcagaggtgatgttgaagtgtttgaagataagtataagatgtccgatgcggaagaaaagttgctgtttgagaagaatctgccttccatgatttatcttgctggaaagtacgaaaacttaagcaccacattgctcgatactaaagcaattatcaataatctgaccattagcggggttaaacctgatgatgttgaagttgtccttaacttaaaagcagcttacaaatatatcgtcggattaccgcagacgattcagtttgggattgaacaaatacagaaaatcaatcttatcattcaaggtgcaggaacgcctgacgcaggtaaattcaggactaagacggtattagtcggtttaaccaacgaagattatgtccctgccattccaaatgaagccaatgtcaccaaaaatctggaagcgctgttaacctctcaaaagagtgctactgaaaaagcgatactactgatgcttacattgtcacggcaacaaattttcacaaacgggaataagcgaacggcgatagtagcggctaatgcattgatgtatcaagctaaagtcggtttattagcagtgccagagaaaaagatgcattggtacctgtctcaattagccaagtactacaaaacagggagagctgatcaacttaagcggtggctgtatgaacatgcggtttttggcattgaataagtgatgtttcgattgaaaatggtagttgttttgagccattctgttggcatcgcgatataaccagaaaaataaggcaagctgaccttgattttgcaaagtcggcttgccttattcacttaatctcgcgagcaatgaagatggggcgccttttggtttccaaatagatgcgaccgatataacgtcctacgatgccaagtgcaaagagctgcaggccgccgatcatcagaaagatcgagaccatagaaggccagccggatgtcggatcgccgaacaaagcggcacggacaacgatgaagatgagagcgatgaacgcaccgatgaagctggtgatgccgacaatggaaacaaacgttagcggggcatcggagaagtcgatgatgccatcagtagcataacggagcaaattggggaacgaccaactcgtttgaccgtgttggcgttcaatattgcgataaggtagatacttggttttgaacccaacccagctgaaaagtcccttggaaaaccgattacgctcggtcatttggacaatggcttcaaccacttgccgcgtcattaagcgaaaatcacgcgcgccgggaacgatttgcgtttgcgacactttattgatgaatttgtagaacatatccgaaaagaaagaacgcagatgagcctcgccagaccgatccacgcgctgagctccagccatgtcgtagccttcttgtaaaattgcgtacatatccggcagcattgatggcggatcctgtaagtcggcgtccataacggcatagtagtcggctttagcagttgaaaggccggcatacatcgctgcttctttaccgaatgagcgggaaagatcgatataatgaacctgatcgtctttagcttgcaactgcttgatttgatcgagggtatcgtcagtagaaccatcgttgacataccagatttgcggttgcaattgcggcaagctttcacgaaaagtcttgatcaatgcttgataaatcagtggaacattttcggtttcattatgacaaggaataataattgccacgctttggggcatgaaacggcctcctcgatttcaagttaattttcttaataaattgatgattcctagcaaaatcaatactcaatcatcatgcatcgttttaacggccttggccaagctgtcggcctgacttgatacggttgtcaggttcgcagtcatgacatcgatttgctgattgagtgagctgtaatattggtttagttgggagatttgcgtttctaggtcggcttgagacgtctcttcactgtcagcagtgttatcaaaaaaggcatcttctgctgtctgcatttcgcggtagtagctaaccagcgttttgtgatccaatttggcgagcttcagacttgttagcactttgttgacttgagtttggggggtatcatcggtcggctggttatttaacttggtgagcgtgttattggcgtttactaaagcagtattggctgcctcaagctgtttgaacgcagctgcacgtttggcgagcagctttttaacggggccgtcatcatttctgaaatctgtatcaggatgatcttgatacgctttttcaaacgttgatggaaacgcgccgacgctatcaccaataatttttagtgcagcttgttctttttgcacttgtgtttgaacggtagcggttgtggtttttaattgttgtttagggtttaaagtggccgaacatccggcaatcagaagtgccagacccgcgagccatatgagtatttttttcatcagcaactcctctaaatatatggtagcgtaaagccggctgaaatactagcagcagggggattgcaaatgaatttcacccctgaatcctgtttcttcaggatacgagaaaaatgaagcggcaacaagttcttttcaaggatcatgataaggtggtcggtcagtggaaagtttacgtgacgacagccgcggctaacggtaaaataacagatatctgagcgcacatagctgacgggcgggctaaaaaatttgtggtgtaactggtttgatgcgttcctatgctaaactgacaggtggagggtgatgacgatgcacattgggatgcgcacaatcaaaacagcggtagggacagcagcagcgatgttgatcgcttattcgttgcacttggaatattgggccgctgccggtattattaccattttgtcagtgcaaaacacaacgaaggcgtcgtttcggttagtcgcctaccgcttattagccacgctgctaggattcgtgattgcgatcggggcgttcttgattttaggctacaatgcgtttgcttttggcgttttcttggtgatttttattccgattaccaatgtgttcgcggtccaaagcgggattgtgatgactgccgttttggtaacgcattttatgatggcgcgcagttgcagttggttttggattaaaaacgaacttttgctgctggcgatcggggccggggtggcgctcattgccaatctgtttatgccaagtcttgaagctaagatcatgggctttcaaaaacaagtcgaagccgagatgcgtgaaattattgatcatatgagtcagcagttagggacagatcagcttaaaagtgcggacaattgggccaatttatctgatttgaagatgacgctggacgcagcagttgcgtgggccaatcgacatagcgataatcagttgttgtctgaaaatgactactatcaggcctattttgaaatgcgcgcgaatcaatatgaactgctgcggcagatgcaagatagtttggatcgtattgaaacgccggtgatgcaggcggcggtgatcagtgatgccttggcaatgacagccagtgttttgaatgaagacaatccggcagcgcaattggtgacaatggtgaagaaaattcagcgtgattttgctgcctcacctctgccaacggatcgtgcttcttttgaaagtcgcgcccggttgttctattttctggaggatttttcccggctgttgcagttgaagcggaattttaatcatattatttcttcgcagaattgaatcagacgagcaattgcctagctgagcgaatggcgtaaagtttcagtgggtgttaagcaaggctgcatcagtttagacgattttagaagcagtgcgatgggtcaccttgttcgattattaggatagaaagcaagagctggcggagcggtggcgggctcagtggtgaaattggtcttaagcggagtgggcttctccgctttagaccaaggccgagcttcgaaaccgcggtctttgcgggttcgaagtcgtgcccaccactctagctgcgcggtcgccagccccagccaccgcggagccagctcggagtatcggaaatcacttaattagagtagaaccgagaaaaacctgacacttacttgaaagcgttcctacttgcttggtttttaccgtgatgttagactaaacatgtactttttgaatggtcgtggttgcatggtttcaggactttcttccacttgtaccaaacagaaatacacgatattatcatgcgtcaataggcgcaaggaggaatgttctcatggaacacggcacagttaaatggttcaatgctgaaaagggttacggttttatcacacgtgaagatggcagcgatgttttcgttcacttctccgcaatccaaggcgaaggttacaagactcttgaagaaggccaagcggtaacgtttgaagttgaagacagcgatcgcggcccacaagcggttaacgttaacaaagactaatttaaaagtttcaaaacaaaagtgtactattttgaattttatttcaaaatggtacactttttcttttgattaggtgattagcgtttagcgcttcaaggctcagaagtcccgtctggcaaactcgggatcagataacacgcttaagttcaatcaccgtaaagcacaagtattgccgtggtttgtaatgacacatatcattacaggcgaaagggtgacaagcatgactgttaaaacttatcggctaggaaactcaattgtggttaccgttccagcgttattcaatattggcgaaaacgttgaatatcaaccgattattgacgaaaatggcgtcatcagcctgctacctgttaagcatcatatcttcaggggtaatgctggctacgatttacgtcaggcaatgctggaagaaaatattggtgacaatgatattccaattggacgtgaggacgcctggcatgaatagtgataatcagatcccatatcagtaggcaggttgggtatttgaatacattaaaagatcaatcatttatgtctgtctatcaaacattcaaaaaggggtctacactttttggcgttggtgatatatcaacactaaagatgtaggccttttttggcgatggagagcttcataagcagctgttcatggtaaactgatagttagcagttataagcttaggattgggctatggaaggcggggggcacatgctaagatttgaagaggtagcacctgatgcaagactccaatatctggatctcttgttggtgggcgatgaggatccggctatgcttcagcgctatttaggtgcagggacactttttgcggccattgatcagcaggtgccggttggcgttgccatggtggtggcggtcaatgcgaccacggtagagttgaagaatcttgcggtcacgcctgcccgccgccgtcaagggattgcatcaggattattgcggcatgtcagtttggtgtacgccgagaaatatcaggatatgctggtgggtaccggagatgttgattttgataatcttcggttttatatgcgccgcgggtttcgatttgattcgattcgcaagcatttttttgatgaatatagtcagccggtttatgctgatggcttgcgattacaggacatgatcgtgttacgccgcaaattgttgttgacgcgtgaggataagacaaaggagtaaggctattggcgaaaaagcgccgacgttttaccttaaagaaggttccattggcggcttggctggtcatcgctttttttgcggttggttcaatgttggttgtcagctcgtattggtcgcaacggcaagccgaagtttcacagcgccaagcaattgtcgataagaaggcggctgaaaaagcgaagaaagaggcttttatcaagcgattggtgccgacagcccaggccatgcagaaacagtatggtgtcttaacgagcattacgctgtcccaagcgattcttgagtctgattggggaacgagcacgttagccaaggattaccataacttatttggcattaaagggacggatcctgccaccacgaaagtattacggacgaaggaatatgttaacgataaatggattaccgttaatggtcggtttcgggtttatagcgatgatgctgcttcgattcgtgatcatgccttgttattcgttaacggtaccgactggaatccgcaacagtatgcaacggtaagagccgcaaaagattataagactgctgcctcggctttgcagacggacggctatgccactgatccggattatccccagaagctgattcatttgatcgaagcatggaatctgacccagtatgacaattgaatgttcgtattttgttgattattgaatcctcgttatttggttatggtagcgccaaattgcggggatttcgttcttttatcgctgtgaaagcggctacttagtttgttcgggaattagtgagcttgtattgttccacggcgttttttatggtaagctgattgaaaatttacaaataaaaggagtgcttgtggtgaaattactggaagaccggattaaaaaagatggccaggttattggaacagacgtattgaaggtggacaactttttgaatcatcaagttgatcctgatttaatggctgatcttggtaaggaagtctaccggcgtttcagcaatgagccgattacaaagattttgacagttgaaagttctgggattgccccggcgattgccaccgcgatgtcgttccacaagccgctggtgtttgcccgcaagcataagagtctgacgttgaaagatcacctgtacacagcaacggtttactcgtttaccaaaaagacttccaatgagattgccatttcgcggaagtttttgtcggctgatgacaatgtgttgattattgacgactttttggctaacggacaagcagttgaaggattaatggatattattgatcaggctggggcaactttaagcggcgttggtattgtcattgaaaagactttccaaaaaggccgtaaattgttggatgataagcacattcgcgtggaatcgttggcgcggattcgtgcatttgaagacggtcaggttgtttttgaaccggaggactaggctcgaagatgaagaataaaacaatttccaatccaaaagcagcggcattggggctgcaacatttattagcgatgtattcgggttcagtgttggtgccgattttgattggggcatcgttgcactttacctctgagcaaatgacgtatcttgtctcgattgatatcttcatgtgcgggattgcgacggctttgcaggtgtttggtaacaaatatttcggcattaaattaccggttgtgttggggtgtgcagttcaggcagtggcgccgctcattatgattggccagaagtttaacttccaaaccatgtatggcgccatcattgttgctgggctgtttgtttttctcattggcggtgcgttttctaaactgcgctttttgtttccgccactggtgaccggttccttgattaccgtgatcggtctgtcgctgattccggttgctttccagaatctaggcgggggttcgacgacagccaaagacttcggcaatatgacgaacctgtttgtcggcgcatttacggtattattgattttggctattaatgtctggggacgcggcttcttgcattcaatcgcgattctggtcggcttgattgcgggcacggtcttaggcgggttcctcggcttagtcagttttcagccggtcattgaggcaagttggttccacgtcccgacgccattttactttggggttccacagtttgaatggagctcaattgtgaccatgattctgatttcaatgacgtctatggttgaaagtaccggtgttttctttgcactaggggatattgtcgggcgtaaaattgaagcagatgacctgaaacgcgggtatcgcgcagaaggcctagccgtggtactcggcggtttgttcaacaccttcccgtacacaactttttcgcaaaatgtcgggttggtgcagctttccggaatcaaaacccgcaagccggtaatttattcggcagtcttcttggttatccttgggttgctgccgaaaatcggcgccttggcaacgatcattccggcaccggttcttggtggtgctatgctggtgatgttcgggatggttgcggtgcaaggtatccggatgctgcaacaggttgattttgaaaatgataagaatttactggttgccgcgatttcaatcggtttaggcttaggggtaacggtacagccgcatattgttcagttcttgccaaaaaccattcaactgttgtttggatcagggattttgatgacaagtctgagtgcggtgttgttgaactggttgtttaattcaccaagtcgtcatcctgaaatgccggttgatcgcgggttaaacgaacaggattcagacaaataaagtcaaagcgaggaacaattgtgacgcaatttattagtccaggcgctaccatcggcattattggcggtggcgtatcagcttttcgcatggctgatactgcaagcttaatgggcatgcggactgtggttttagcaccgacccaaacggatattgcactggaaaaagccgatattccgttggtcgggcaagcggatgatcgggaagcattaaaagagttgacgcaactgagtacggtcatgacctttaccgatgaaaacgttgacggcgctgtattggctgaattagcaaccagcagccaattgccgtcaggaaccgatattttgaccgtgacccaggatcggtacttggaaaaggtctttcttgacgatctcaacatgaatattctgccatatacccaagtcatcacgcctagcgatattaatgaagcaattgacaccattggctatccggccttattgaagccaattcaaaaggggatgggcgtggatcagcagttgttgctggcaaccccggcggatgtcgatcgcgccaaacaattactgcagcagcgtccgtacattttggaagcctatttgcaaaatattaaagaagttgccgtcatggtcgccaaggctgataaagaaatccgaattgggccggtgattcagaattattttgaacatcatcaactcaaagcatcttcggttcgggctgacgttgatccggcggtgattgttgagattcgccgcattgcagaaaaaattgccaagaagcttgattataatggcattttcagtcttgaatttttcttggcggctaacgggaccctgtacgtcaaacgggttttcccggggccaaaattgtatggtcacctcatgcaatgtaccagcgatatttcggaatatgaactacatctgcgcgcgattctcggctggccgctgccagaactggaattggccgaagatggcgttgcgattccgttacggcaaaaagacatggatgcggttttgacgcagattcaaatcaagccggattggcggtttgctttctatccgactggcaatgagttagtcggcgagattgaaatcgttggtgatttgaaagcaataaaagacagcatcaatgccacgggacattttgtgattcagtaaagattctcgagcgtgccggctgcatggaaaagtcggcatgctcaccggtgatacgatgatgagtatagaacatggcgcttacaatagaggaggaaactacctgtgattccgcgttatagtcgtcctgaaatggcggcaatttggtcagaaaaaaatcgttatgctgcatggctggaagttgaaattttagcggctgaagcctggtcgaaactaggcgaaattccggaagccgatgttaaagctttacgggccaacgccaagtttgatgtcgatcgaatccacgaaatcgaagcggtcacgcaccatgacgtggtcgcatttacgcgggatgtttccgaaagccttggcgaagagaagaagtgggtgcactttggcttaaccagtaccgatgtggtcgatacggctcaaggttacttacttaaacaggctaaccagattctacgtgcggatttagccgtattaaaagcaagtttggcgaaactggcaaaagcccataaagatacggttatgatgggccggacgcacggggttcacgctgagccaacaacattcggtctggttgttgccacttggtattcggaactcaatcgcgatattcggcgatttgaagatgcggcaagtgatgttgaagcaggaaagatcagcggggcggtcggaacttttgccaacacgccgccagctgtggaagcttatgtgaccaagcagctaggcattcgcgcacaggagatttcaacccaggtattgccgcgtgatctgcatgcccattacattcaaacgctgggcctgattgccacctcagttgaacggtttgccttgcagattcggcatatgcagcgaaccgaagtgcatgaagtcgaagaacattttaacaaggggcaaaaaggttccagtgcgatgccgcataagcgtaacccaatcggctcggaaaatgtctccggattggcgcgggtgattcgcgggtacgaaacgccggcactagaagatgtcctactatggcatgaacgggatatctcccattccagtgccgaacgtatcatgctaccggatgcaaccggcttgctagattacatcctgcatcgtttcacgagtattttggatcatctggatgttttcccggaacggatgaaggccaatatgaacctcacacacggcttgatttatagccagcgagtgatgttaaaactcatcgaaagtggtttgagtcgggaacaagcctatgacctagttcagcctaagaccgcgattgcatgggacgagcaccgcgacttccggccgctgttagaagccgatccggaaatcatgggccggttaagcgaggctgacttagatgatgcgtttgattatcactatcatctcaagcatgttgatgaaatcttcaagcgcgttggactggcttagtttcacaagtttgctcagaatatgataacgaaaattgacgctagaatttttctagggtcaatttttgtgtttaaattttaaatttgaacgacagtcgttatccggtacgctagcgccaactttttcaaaatcggtgccggtgacaataatcgcaaaaaaagaccttgcaatgtaacttcgcaaggtcatttggtaacggcatgtagtgataagacaggtggttgttgccaagcattttgaggattggcactgagcagcgattgatcggttgtcaggaccaataagcagctttcggtttgttgcaaagcatggttggcttcggttaagaactcgcgggtaacttgcggatcaaaaatctcggcatgaccgcttaatagtaaatatcgttttttacccatcaaaccacgataaaattgcaaatagatccgttgcaacgtgtttaaagtggccgcgggttgatcgagaaccggagaagtattggcaagccattccggcaaaaagtccgtatgcttggtgtgcccattgatgcaaaggttattccgaacactgagataatccaagataccagtgtcgcgactactgatgaaagcaagttgcttgatgaggccaccattaataaaatccttgatatattggtcgcgtaatgcggtcagtgcttcctcatccgggacgtataaatattgaatcgttttaggcgcgaaaagctttgcaagtctttcacgatagatatcaagctgctttgaccgaaataacatagctgtctcctaacgcggcatgacaagccgtttgcgaataatcgaaagcggggttaccaagcctagattggtgacgaaaatcacgccaaggccgtttctcaatgttgtcaagaagccggccggttgggtgaggtcgtccgttttaccgccgtaatagaataaggtttcacgcgtaaagccagttaggtgacgggcaaagagttgctgaaaggcgtgattcatgtcaattccacgatagccttcctgtaaaagatgaccaaaagcagaacgattcgcattggtcagaaactgaatcagctgatcattaaataaaataatcagaaaaacactaatgataaagctgattaagaaactgaaaaatgcttcaaacgcatattgtaacccgatggacatgctgcttttgccgaccaaataaagcgcatcggtttcagaacgtcgcagaaaccacagcaaggccgtcccgatcaaccagcaaataccattaatgatgacgacacgatttaataatgtttgcgtgatttgcatcattttaatatgggcttggccaacttgcgtacttagcagaatcgtttgtttattttgggtaccaaaagaatttagccgctgtaaaaaagcgctttgtgcggattggtcgatcatttcactcgttatcagcatgatgctgatcaagcagaacgcaactgacagcagcatcatcacaaagtaataacggcgatgataacggaaacccgagaacgttcgctcaaagaaatgcatctacccgttcacctcacaagcagtataagcaatgaatttgaacaaagtgtgaacataaaccgagcattcattatgttatttgattcatttgagctggttattcttgatattgagggtactggagctgctagatgcactgctgctagcggatgaatcggtttgattttgaactttttccggaaaatcggtgatcggtgaggtgtcatctgctaattcaggcgcatcggtttgatagagtccggttgttgattggtcgttattttcgctataaagactcgtgctcttgctgccgcgaccgtgttcaatcgacagcacattgctgagactttgattgtaatcatactggctgggattaatcggtttaaagcctaatggtacatagaaacgcaatagattacgattagcaacgtcatcggatagactaagccgcgtgtcaactgatttctggtccttatcaatggttgcttgtaaggctggcgtcatggtcacgagtttgccagtcgtattatcataaactttgctgcctaaaacagtgtacttcggggtgacaaaattgtgatttcgaaaagcaacgacattgtcatgctggttggaaagcagatcggtaccaaattggacgtagcgcttactgctgatcccaagcaaatgcagtagcgtcggtagaacatcaatttcgccgccataagtattgttcacgccgcctttaagacccggcatgtggaagattagcggaacccgctgcagttgggcatcgtcaaagccattccagtcactggcgtctttacctaacaatggcgctaaggtggtattacgatcgttgctgataccaaaatgatcaccatacagcatcacgagtgaatttttttccaaaccactggccttcaggtaattaaagaattcccgtaatgcttcatcaaggtagtgagccgtcttgaagtaaccgttgatcgtcgcgtcatcagtaccggcatccgggaaatccgaatccgcctgggtgatataaaatggattatggttactggtcgtaataattttagtgtaaaacggttgctggagatgctctaaatacttcggtgtttctgccagcatcaatttatctttaatcccatattcggtggccgctttttcatcatgattatagaagttgccggaaaagtaattgttatagccaagactcttataaacattatcgcggttccagaatgaagcggagccgccatggaagacagcactggtatagccagcgcgttgatttaaaattgccggggcgccttcaaacgtattttccgttcccagactgctgaacaaggatccattggcaatcccgaacgtactggtttccagcatattttccgcgtcactggttttgccgagtccgacttgatggaagaaattattgaagcttaacgtgtctttttctttaatcaacgagttcagaaatggcgttacttcctgaccatcgattttttgaccgatcagaaattgctggaagctttcaaggtgaatgatgatcacgttcttgcctttagcggctccgtaatagctagcgttaggagcggcataatgcgaacgcgtgtattgtagaaccggatcgagattggcactgtctgcctgagcccgtacctgattgttttgtgccgttttagctgcatcgtaaattgtaaaaggcgccaaaccgagatatttgacgatgtaattacgatcaaaggtccgcgtcagcaactgtggtcgattcatttcactcactgccgtcatcaaagcaaaaaaggcaatgccaaaaaccgtcaccgcttggggcagatggaagggcaggcggctggtatccaacgacagcccaaaatgcggccacttaagccgttgattatggatatagcgccaaatattccagatgctgtaacccaaataagctaaaattacgatcacaatgtccagaatataaattaaatcgtggggtttgaccatacttaaagaactggcaccgagtccttggctgacttttgacacaccaagaatcgttgtgaccgtcaagaagtcggtaaattcacgataataaaggacgttggcgagcaataataacgtgcttaatatgtagacgatcaggccaatagcgtaaccgcggcgggcatgcttggggtatagccctaatgacaggagaataatgcccgttcccaacggatttaagatgagtagggtatattgcagcgggtcattcagcccgagcgagaagtcaacgaaatacccgaaaatcgtttttgcccacaataaaaaaagcagcagggctaagaagccgattcgagtattgcgtacccattgtaaaagttgattgagtcgtaaccgtttcaaagcggcaactcctttccactttgttctttgtcattgtacccgcaaaacggcaattgcacaaaaagagacggtaagcgcgagccggcgcggttagaaaccggagtgtaagtggccttatccgtaatggcccggtcttggccattacggataaggtccttacacgcaggtttctgcgccggggagcgcgttatgggcgtaaaagcggatctagtagcctcagacgtgacggccgtactttagccattgcgaccaaggcccttacacgcagacttctgcaccggcgagcgcgttatgggcgtaaaagcagactagtaaccttgagcgtgttcacaggttttgggtcattgcgtctaaggtccttatgtacaggttccgggctggtgaaggggaaccgccaatgataattgctgtattcaatagcgtaccgcagtttgccttaacctaggcattgacggctgattcttatggagtctttaaaagttgcaacgcttgtgggtatcacgcgttgtgtttgctacaatggcaactggaggtatcgccatgctttttttggggccattttataactggattaattcaacgtctttgagtcaggtgaaccattttcctttggtgcggctcattatttttagtctggacaagaccatcctttacctattagtgtttgccgttttgcgatgcctctggctggttcgacatcatcggcgaacgacattcggacgcgaactgaaattgggattgtttgtcggctatttgatgctactgtttgcactcacggtttttcgcgatgtgtactatccgtggcaattggtttttcattggcaacgctcactttctgtcattaatctacaccccatggtcgaaacgctgaaattgcggcaggccgccagtcattttgacttatggtatcagtcgttaggcaatgttgcctggtttatgccgctgggctttggcattccttgggtcagtgtgcatcggcggcgattgtttgccgttgtcgggatcggacttatcacatcattaagtatcgagactttacaattcttgctgattagcggcgttgctgatattgatgacgtcatctttaatgttatcggcgctattttgggatatgccttttaccggttattgcatccaaaaggttagacggcggtcgcttcaattgaagcagtcaagctttttttcgcaacactaaccgcctacctgcgcgaaaaattcgacttgttttgctgggaaaagaacgatagaatatttttttgtgttctattttcgataaaaaacgcgtatatctgcaggcgcttctgtataaagactttctatggaagaaacccacgttcatctcacgtgtaaagtcgtttatatgaagttttctaagcaggtgtattcgtactcagttaaacgatacgataaagaaagaggcgcattatggtatttttacttgcgttgatcccggcacttgcttggggttccattggcctggtcagtggcaaacttggcggcaatgcctatcagcagactttggggatgacgtttggcgcgctggtttttggcgttggcacgttattgatcatgcatccggttctcgacactaagacttggctgcttggcattatttctgggttattttgggcattaggacagggacaacagtttcagtctatgaaatatatgggtgtctcaatgaccatgccgatttcaaccggcatgcaactgattgcgaccacgttggccggtgcattgctgtttcatgagtggcatagcggccgtgatgtgttgcttggcattttggcgttggcgttactaatcattggtgcgacgttgacttcgcggcgggagcaaaatgatgacttcacctcggaaaccggcgtcgctaagggtttgcggacgttactgatttcaacagcaggttatgccggctacacgattatcgtcaatgccggccagcttggtgctttggcagtggtgatgccgcaatcgcttggaatgattattggcgctttgttgatgagcatcgggcatgagccttttgctaaagccactgcgaagaatgttttaaccggactcttgtgggggaccggtaatgtgttcatgctgttgtcaatggcaaatgtcgggttggcagtttcctattcactttcacaaatgggcatcgttatttcaacgtttggatccatttacttacttggtgagcataagacgcgtaaggaaatgatctgggtcagctgcggttcggctctcgtcattcttggcggggtcgtcttagggatcatgaaagcaaagtaatctgatgagaagttgctggattgcttgcttttttacaaattcaattttaaagttaacttgttagagtgtgaatttgaacagcgtactgcactggcgtaaacttttggttggaagcggtgccgctatttttgatggcgatgccggtttgatcaaaagtttcacggtaaggtacgtatttagaggaggaacgcacacgatgtcgtacatcaaatttgattcatctaagctggataagttcgttcacgcgaatgaacttgaacagatgcagccgttagtaactgcagctgacaaggaattgcgtgaaggtacaggtgccggcaaggatttccgtggttttctcgatttgccagtcaattatgataaggacgaatttgcccggattaaggctgcggccaagaagattcaaggcaattcccaggtctttgttgcgattgggattggcggttcttatttaggcgcacggatggcagttgattttctttcccaaaccttccgtaacctcgatcctgagctaaagttcccagaagtctattttgcgggtaactcaatctccggtacttatttagctgatttgctcgacattatcggcgatcgtgacttctcgatcaacgtcatcagcaagtccggtaccacgactgaaccttccattgctttccgtattttgaaggctaagttaatcgaaaagtatggtaaagatggtgccaaggaacgaatttatgcgacaaccgatcgggccaagggtgctttgaagcaagaagccgatgcggaaggctacgaagaattcgtggttcctgatgacgttggcggccgcttctcagtaatgtcagcagttggcttattgccaatcgcagttgctggcggcgacattgacgaaatgatgcgtggcctcggtgatggtcgaaaagcctatgcatcagctgatttgaaagaaaacgaagcctatcagtatgcagctttgcgtaacatcttatatcgcaaaggctacaccaccgaactactcgaaaactacgaaccaaccttgcaataccttggcgaatggtggaagcaattaatgggcgaatctgaaggtaaagatcaaaagggcatctatccttcaagcgctaacttcagtactgacctgcacagtctcggccaatacattcaagaaggcctccgcaatctgatggaaaccgttgtgtgggttgaagaacctaaccgcgacctaaccattcctgacgacgcgcaaaaccttgatggcctcggctacttggctggcaagaagatgtccttcgttaaccgcaaagcttacgaaggcgttgttctggcccacacagatggcggcgtcccagttatgaccgtttccattccgaaacaagatgcctacaccttaggctatctgatctacttctttgaagcggcagtttccatctccggctacctgaacgggatcaacccattcaaccagcctggtgttgaagcttacaagaagaacatgttcgcactgcttggtcgtccgggttatgaggatatgaccaaggaattgaacgcacgcctttaatcgcaagggtttgcgcgatttgaaataaggtaaataaagagctccagaatcatgttggaaaggtccgtggctgagttgtggctgtcagtcaggagttatcaactggttctggggctttttttatgggcaagtgttcgggcagcgtttgaatttgttgctccacaagagctgaagcagcgttaaaaactaaactaatgctattaattgcttttgactccagggttttagctcagttccatactgacgcgctaaattacgtgccttttcggggagagcattttcaacgtcattatagataatcaggtatctaattttcatttttccttatctatattgattaggattgattacgccgaatagtccatacgaataatttcaagcggcgcatctaagaaggaatcgattccagccaaaaactgcttgaagtgggaggtttcgttatgtgatgccactgcttgggcatcctgccagtgttcgatgatctcgtatttgttgggatcagtgaggctttggaagtggtcatagctgaggttaccggcttcagcacgcgatcccgcaaccaattgactgatgaactgctggtagtcgctggcaagctctggtttgacgtgtagggtaacattaataattttcattttcttcctcctaaaggggttttggccacgagggcgtaatgtattgatagaggcgttcttagaaggcaaatttttgccgctaagatcgtcactacaactgattatactagcaaaaaatgggcagcaatcgaaatggggtggggccataacttgtgatgagcttatttcagccggaatgggtcacaagattgggtaaacttgattaaggatttcacgagatcggttccggtgcgagcgcaaaaaagccgttgagcagacagttgatcaacgacttttttctctggacagaaatatttaatttttggtgcttgttccgtcggcgtaattgatggtgtatcctggttcgacattaaaaatatagacattgaaatgaatggtgttgtcgccgatgctttgagcacgcatttgaacaccgcgtgcaacgagttcgttaccgcggaaaattggctttacctcgtaacggacgtagtggtcattactttgtttgagataataagcgatatccatttcatgagccaacatcaagggactattgagcgtttgagtaccggtcatgagattctttgggttattattttcgccggtcagctggtacccgattaaatggctacgattatataaccatccatgtgccgtttttttattgtgccagccggttgggttccaagttagtggttcgcgtttggctgaaggcatgagtgagcggtttaacaaggcattggcatcggtcactcggttgagactatctaaatcggaataagtggcccatgcgccttttgcagttgaaagatcattttttgaaaatgcgggatcgttgttattgacggttatttcttgctggccggtataatcgagattggctaaagtattggcatccgtggtacctgctgtcgtctttgaagcttctgtgcttggcttgctgttatctaatgtcgcttttagactgctaacttcttcacgtttatcagcaatagcttcatcgagactgctgatcgcagaattagtcttattattaagtttagtctgatcggccacaggatccgtggatggtgaggttgattttgaggtgccttgagtactgcaaccggttagtaagagacttactatgagcagaggggtaagatatttcattaactttgttttcattagcgtaatgcctttcgataaccagccgatgatgcctcggcttcggtatggaagtagacagcatttgcagcgttcatatggtagccggcttgaccaggaacgtgatagatcttgctacggctgttgccaacgatggttccttgcgtgccagtatataaatcaccttggtttgttggcgtttgctgctgtgccggtgcagcttgctgttgtgctgccgatttctgggcttcttctgcttgtttggctgcggctgcatttgccgctgcttgcgatgaggcagccgcttggatggatgccgcagctgctttacttgcagattcagcctgagatgctgatgtggatgcagcaatagatgaggaagctgctgccgctcgcgatgaggatgctcgttcgtctgcggctgcttcgagtttcttttgttctttggttaaggcttttaactccgcgttttttttagcttttactgccaataagacttttccgtgtgttttttcggcgttcagcagttttcgctgttttgccgttaaccttttattaacaacgcttgattgcaaagttgaaactgtcgatgtttttgtgtcacttatcggggtgccaatgaacattaaaataataccgccaattagtagaattaggttgagtcgtttcgttgacggatgtttccgttgccgaaataagcgcacggcaccccagatagtcccacccaatccgagtaagattaaaaagtcgcccaatgtagccatttttctcctccaatattgctaggttcgaactaggaataatctcgaataagaatattcgtcattccttatttacaaggtttattttcccagaaaaaaagcttggcggcaagcgtcaagctcgatttgaattaggacttcaccacgtcaacatcggcatatagactggcgatgatcgcaagcatatctttttcggttcgttcccagctgattgtttttagataggcttgtgctttttcgatgttttgggtaatgatctcgggtttttcgcatgctgtttggagtgttttggccagatcacgttcatccaagtgacatgaaaagtaagtgccatctttcaggaagtagctgccagtgccttccttaaagtcgatcagaggtaggccggcgctcatcatttcgtaaggaaccaaagaaaaattggtcattgaaggggcaataccaaaatccgcttcatggtaaagctgattgagctctgatgggggcagctttccgagattttgaccgttaataaaacgtttgctgcgacccgtgccaaagtaagttattttgagatcaattcccttagctcgtagcaaatggcgacagttttcaaggacaatttgaatggtgacaggcgcgcggcgaggactgctccatttggtgtaaaccgccagtttgatttgctttttatcttggtaaggcttgggatcgcgttctttaaacggataacgagctacatcgaccgggaaattgataatgtcaatcggactgttagttttgcaatgtgtcgtaatcatatgtgcgcaccaaggccctagtgaaaccatgtgcagtccgaggctataagtacggcgcgccatttggtaacgatcaccgtatgggtagaaataaggttcataatcctggacaaaatacatcttataacccggcttatttttgatgacataaacggattcccataaagtagcgacccagatgtcagaacgatgggattcgagttctcccattggcaaacaagttcctttatagcctggatagttaaattcggcgttttgaatcatctcatcttgactttgcggaacgtaacttagatagtaaacgtcataacccgcattggctaacaaggttcctaaatgcagcattgttgtttgaccaccatcaaagccgatgataccggtcgttacaaaagtgatccgattgccgcgcggtttggtttgatcggcaggccgatcgttgaagtatttaagtatctgatcatattgatgaatactaccatcaggagcgtcactaaatttagtttttgcaggtttcacagccattcctcctcaaaatttttcgaacgatgaagtgcaggcaaagactcgaaaattaggtagaaaaaagaagtctggtgtcacggctgcttgtcagcggcgatacccgattaaactaaaagacgatgcaaatgcctgacgcttattttagtttacataataaccgtaagctaaatagtgatcgttttcaagttcgccaaggttggaacggcgtattctgaatgatagagagggttttgccataatattatgaaggcttgttttgaaatattgccattggacggaattctttttgtaaccggccattatgatcgtgaagttcgaggacctggttggccagtgaaatttcagctttcctaagcgcctgttcaaatcataatgaatgcttatctttaccgtgagatggggctgtgctagtgtgaaagtatcgatatcaatgaaagaacaggtgaagctatgttaacgattggagtcattggtttaggcacgattgctcaaaaagcctacttgccagtttatgcgcaaatgcaaaatcaagtgcactggttattgaatacacgcaatgaagacaagttagaacagctttcagcacagtacgggcttgaaagtgcaggccattcgctacaagacctcgatggacaaccacttgaagcggtgatgattcatacaccaaccgcgacacattatcagtatgttaagcattttttggaaaaaggtgttcatgtctttgtggataagcctttagcaaccgatatggcgcaagttaatgaattatatgatttggccgatgcgaaacatgtcatgctgacggttggctttaatcgccggtttgccccaatgattcaagatttagcgcaagtgacagataaaacaggcgtccgcgttgataagaatcgcattgatgcgcttgatgataccgaacatgcgctgtgggatcttttcattcatccggtagacactgcactgatgctcgctggctatccggaaaaaccaaacacccgctatgccttgcacaccacgagtgatggccaacttcaacaagcaagcgtgacgttcacggctccaggtattcgcggtgaggcagggattgacttacaagcaggcaccaaccttgaagaggcacaagtggcagctccaagcggcgttcaacgcgtccaaaacctggatcaactcgtcgtgtatggccgtggtggcgcttcacaaacctttgccccagattggcagcctatgcttgaaacccggggatttgcgccaatggtacaggcatttgtccaggccgtgggtaatccagatggccagaatccggtatcaccggcaaccagtcaattagcgcacgctgttgtcgccgatttggtcaatcaaattaacaactagacagggtactaacccaaaacgcttttgaagatcgataaaatgaaatctgccagcttgaacatgagtgtcggaccagcagataaggaaggggacaagtgctatgtatcaaaaatcatttatggcaatggctgatgaagaagcaaaagcaaatgttaacggatccgatggcgggccattcgggtgcgtaattgtcaagaacggtcaagtcgtcagtcgtgcacataatcgggtgttggttgatcatgacccaactgcacacggcgaaattaccgcaattcgcaaagctggccaggcattgggaacacacgacttgtccggttgtgagctctatacttcggcgatgccttgcccaatgtgtttaagtgcgattatttgggcaaatatcaaacaagtctattatggcaataccgctgatgatgctgcggcaattgggtttcgcgatgctgcaatttatgactttatcaatgccggattaaagggggaaatgctgaagctgagtcagcatgatcgcaatctgaccatcggcgcgtttaaggcgtatcagtcagcacaaaaggaattgtattgataagttgacacacatttctggagctggtggcttggtggaaaagggtgcgaagtggtcgcttactcgcaaaatatgtttgacatttttatagattcctgtagaataatttaggtacgataaagcgccactcattgcccgttggtcaaggggttaagacgccgcgttctcagcgcggaaacacgggttcgaatcccgtacgggtgagaaatagaataaatgtgatgaaacgaaatcctcggaatgcctttataacggtgtttcgggggtttttgttttggagagaaaagatttgaatacttgagattcaagttcaccgtcaaaagtaggaagtcttgtggtacaaatgctttggcgtttgataaatctaggctgattgttcgatattcatcattgatgcctgtacccctttgagtggcaaagactttgacgtttgatgaattacgttggatccattttgacaaccttgtgggatactttgccaaggtaattttgtccaatcgtgtctcaacagactattgaagaatcctcaaattaaattggctggggaacggttagcacaaaactgatgaatgcgcttctgctcgctgatgctggatgaaggtttatttttgtggcttttgggaatttaaagatgtttcttttgcgagagtgactttatggtgaatagattgattttaggcgaacggaaaaattgactcaactgcggtgattaggcattatagataggatataaagtataatcgttcagcaaagaagatcccaagtgagttctaacttgatagattgattgatttttatatggcaaacgctgctagccggaacttagctatgttacgagcgccgacgcgggtgatgaagatatttgaattttcgatggaagaagatggatttgatgagtagtaagaagttgaaggatattcaaaaggacgtaccaattcctgtaggtatcgttgatgaacgaccgattcatccagcccgaaagctctcagaagaagaatctgttcaaattatcgctgattttgagcaaatttcgcttgaaaaagctcgtaagcgattatcagaaatacgcaaggaaatacaagaagatatgaagcgataataactgtgaaggccgccagtgtgtcggctatgtttatgcctcttttcctgcttgcaggccaaaagaacaactgcgaaatcgtctcgtacaactttaaatgttggtggggcattcgatatggataatgattccgttcatccgtatattgggaaaagattaaggaaatacggagaagtcctcttgcatgttacttctcaaagaacttgaatcggcattccggctcacatataatctcagtaaggattatgcatctatgatcctaggcttgttagcgcgtgagtaaaatgagggagggatggttgtgggctttaaagttaaagtcaattcactaaatagagagtcagtactgttttgggacggttctttaaggggagatgattctaagatcgtggcgctcttctcacagttaatacgagtgcatattcctcaggtagtcactcttcccgatggcgttgactattatgacgacatacacaacggacccaacgtcttatagagcaattctgcagacctttcctgataatgagattttaaaagctccgtcagatgactttatgggtaacaagaaattgcgcgttttctaatatgaaaaatttaaataaaatagttttatatgaaatacattcgtataagataggcagtttcaaaggagtgactaaaagcttggcgttgtgtgtacgcatgacatcaaggcttttaaatacatagttgaccaaccagcggagcatacaaatgatcaagaaagttatagacgcttctgttgctgaagcacggcatgcaaagtatactgacagtgtagttgatgttgtttatgttagcgaatgcaccctataaggggagggatggtttaaaatgagaagagattttgttaggaagtcttttgactattacatgtcacatcctgcaaaagttgacctgccccttggcccacaagacattgtgccttggaaaattgatttttctaaagaggaatggcaatattttgatcaacttctcaaggaagcagacgataagctaaccgaatggcccgagacaacaattggatgaaaacacaatatagaaatttaaataaaatggttgaggttgggccataattcacagttctgaaacaaagacgtacaattcatcgatttaatcgatgaattgtacgtcttttaggtttcttacatcaacatgagttttaacgatattagtgccaaagcggcgcaatcgtaggccggatggggctcagccgtgaaaacaacacagcgaccgggttttgtcgcgggttgttaggcgacttggaggctgccggacttgcaggctccaagcgccgtcacagcgttccagccccatctggccggagattgcgtagttaggcacggcccggaactgttttaataacccattctattaaagtattcggaatttaatgagtctcatgtcctcgagtagaattatggctcaaccacgataggcagtgtcaaggaagtgactaaaagtttggcgttgtgggtacgcatgacatcagggcttttaaatacatagttgaccaactagtggagtatacaaatgatcaacaaagttatagacgcatctgttgctgaagcacggcacgcaagtatactgacagtgtaattgatgttgtttatgttagcgcatgcatcctataaggggagggatggtttaaactgagaacagattttgttagaaagtcttttgactattacatgcctcatccagcgaaaattgacctgccactacgaccacaagatattgttccatggaagcttgattttcccaaagaagagtgggaatactttgatagattgcacaaagaagcaaacgataaattaaccgaatggccagcgcctacagcaaattaacaaagtgtcaagccgccagtgagcggctatttttatgccgttatgaatcatgaaatgacgtacttgcatgaaagagaacatattcgacagtacaaaaattacggggtaaaacttggtcggggtcatatgacgcgctttgaagaagagccgaacaggcaggcctaacctggatgaagaaacgcagaaaaggagttggaaacggttgacggaattcaaggactatatcattggaatattgaagaatcagcgagaagagccaaatggcaagtttggacatcaattcatgcggatcaccccttacacagtgattttgtttgcctgggacaatacagctaagcagaaaactcaaattgaaatacattcgaaagaaaaaaagcctaatgaagtagcttgggaaaacctttatcctgagtatgagtgggttaacgtttaacaataaagacgaacaagtaataggttagccgccagtgaacggctaattttatggcattatgaattgtgaaatggcgcattttattacagatagattgttactatcgcgatatagtcagacaaagatactgcaactaatgacaatgtggtcaaaaagttaaactgagtcacaaattaacgaaccagcacacgcttgatgatggagtggttgaggcgttcaagcgagccaacatagaatacacacaaatgtacgttgaaaagtacgttatagtaggtgtgctatgaagatgtctggagaagcttaagcagatgccaagatgaacgccgatcctgataatatcattatgagattcgtcaaaaaaatcacgcgaagggagctgagcagtcttggtcattcctccaattagtatcattaaatatgttaagttcgaaagcggtttgcccgtgctcacaattaagcatccgacagctcggcagcaagcagactttgatcaatataagcgagccgaggtagctgaagaagcttacaaagaattacagctctcgaaggtaaagagtcgcactgaaagataagtgtccaactgcctttgaggggctatttttgtgttctttttttctgattgtaggactaaaaaacaactgaggcttctctccaatgacgttaaatgagagtaaaactattcagctggataatgagccaaagaaaaatccaaccacaaactaaagatgatccagagtatttaaaatttcgcatgcctatccaagattgcctacattctcacttgacaaccgttttaacatagaaggtgtaggcgttcctttaacattttaaaggagccttttgatataaaaatggaggcgacggcatcatgcaatatcgaattcaactcgataccaaaaaccagttgtttgtggcgattgatgcgcatgaccagaatcattttggaactggccggacaattgaacaagccattcatcaattaaaagcgacaaataaagccgcgtaataaaaccccatctgctactggcgtaaattttattgctagttgcagatggggtatttttaattggaagagaaaaagatggattactggtaacgtatcaggtcgcggcgggttttgatccagatagcagtgagaatggcaacaagtgctaagacgccgattgcagcgatgatgaagaggctgcggtagttgagccaatcgataacaaggccgccaaataacggacccagtgcacgtcccactgatccccacgaattaacgaagccttgatatcgccccttaatcgcccgtggcgttaagtcattgactagagcgggaatagcaggggatgcggtggcttcacccgtggttaaggcaatcatggcgatgacgaagaaggggtaagttcgggcggtgatgaggattagaaaagaaattgccaccatcacgaggccaaacaggatttgatagataatgcggatgccgttgacgtgttcgttaaaccagtttagaaatagctgaataaccacaattaaagctgcgttgagcgtccacagaaagctatagttgcgtagtggaatgcctagtcctgtcatataaactgacaagttagatgaccattgctggtacatgagccaaaagaccagtaaggcaaaaaagaaagttgttaacattaggtgatttgctgccggtaatgtggcttttggggatgctgccatcgcttcttttgaaggtgtacgtgtgattttggatgctggctgaaattttgtaagcacgacaataaaaaatagcacatacaagatgaccgcaattaaaaatagcagggtgatgctgatgtcatagataaaaccaactaaagaggtgccgacaacaacgccgacgttttgcgcgaaatagagcatggtaaagacgtatcgaccatcttttgaacgtagactggtgccgagagaattaaccatggtaatgttccaaccggagccgataccaagtagtgccagccaaaaacagtaagccggccatccatgccaaattgtcaggccaattaaaacgatgccggtgaggccgacgccaaataacgttagccgaaaaggatcgctttggtcatacagccggccgccaacaatactgccgataacgctgccaagtgagttgagtaataaaacgacaccgataaccgttagcgagatatgaagccgattatgtaaataaatactggttagtggccagataaaactcatgccgatactactcagtaaagcaccagttagaagccagcgcagtctgatttcgcgttgcatgacaacaccatcctttgtatgtcaacatatttgggggatcgggttttgaagcaccgaaccaagacttgaatcgtgatcatggtgttctagctgtgtcaaactagttgagtcagcgctgggtatgaatcaacccatctgcttgtcactaataaatgttccgtcccaatataataaggccatcgtacgtcaagcatgagtagtaggtcaaacccatttttatagccgtgaccgatgactttttcgggtgggcacggatcggagcaatcaaaacctgcctgcattaaagcaagcatgctgaatttgttcacgttaaaaagcttgtgacgttgctggcacccacatgtgcagatcagtgatgcagtgaaggacaatgtcaagtaacagtaaaatcccagcaaaaaagcggccatcattttgaccgcttgcttgctattaaaggttcttatccatgttgaaggttagttttgaaagtttcaagctttccatgacgtattcgttgatcaaggctttcgttgccgccttggtatgcgcgacaatcttgtaattggcgtctgtcagatattgcgttaattctttagcgccaagttctttggctcctttgtcaaagccttggatcatttcgcgatagtcgcggttcaaggcggttagatagtcacgatccgcttgaatgaactgggtgtaatgtgcctctaccaatacatcaagcaatcgatgcagccagtaagccgaatcagcatcgatatcaaaggttttcggtgttttggaatagctcgggtcggtgtcattcgcgttgcaataaaacgggacatacgggctaaatgaaggcatgccgattgccagccacataatggcttccaaaccttcctgaacatcactgcgcaactgcaggatgtgggaattctgggttcggtttaaaccaatcggccgataacggaagcggtcggcatcatcaccgtggccataaggatcaaaaggtgtttcgttatagtggctgccaagaatctgggcaatatcttcgcgggtgatgagatgatcggtccgcatgataaaaggcaattccgcagattccggatcggcttcaatttcgggattgagcagtttatgaccgtaccaaacgcgtggagtgttgtaatgacggtctttttcattcatcgtgccgaaaatgtggcggaaattccagccttctttatcggtgttgaggtgatgggtttcgacaaactcctgaatgccttcactccaagcaaaattgtcggtgtcgtcaaaatcgacttgttgaatcgcaacctgattggccgcaatcgcatacgcatcatcagggatacgttgggcaacccagtgatggccggtgacgatttccatgtaccaaacgctatctttgtcggaaaagagcaccgagttaccagctggcgaaccatattgtttgatgagctggccaaggtattcaacgccatgacgagccgattcaatgaaaggcagtaccatattaacaatcaagtcttcatccagaccttctttgacaagcggatcaaaacccaatgcccgttcattgccataagtgctttccgttgccgacattgcaacgttacgttcattaatgccgctttcttcgtagtcgccaagtttatcgttttcaacgtttggaaccgcgttgtagcgataaccattttcaggcaaatccgcctcgaagccattcagcggtgacttgacgtgcaaggatttctcgcctttccatccggcgtgcatatagaaccgttgcggcgtcagggggctaaacgtgtcatcgttacgagcgatcatcgttgaaccgtcaatactggcctttttaccaaccagaatcgaagtacatgcagattcaattttcattcttgcgcctcacttcttaagtattggtaatagtttacgccagaattaacttttttgcaccttcatcaaaaaagtcgttgacaagtgcgcgatttttttttaaaatattactcgttgttaagttactgggtagtagcgaagtggtaacgcagtggactctgaatccataatcataggttcgatccctatctacccaattctggacattacaatagattactaatgagagtagaagccttggtataaagggtttctgctttttgttttccataaatatccgttaacttcgggcaattgagacatgattgagacaaattcaaagctgatcgagcgcttttagtgtttttctaacttgaatttcttctgcttttttgaacatatgctcgtaaaacagtgaccgcgattcacaagcgcttatgaagccttgtgggtcgcggtttttagttgtcctcaaaattacgggtatttctaaaagagaatcaaaatattaccgttcatatcaccacaagaatattgtgaaggctatcaaagttgggtttctgtctatggtaaacttaagcatgccctatgcaaacgatagaccttgtgggggtaaaactgtagttataaacttacaactcgttaaagatctgaaaaatacaatgagacttgcaatgaaaataattctttctggttttgaaatgaacaatcgtcttggtgatgggtcgttaacgaggaggcgattgttttgacctagtcttcggattgttaaagatcagtcgtgctagtttagcaaatctttctgactgagtttaatcctgattgtgatattgatagatgagaaattttcaggtgctcgttcctttctgagtcgaccgcagaagctttaagtcgctatgtggcgaccataaagaagatgttcattccaatcagagaacaagaaaattgcaactgctgatatttagatcgggggtattgaagtatggctgaaaataaggaaaaagaatatatggtttctgatgagagtatggctcgtccacttacggatgagcagaaagcccacatgagggaaattgaaagtcagcctggtttcaagaaaaagcgtgatgatttattgaaacgggttcagaaaaaatttggcactaataaattaaattaaaccacctcgagtcacgacacaaataagcaacaggtgttgtttctcccaaatagtttattggtaaacttaccatcaatattgtgaattattttggttacggaatggatgtcaagatatcgccaacgtgtagcttgccagtcatgagaaatgacaatggcgtatttggcggtaccataggagtcctataacctttgtttttgtctggttattgactaaaaaataatcgtcaattcgaaccgttttatctggcttaaattcaacgacagagtttccatgcacataaaaggcattctttacttgtggcatggcgcgccctcctttgcgtgtgtgcctttgttgcacgaatatcttaatttgattctagcgacaattaaacacaaatacggtagctttggttgttaaaagcgtcaggcaaagcgggcacctatattagatgctagtttacagatctgtctcaattttgggcgtcacgaaaaacctcacaaacgctgcacccaagctaaaaacccagcataagcaaagcacccgcacgcatagatcaagaaagcaacgataataaatgccaaccacggccaggtcaaaaaggcgcgggcgatgaataagaagaaagccatcaataccgcacgtaatccgcgggttaagacgactttgacagtgctattcaaaagaaacctcaatgagtaactgcttggccttggtcaaatggctggtcgtgagccacatctgatcagacgaaggggcttcaacatcttcacctaaatcaggcaacaagctcagcaaccaagcgctaatgtcaggattgtcaaaagaaaagtgttctggtaatcgaataacccgcaatcgattcggtgggaagaaaacttgctgttgcgggaagatgacttggtcgtcaagcaaaatactagcaacattttgatacggtacctgacgaacctgataactttgcggatggtcatgcgcatatgccagaatcataatggctgcgtcaatcacaaaaagacctccattcaaatcaaaattatttacgaaattcatgataacataatagagagcgtgagcgggcccggttagaagtcggagtgtaagtggcctcagccgtgatggccggtctttggccattgcggctgaggtccttacacgtagacttctgggccagcgaacgcgtttagaagagagcgtgagcggggccggttagaagtcggagtgtaagcggccttgggcgtgatggccggtctttgaccattgcgacaaaggtccttacacgtagattcctgcgccgaggaacgcgtttaggaaaagagcggtaaccgccgcgtccaaggctcttacacgcgtcccagtgaccaagttataagtttacgctaagttgataagtccaccagcacagatatataggagcggttaaaagcatgacaaaacgattgtatttagtcagacatggtgagacgccgatgaatgttgctcgtcagctgcaggggattaccgacgcaaacttgacggcaaaagggcgtgatgctgcagatcggttgggtgaattgttgcggccgataccatttgtcaaggctttttcaagcgatcgcgaacgggcgattgaaacggctaggcgaattattgcgggtcatcaaccgcaaccggcgttaatcaagttatcggctttacgtgaatattattttggcggactggaaggtgatccaggcaatgctgtgatgacacggacaattcgccgctatggcttgacggcatcatggcgcgcgtgggtgggttcacagcgttttgctgggttgatccgatccattcgcaatgccgatccgacccatcaggctgaagacttgccggatctgctagtgcgagttcgccaagcgtttgcgcagattgacactcagagtcctgataacagtgacattttggtggtgtcgcatggcttattattgagtgccttaatctatcagttggcaccggaacagttaccgctggggttgttaaaaaataccagcgtgacgcgagtagatgtgactgacaaggggatgcgcctgcgtggggtcaacttgattcgtgaatcagatattctggcgttgcgccatgatgagcctcaaaaagacgatcatcaaaacgatcctcaaagtattgaccaaggtaaagagtcatcaatgttagacaagtttcgttagttagagaagctattgaaaccaacctcaaaaacagttgcaagcggtaaattcagaccattgactgaatttaccgtttttgagttagtgtagaatttctatcggtaaggcgatagatccaaataatagagccataaggaggagtttaaaaagagacccgcttcgctaattaagttaccaacaagagtagaggaacaagtgaccttcatggaacaagtactatcaggaatcatgccaaagttaacgggaaaagcatctctataggtccaagaaaaagttgatacttccatttttcgattgcattttgtggcatgggcgtctataatgacaccttgtcatatgacgggatgtcataatgaaacactttccaaattgacgaatagatgaagactaggaaggaggtcgccatgccgaaagcaactttttttcgattgccaaaagctaagcaacagcgattaatggatgcggcttatcaagagtttgcgcgggcaccatttaatgaagccagcattagtaatattattaagcaggccggtattccgcgtggcagctattatcagtatttcgatgataaggcggatctttatttttatttgctggaaaatgtccgacagcggacggtggcattattacaacaagtgatgaccaaacatcatggcgatttgtttgcggcgatgtcagaattttttgacaaagtgatcacagcgctcactcatggcccacatgctgcattgtatcggaatgtttttttgcacatggatattcggagtgccaccaaaatggcaaagtcggatgtgccattttccaagccaccgcacgggcatggtgaaattcatgcgtttttgttaaccagcattgatcgcagtcgcctccggattcaaacggatgatgagattagtttgctgattcgccagattgtcggcatgttcatgcagacaatcggttattactattcgcaccaggctgaaggtaagccgattacggtcgccgaattaaaacggcgtagtcatcagctccttgactggttgcaatttggtgttgccagtgatcgtcagcagcgttagcaacgcatcacactggactatacgcggggtccaaagcaactgttaggaggaaattatgcttaagcttgcaaaaaagcgaatgtcaggactggccgtcattggtgccatattatttatgattgttcaggtcatgagtaatctgtacttgccgaacttaacggccgatattgttaataacggggttgccaagggtgatattgactatatttgggcaaccgggatgaaaatgattctttttgccttgctcagtattctggcgagcgtagggaacgtctttcttgcgtcgcgcacatcacaaaagctagggcaaaaattacggtcagatgtttatcgtaaagtcatcaactattcgcatgacgaaatggataaagtcgggaccagttcgctgatcacccgaacaaccaacgatgtcacgcagattcaaaatgtttggatgatgattttgcgcatgatgatcatggcaccgattatgttgatcggcgcaagttttctggcgtatcaaaagagtcatacattgacgatggtgtttttgattagcttgccattattggccctttttctagtcatcattatgtattttgctgttccgctgtttaaggcgatgcaaaaaaagactgataatattaatctggttttccgtgaaggcttaaccggtgtgcgggtcattcgggcgtttcggcaagatgattttgaacagaatcgcttcgaaggggtcaatcaggattacacccaaaatgcggtcaaggtattctcaattattgccgctgttttcccggtcatgaccttgattatgagtggtaccaatatcggtatcacttggtggggcggccatttaattgcccaacaagcgcttgaaaccgggaacttgatcgcgtttatgacttacgcgatgcagattctgatgagtttcatgatgctttccatgatcttcgtgttcattccgcgtgctcaggcatcagcggcacgtttgaatgatgttctggcgcaacaaagtcggatcaccacaccagaagcgcctaaagcattagataccgctcatccggcattggcatttgaccatgttcagttccgttatcaccatgccgaagaaccggccttgcgcgacattgatgttcaggtaaaaggcggacagaccttagccatcattggtggtaccgggagtggtaaaacgacgatggtcaacctcattccacgcttttatgacgtggaaaaaggggccgtacgcgtcgacggtgaagacgttaaagcagttgatttgaaaaaattgcatgaagctgttgcgtttgtaccgcaaaaagcgaacctcttcaccggaagtgttcgcgataacatgaaatatggaaatgaaaacgcgactgatgatgacatctggcatgccttagagattgcccaggcccgcgattttattgaagctaacccagaaggccttgattatcaagttgaacaaggcggcggcaatttctctggtggacaacggcagcgactagccatcgcccgcgcattggtgaaagacgcctcaatttatgtttttgatgactcgttttcagcgttggatttcaaaaccgatgcgaatctgcgtgcagctttgaaagccgatgccaagattcagaccaaagtggttgtgattgttggtcagcgggtttcgacagttgcagatgctgatacgattgtcgtgctagacgaaggtaagatggttggtaaaggtacgcatgccgagttgaaagccaacaatccaacgtatcaggagattatcaagtcacagattcgggaaggagacgagcaataatggcagacaatcacaaagcccaaacgaccaagcagccatctggcccacggatgggtcctggccgtggtggtctcgttgaaaaaccgaagaacttctggggcacaacagcgcggttatttggttacatgcgcaaccgtctgattggtattattgcggtgctagtcttggccattgcttcgaccgtctttcaaattcgcacaccaaaaatcttgggggaagctacaaccgagatttttaaaggggttatgaaaggccaagcggagcaaaaggccggtatcgctgttggcaactatccaattgattttgataagatcaaacagattattttaatcgtcttggttctgtatttgggtagtgcactgtttagtttcttacagcagttcatcatgactcggatctcgcagaatacggtttatcaattgcgtaaagatctcaagcacaagatgaagactgtgccgatcaagtattatgacacacatagtaatggcgatattatgtcacgggcgattaacgatatggataacatcgcctcgacactgcaacaaagtctgacgcagatggtaaccagtgcggttatgttcgtggggaccatttggatgatgcttacgatttcctggaagttaacgctgattgcattggtaacgattccgctgggcttaattgttgtcgggattgtcgcaccaaaatcgcaacggttctttgccgcccagcaaaaagctttaggtctcttgaataatcaagttgaagaaacttatggtggccaggtgatcatcaagagctttaatcgtgaagatgatgaagttgaggcatttgaaggccagaaccaggcattttatgatgcagcgtggaaagcgcagtttgtttccgggatcatcatgccgcttatgattttcctaaacaacattggttacgtgtttgttgcgattatgggtggcattgaagtttccaatggcacgatcacccttgggaatgttcaggcgttcctccagtatatgcagcaattttcccagccgatttcccagcttgctaacctagccaatacgattcaatccactattgccagtgccgagcggatctttgcggtgttggacgaagaagacatgcaggatgagccgtctggtgtgccggcagtggccaatgatcctaacaaactggtaatggatcatgttcagtttggttataccccggatgccttgttgctcaaggactataacctgcaagtcaaaccaggtgagatggtcgcgattgtcgggccgaccggtgcagggaaaacaacgatcatcaacctgctagagcgtttttatgatattagcggcggatcgattcgcttgaatggtaccgatacccgcgatatgaagcgagaagatgttcgcgcgcattttgcgatggtgcttcaggatacttggctgtttaccggcacgatttgggataacttgaaatatggccgggaagacgcaactgacgacgaagtattggccgcagccaaagcagcccatgttgacaactttgtgcggcagttaccggatggctacaacacgattctgaacgaagaagcctcgaatatttcgcaaggtcagcgacagttgttgacgatcgctcgagccttcgtggcagatccggaaattcttattctggacgaggccaccagctcggtcgatacgcggacggaaattcatattcagcacgctatgaaccgcttgctgactgatcgtacgagcttcgtagtcgcccaccggctgtcaacgattcgtgatgccgacaagattatcgtgatgaatcacggctccattgttgaaaccgggaatcatgacgaactaatggctaaaaacggcttttatgctgatctgtacaacagtcagttcagtggcaatgtcgcgatttaagttagtttgcaatgatgctgaggcttagaaaaatagtgcgttgcggggaaaatgtttttatcccgtgacatgaaaaagggtcctgaagacaagaacgatcttgtcttcgggacccttttagcgttaccgccgcttgtgccgcataaacgttgcgtagtgtagcaaacaagcaagtaagacgaaaaagatgacaacaaagctgacatagcgccaccagaagttggttgccacacctggtatgagttgctggatacccatggttgccaaagccattaccacgatcatgccgaacaacaataagtaacgtttcaaagtctcatcatccttctttttaaaagtggccaattttgccccgagcgcttgtgcttgtttgaccttggccgctggtaaagccgtcatgccccaagtatgtgggagaaccagttcagtaattttatgtaaaccggcagcggtcatggctttgtcgatggtgacaagggtcgcatcggtctgatgcgtaaaagtgttgtccaggccggtggcaaaacaactggtgacgctaacgtactgtttatctttaaactttcctggaagcgtatccccttgatgcgtcatccgagtgatgcgatggcgtaaacaatcgagtaactgcttaaactgtccagccacggttccaaagtaggtgggtgttccaagaatccacacatcagccgcttgcaacttttcctcgagttcgtctagcacggggttggtctggccaggacgatcaggtcgcagctggtactgattcaagtcaataaactcggttgtcgccggtgccgtaacgccggcaaggattgttttaactaggctagccgtcaacccatcaggatcctgcccgccgtaaatacctaaaattttcatttgaaagcctcacaaaacaaaataaacgacttaagtaacaacctgccaaaaataacaatttttgcaagtattagttcctcttaactttaaaaaagattaagaatttttgcaaaccgatccttgtactcatgcgcatcaagctttttattggcaaaaaagatgaagactcattatgctgttggcagcaacaaaaggttaaaggcgttaggatctcatggatgaatgagaaggagagggtcaacatggcaggaattccattgccggaagaaacacgcgtggattttattgcgcttaaagtggctgacttggccaaggtgagtcgctggtatcaagacgttgcgcggttagatttattgcggcaaaacggcagtacggtttatctgggcacgcggttaaatcagcaggtgttagtcgtgttgcatgagattagcggattaacccctcaagaagcggtcaccggactggattattttgccattttattaccgaatccgggggctttaggggcggcgtatcgcattgttaagcaggatcaggcagtgaccaaggcatttcagacaaattatcgccaaggctttttggcgcatgatccggaaggtaatggcgtggcctttacaattgatcgtgcaattgaacagtatcaagaggagcgtcaatacaattgggatgatgaagtggaacaggcgcttgatcccgaagaaattggcaagcatgcggtgcgcgattatgaccgcctgccatcagggacggcgattggctacgttcagtttcgagtggctgatttacaaacgaccagtcattatttggcgcaaggacttgggtttcgcgaaaaggcaacacaggtaaaagatgagatctttcttgctgcaggcgactatcgccatcacattaggattaatttacgccgggatcccaaattattgttaccgacgcctgatatgtatggattggactatgtgagctttattttgcctgacaaaatgacgatggccaacattttgatgaaccttgatgcagctggcttaacggattacgattatcaccatgagaaccagtttttgatgatcgctgggccgaatcgactgacgctatggtttcgagtggcgtaaccgatctggccttggatcggaaagaaggccaggatggattttcaagcagtaacgacgaggttgcaaaaatgggtagcggagcggattgtaccgggttttagtgttgcaatgctagctggcaagcgggttcaatccaaggtggcaggtgaagcgcagtggctgccgcatccggaaccgctgcggcctaagatgctttatgatattgcttcgttaaccaaggtggtcggcactaccactgtctttttgcaggcgtgggatcatgggctggttgcgccgacaatgccgttaaaacaactgttggcggcgtttccacattcgaccacgtttcagcaggcactgacgcatacatcgggacttgaggggtacattcctcatcgcgatgctttacctgctccggcattaaaacatgcgctgctgactcaattagcggtgacggatgaagtgaatcgcaaggtggtttaccgagatgtgaatttgctgctggttggttgggcacttgaggaagtgtatcatcaaccgattcagaaactagtgacacggcaggttttgcgtccactggatttaccacgtgccacttttcaacctgaagcagcgcagtgtgtgccaactacttatcagccactttcgggattacggcgcggggttgtgcatgatcccaagagtgccattttaggggcgcatagtggggcagccggcttatttgccagtttggacgatctgatcatatttacccagtatttattcggacttcgaaccgccccagcttggccgaaacatgcccaagacctaacgcgtgactggaccgttcatcatcttgggcgcagtctcggctgggatctcaaacatgacaatcagggccgcttatggctttatcacactggctataccggaactttttggttggttcaaccgcaaagtcaactggcactgattgtcttgacgaatcgcgtccatccgcagcccaatcaggaatttctgggaagacgcgatcagttggttcaccggtttttgaatgatcagccgatattagaccagtaatgcgtacacaaaaacagggccgaaattcacgaccctgtttttgtgtgtatgatagctttaaccgtttaaaaaccgcctttaatataaccaccatcactgagttttttccgtagttgtagcatcgccgtgtacgttgcgaggacatagagttgctgctgcggcatttcctgaagcgtcgtgagcacatcgccaagatctggcttaatggtaagcttggtttctggcactccggctactttcagcctgagagcaatatcttgatagcgctcgccgccaaccaggtagtcggcggcttttttgctcgcaacgaattcttcaaagttgccgtcccaaatccagctcgtatcaataccatccgcgtaattggcgttcaatagcattgcaaacccaaaaggctgcttggcggtttgaatcatgctcagaacctgattcaggccaacgggatttttaactaaaatcaatgtcagctttttggccccgagctgaatgacttcttggcgtccgaagactttttcatcgtaggcaaacgcttggctgatttgttcagggctgacatcaaacgttcggccaactgcaaatgcggcaagggcattgtagatgttatacatgccgccaatgtcaatgtgacacagctgaccgtcaatgacaaactcactgctttgcggcgtcattttggtaacggcattaacttgataagtcaactctggtcgtttgaaaccgcaattagggcaaaagaagttgcctagattagcgtaagtcaaagcgtgataatgcaaaatgtgctggcaaaccgggcaaagaacgccatccgtattcggcggggccttgtgatcgccttcgttggtcaacgtaaagccgtaataataaatcggattgggcaacttccgcgaactgaaaatcggcgcatccccgttagcaagcacgacagcggtgggatcaagcgtgataccatccagaattttttggtaagtcgtgtaaaactcaccatagcggtccatttggtcacggaaaatattggtcagcacaaacgctttaggcttcaactgcgcggcaacgggagcgacattggcttcgtcgacttccaaaacagcgatcccgcgaccatgaccgcttttgggctgggctaaaaaagcggtcgtaatcccttgtaacatgttagagccggtgggattggttaggacttcctgatatttttgtttgagtaccttgacgatcaagctagttgtgagcgttttaccattcgtaccggtgaccacgatcacatcatagttatggcctaatgcttgcagaacatggggatcgaggcggttagcgagttttccggggagactcgatccacctttgaaaaatgtgtgtaagaaccagtagctgctgcgaccaatggcagttgccaggctggcttttgctgaaaatgccacggcgttcttcctctcaacttaatgggactattttagcataacttgaaatcaaaccggcagccggagtgttctttgcgaaaaaaatccgttatactgtgagacgtgagattttaaatggaggcggcatatggcccagcttttctttcgttatggcgcaatgaactcaggaaaaagtattgaaattctgaaagttgcccacaattatgaagaacaaaataagcgcgtgattttaatgaccagcgccgtggatgatcgcgccggtgttggcatgatcgccagtcgcattggtcttgagcggactgcgattccgattgcgcatgaaacgaatctgtatgatgtcattaaaacgactgatccgaaagcagcatgtgttttaattgatgaggcgcagtttttgcagaagcatcatatttttgaagctgcgcgggtggttgacgagttgcatattccagtcatggcgtttggcttgaagaacgatttccgcaatgagctgtttgaaggttcaaaatatttgttgctgtatgcggataagattgaagaaatgaagacgatttgctggttttgtgcgaaaaaggcgattatgaatttacggattcacgatggcaagccggtgtatgaaggcgagcaggttttgattggcggcaatgaatcgtattatccggtttgccggcatcattattttcacccgccgttggataagattgatcaggatgaggaataggtgcttggtcggtgcggtttggctggctcacgctctatcataacgcgctcaccggcgcaatgacctgcgtgtaaggaccttggtcgcaatggccaagagcgggccatcacgcccaaggccgcttacactccgatccctaaccgcgccggttcgcgctcaggaggattttatggataagatttttgaacagttggatgggcttttggttcggtatgaggaactagaagagttgatgtcggatcctgaggttatcagtgatacgaaacgttacttggctttgtccaaagaagaaggcggcatgcgggatgttgtggctgcctataagaaatataaacaggtgctttctgatattaaagaaagcgaagaagtgcttcgtgagagtaaagacgaagacatggaagcgctggctaaggaagatttggaggacttgcagaagcaaaaggccgatcttgaagagaagattaaggtgctgatgctgcctaaggacccgaatgacgataagaacattattatggaaattcgcggggctgccggtggtgacgaagcgagtctttttgctggcgacttgttgaatatgtacatgcactatgcggaacggcaaggctggaaggcggagattgttgattcaacccctactgaagtcggcgggtataaagaagtcgtcgtgatgattactggtgacaatgtttattccaaactcaagtacgaaaacggtgcccaccgcgtgcaacgggttccagtgactgaaagtgccggtcgcgtgcataccagtactgcaacagttggtgtcatgccggaatatgacgaggttgatttgaagattgaccctaaagatattcggacggatgtttaccgttcttccggtgctggtggtcagcatgtcaacaagaccagttcagcggtccggatgacccatattccaaccgggattgttgtttccatgcaagacgagcgtagtcagcaggaaaatcgtgcccgcgctatgcagattttacggtcacgggtttatgactattacgaaaccgaaaatcaggaaaaatacgatcaaaatcgtaagaatgcgattggaaccggggatcgttccgaacgcattcgaacctataattacccacaaaatcgggtgaccgatcaccgtattggcttgacgcttaataagctagaccgcattatgaatggcgaactggatgaaattattgatgcgctgattgtccacgatcaggcgcagaagatggaatcgctcaatgtctaaaacatacgctgaggcgctcaagtgggcgtctttgttattgaccaagcaaaaagttgatcctgacggcgcccgttatgttctcatgacacgcgctgactggacgccgagccaactgattttacatcgccaagatccgatgccggatgctgcctggcgtcaatttcaggcggatgttgcgcgattggcccactttgagccggcgcaatacattaccggtcaagcgcctttttttggcacgatgtttgctgtgaccccagcggttttaattccccgatttgaaaccgaagaacttgttgcatgggttgcagaggagcaaacgaatgcacaaaccggccttgatatggggacaggcagtggggcgattgggttaaccctcgcccgtcagttgccacaaattgacatgacgttgagtgacgtttctccgtctgctttggctgtcgcgaagcaaaatgccgcggcgcagaaagcgagcgtgcattttgtgaccagtgatttattcaaccacctgcctggccgctttgattttgtggtgaccaatctgccttacattgcgcctgaagaagcctcggtgatggatcaaagtacgttacggtatgaacccaaattggcgctgtttgctgatcatcatggcttggcattatttgaacggtttgtcactgaactaccgcaacatctgaacccgcatggcgcagtgtatttggagtttggctatcatcaggaaccggcactgcggcaattatttgccgaaaagctgccgcaagctcaagcaacttttcgccgcgacatggctgggcatccgcgcatggtcaaacttcaattttaggttgccattgtcagaagaagacacgtcatctttcagctcaagtccgatgatgtggtattttagtaaaaacgaacagtcaatggatatggaggcatcattttggcaaaacgttatcatgaatcagatattccggaagcagcagccgctttaaaacgtggtgagttggtcgcttttccaactgaaacggtttatgggttgggagcggatgcgactaatgttacggcggttagtcaagtttatgctgctaaggggcgcccatcggataatccattgattgtgacagtggcggacgcggcaatggttagtcagtatgccacgattaccccggatgcggcgaaactcatggacaccttttggccggggccgctgacgattattttgaatattttgccagggcgtttgtcaatgaaggtgacaggcgggttgcaaaccgcggcatttcgcaatccggatgacgccttaacccgaaagttgatcgcaaccgctggcgtgccgattgtgggaccgtctgccaatacatcgggcaagccaagtccgacaacggccgatcacgtgttgcacgatctagccgataaaattgccggcgtccttgatgatgggccaacccgagtcggagttgaatcaaccattattgatttaaccgtgaccccacccgctattttgcgaccgggtgcaattggaccgcatgaattggaaccgttgcttggaccggttgattctgcggcgcatcacgttggcaaaaacgaagcaccgaaagcgccggggatgaaatacaaacattacgcaccagcagcgcaagtcgttgtagtggatacgattgatcaatttgatgatgcagtggcgtgggctaaaaagacgggccaaacttttggacttttggcgacagattcgattcttgcccattttcctgatgtgcctagttactcgttgggccaagatattaccagcgctacacacgccttgtttgccgggctgcgctggtttgacttgcatccggacgtaacactcgtgctggcccaagcctttagccacagcgaattaagtgccgcttatatgaatcgactgcttaaatcggctgggaacatgcactatcaaccgaatatgccaacggatcggttttgatttgctataatatagccaactgacagcaacaagtcggttggctatttttgtgagcgcgagccagcccggttagaaaccggagtgtaagtggccttggcgtgatggtcgggctttgaccattgcgccaaggtccttacacgcaggtttctgggctggggagcgcgttatgattgagcgtgaaccggcgcggttagggatcggagtgtaagcggcctcaggcgtgatggccgggttttggccattgcgcctgaggtccttacacgcagatccctgcgccggtaagcgtgttatgattgagcgcaaagtgttggggaaatctagtcaacgtgctttggcatttgctagtttgcacaggttaaacggcgatcacctgtcgataggtggatgaatcgattttaagaggagagtggtaggcatggatttaatggcgcatgatccagaagttttccgcgcaattcacgaagaagaagcgcgtcaggaacataatatcgaactaattgcttcggaaaatattgtttctccggcagtgcgggcggcacaagggtcggtgttgacgaataagtattctgaaggctatcccggtcatcgttattacggtggcaatcaatacatagacgtggttgaaaatcttgctattgagcgggcgaagaagctttttggtgctgaatttgccaatgttcagccgcattctggttcgcaggcaaacatggcggcatatcgggcgtttcttgaagacggcgataaggttttggccatggacttaacggatggcggacatctcacccatggtagtccggtcagttttagtggtcaggaatatcatttctaccattatggtttggacccgaaaacagagcgcctcgactatgccaaaattcgcgagcaggcagaacaagtcaagccgcgtttgattgtggctggtgcgtccgcttacagtcgggaaattgattttaaaaaattccgcgaaattgctgatcatgtcggtgcctttttaatggttgatatggcgcacattgcgggcttggttgcggcgggattgcacatgaatccggtgccgtattcagatgtggtcacgaccacaacgcataagaccttgcgtggaccgcgtgggggcatgattttggctaaggcggagtatggcaaagcaattaattcagccttgttccccggcattcaaggcggaccactggatcacgtggtggcagctaaggcggtggcattaggcgaagcgttgcagccggcgtttaagacttacgcgcagcagattattgacaacatgcatgcgatggtggcaggtttcaaggaagatgaacacttacgcttgatttccggcgggtctgacaatcacatggtcttagtcgatgtcaccggttacggggtcaatgggcgccaggttcaggacttgctggatgaagtcgatatcaccacgaacaagaatcaaattcccggcgagcaaaatggtccgtttaaaaccagcggcattcgggtcgggacagctgcgattaccacgcgtggatttacgccagaagaaagcaaacgcgtggcagaactcatcagcatggccattgcgcatcgtgacgaacagccagttttggatcaaattcggcaagaagttcttgcactgactgcccgtcatcccttatcatagatagggtttgcaaacaaatggttctcacaggaggcgcttcatgggtaaatttacagttttaaatcacccgttgattcagcacaagcttacgttaattcgcgataagcatgctggcaccaaggaatttcgcgaaatcgctaatgaaatcgcggaattaatggtgtatgaaattacgcgggatctaccgcttgaaagtatcgaaatcgaaacgccgatgggcaaaacggttcaaaaacagcttgctggcaagaagcttgctgtgattccgattcttcgggccgggctagggatggttgatggcgtcttgcggctaattcctgctgcaaaagtcggccatatcggtatgtatcgtgacgaaaagacgctaaagccgcacgagtattttgttaagatgccgccggatattgaccagcgtgatctgatcattgttgatccgatgctggcaaccgggggctcggctaacatggccattgaagcgctcaaaaagcgtggcgctacttctatgcggttggtagtgctggtggcggcaccagaaggcgttaaagcagttcaggcggctaacccggatgttgatatttatgccgctgcacttgatgatcatttaaataagaacggttatattgtgcctggtctcggtgacgccggtgacagactttttgggacaaaataacatgatttggcatgtggccgtgcacatgcctttttcatttttagttaaaataatttttatggtgcgtcaaggcagggagaatctgttgtctgatgtgaaaacatgagtgaaaaagcctctatggcggcaaaagtttctgcttttctggctttgtcttttcatcgaaatggtgttagagtaatgattgtgtttcaagggtataccctagtatcaacgattatcgaagtctccgtaatcttgcatcatcggtttgatgatacatacgatatgacgccgcttcagtaaggaggtgaattctgtgaacgaacaatatccctcgatcaagcttttcggcttaaatttcaacctgaccaatgacattggcgtattggtttcggcgatcttggtattcttactggtgttttggttgtcacgcaatttgcagatgcggcctggcgcaaagcaaaacatcttggaatggattatgaattttacgaacggcattgtgaagggtgcaattcccggttcacaacggtacacttttaacctgtttgcatttacgctgttcttgttcattttcattagtaatcagattgggttgttccttgagcttgatattggcaaagacacctggtttcgttcgccaacagcatcgcctgtcattaccatgacattggccatgacagtattggttatttcacattattttgggattgtttttaagggtttcaagggatatctcaagggatatgtgtcaccgatcggaatcctgcttccaatcaacctattggaagagtttacgaactttattacactttccttacggttgtatgggaatattttcgccggtgaagttttagttttactcattaggcagcttgctttttcgggcggagcgtttagttttgtttcagggttcttgcttgagatcgtttggcaaggcttctcagtcttcattggtagtattcaagcgtacgttttcgtcacgcttggtatggtttatacgtcacacaaagttgtgtccgagtaattaatttaggaggaaatttcatatgcaattcatcgctgcatcaatcgccgctggcatcgctgctctcggtgcttcaatcggtaatgggatggttatcagcaagacacttgaaggtatggcgcgtcagccagaaatggccgggaccttgcgtggtacgatgttcatcggtgttggcttgatcgaagctgttccgattatttctgttgttattgccttcatgttaatgcttcgttaattttgagtcatcaataaagaagggagtggcaaaagatgagtttaggtgacacactcttcacactcgtcacatttttggtcctgatgatcgcggtcgggaaagttgcttggaagcccgtctcaaagatgatggcggagcgccaacaaaaaatttccggcgacttggattatgctgaaaagtcccgcaaagatgccgaggcattagcggctaagcgtcgagaagcgctgcaacactcccaagccgatgctgttaagattgtcaatcaagctaaagaaaatggtgaaaagcaacgccaatcattggttgacgctgctaacaccgaagtcgctacgttaaagaaaaatgcgcaagcggacattgaccaagcgcgcaaagacgcactggccagtgccaaaaatgatgtggcagatttaagtttagccattgcccagaagctgattggcaaggagcttaatgcagacgatcaaaaagacttgatcgacgactatatcaaacggttaggtgatgcaaatggcagtcactaatcaaatggttgcaccgcgttatgctaaagcgttgttagaagcggcgcatgaccaaaatcaagtggagacggttcatgaagagttacaggcgttagcgtctgtattcaaagaaaatccaacaatcctgacaatttttgacaatgcccgaatttcagccgcagacaaagccaacttgttgacaactttgaccaaggatgcaagcccacttgttgctaacttgttaaagttgacccaacagtatggccgattcggtgcattaccggcaattatcacgacgtttaatcgcgcctatgatgatgaagccggcattattgcagcaactgtgacgactgcagttgctttgtcagccgaccaagccgatgctttacgcagttctattgctgcgcgttttggcatgaaatcgacccagcttaagcaaatcgttgatccaagtgtgatcggcggtgttcgcattcaagctcgcggttcggttattgatggtacggtcaagcaccgctttgagaagatgaaagcggcactgctggcagattagagataagtaaagaggtgaaccggatgagcatcaagactgaggaaatcagttctctgatcaaaaaacaacttgaaggatatcaagatgatttggcggctgaagaagttggcactgtaacctacattggtgacgggattgcccgcgccacggggttggaaaatgccatggccaacgaattgctccaatttagtaatggctcatacgggatggcgttaaaccttgaaacgaatgatgtcgggatcattatcttaggtgacttcgatgagattcgcgaaggtgaccaggttaaacgaaccggtcgtattatggaagttcctgttggggaagccatgattggtcgggttgttaactccttgggtcagccagttgatggcttaggtacgattaagacggataaaacccgcccaatcgaatttaaggcaccgggggttatgcaacgtcaatccgtgtcagaacctttgcaaaccggactaaaagcgattgatgccttggttccgatcggccgtggtcagcgtgagttgattatcggtgatcggaagaccggaaaaacatcaattgcgattgatacgattttgaatcaaaaagatcaaaatatgatctgtgtttacgttgcgattgggcaaaaggacagcacggttcgtgcccaagttgaaacgttgaagaaatatggcgcgatggattataccattgtgctaaccgctggcccatccgaacccgcaccaatgctatacattgcgccttatgccggtgcggcgatgggtgaggaattcatgtacaatggcaaacacgttttgatcgtgtatgatgacctaagcaagcaggcaacttcatatcgtgagctgtccttgctgcttcgtcgtccgcctggtcgtgaagcctatcctggggatattttctatacgcacagtcgtttactagaacgggccgcaaaactaagcgataagcttggcggtggttccatgacggctttgcctgtgattgaaacccaggcaggcgatatttctgcttatattccgaccaacgttatttcaattacggatggtcagattttcctgcaaagtgatttgttctatgcgggcacacgtccagcgattgatgctggtgcgtctgtttctcgtgtcggcggtgatgctcaagtcaaagcgatgaagaaggttgctgggacattgcggttggatctggcatccttccgtgaacttgaagcctttacgcagtttggctctgacttggatgcagctacacaggcaaaactgaatcgtggccgtcgaacagttgaagtgttgaagcagccggtacacaagccattgccagtcgaaaagcaagtgttgattctttatgccttgacccatggcttccttgatccaattccaattgaagatattggccgtttccaagacgaaatgtttgatttctttgatagcaatgcagctgatctgctgaagcaaattcgcgataccggtaatttaccggataccgataagcttgatgcgcagattaaggcgtttgctggcggcttccaaacaagcaaacaacttgctgcagctaaaggttaaggaggtgccgcatggctgagtcattaatggatatcaagcgcaagatcgcttcgaccaagaaaaccggtcagatcacgcaagccatgcagatggtttccggcgccaaattgagccagatcgaaaagcgtgccaagaagtatcaaatttactctgacaaagtgcgccagattgtgactcatttagctgcgggtcaacttcttgaactagctactgctgcgaatgatgacactgagacagataagaatcaggtcatttccgttgccagcttgcttcagaagcgacctgtcaaaaagacgggctatcttgtgatcacaagtgatcgcggattagtcggcagttataacagcacggtattaaaagccatgatgcagatgattaaagatgaccacgaaagccctgacgattacgtcatgatggcaatcggtggtgtcggcgctgacttttttaaagcccgcggtatgaatctggcttatgaatatcgtggcgtttccgatatcccgacttttaatgaggtacgggagattgtgaaaactgctgtgaccatgtatgacaacggtgtctttgacgagctatacgtttgttataaccaccatgtcaacacattaacctctgcttttcgggcagagaaaatgttgccaatcagtgatttagatgtcagtgaagttgaagataccaatgttgagtatcttgtcgaacctgatcttgatgccgtcttagatgcggtgttaccgcaatatgcggaaagcttgatctttggtgcgatcatggatgcgaaaacagcggagcacgcggcttcgacaactgctatgcgtagtgctactgataatgccaatgatctgatttcacatctgtcgactcagtataaccgagcacgacaggctgcgattacgaccgagattaccgaaattgtcggtggtgcggcagcattggaataaatattgcgtttgttggcgcagggggctgtttgtaaggagtttggttgtaatggctggagtcgagccatcaagtctagagacacttacattcaggactctaatgtgccagcttatgcccataacgcgttcactggcgcagaagtctgcgtgtaaggaccttagccgcaatggccaagaccgggccatcacgtctaaggccacttacactccgacttctaagcgcgctggttcacgctcacttttacaacaggaggacgaatatgccaaattcaactggtaaaatcgcgcaagtgatcggtcctgttgtcgacgtagccttcccaatcaatgacaatttgccagaaattaacaacgccttgacgattacccgtaaggacggctctcagcttgtgctggaagttgcgctggaactgggtgatggtgtgatgcggactatcgcgatggattcgactgatggtttgcaacgcggcatggcggttgaagatactggcggtccgatttcagtgcctgtcggtaaagacacactgggtcgcgtgttcaatgtattgggtgacccgatcgatgacggtgaggcttttggacctgatcatcggcgtgacagcatccaccgtgatgcaccaaaatttgaagatttgaataccagttctgagattctggaaactggcatcaaagtcatcgatttgctcgaaccttacctgcgaggcgggaaggttggacttttcggtggtgctggtgttggtaaaaccgttttgattcaggaactgattcataacattgctgaagagcatggcggcatctccgtcttcaccggggtcggcgaacgaacccgtgaagggaacgacctttacttcgaaatgaaggaaagcggcgttctggagaatacagcgatggtctttggtcagatgaatgagccgcctggtgcccggatgcgggttgccttgactggactgacgattgcggagtacttccgtgatgtcgaaggtcaagacgtcctgctgttcatcgacaacattttccggttcacccaggctggttctgaagtttcggccttgcttggtcggattccttcagctgttggttatcagccaacgttggctactgaaatgggtcagttgcaggaacggattacgtcgactaaaaaaggatcggttacatcgattcaggcgatttatgttcctgctgatgactataccgatccggcgccagcgacaacatttgcccatttggatgccacgactaacttggagcggcgtttgactgaacaagggatttatccggctgtggatccgctggagtcatcttcaagtgctttgaccccggaaattgtcggtgaagaacactataaagtcgcaacagaagtccaacaggttctccaacgttaccgtgagttacaggatattatctctatcttagggatggatgaattatcagacgaggaaaaggttatcgttgcccgtgctcgtcgggttcaattcttcctgtcacagaactttaacgttgcggaacggttcactggtcagccgggttcttatgtaccggttgaagaaacggtcaaaggctttaaacaaattctggaaggcaagtacgatgactatccagaagatgcattccgttcagttggacggattgaagaagtcgttgaaaaggctaaaaagatgggctttgctcctgatgatcaggacacggatgctgacgaaaagccagctgcacaagctgcagctaactaaggaggcgacgcgttttggcagaaacgagcaatgttctgcgggttaacatcgtgacgcctgatggtttggtatatgaccatcatgcaaagatgttagtcgttcattcggtcgccggtgaattggggatcatggcgaatcatgagccgattgtcacgcctcttgaaataggggaagttgacgttcagcgggttgattcaagtgatcataacgactcaattgcggtgaatggcggctttatggaagtttcagataatgttgcttctattgtcgctgattcagccgagcgtgaacgcgatattgaccttagtcgtgcgcaagctgcacgtgaccgggccaagaagcggatcgctcaggccaaggatgaaaataaccaagatgatctacggcgggcgcaagtcgcactacgacgggcaatcaaccggatcaacgttaaaaccagtcactagtcagtgattggaaggtgatcagtcgttgcggcgttagctccacgataatcaccttgatacgccaatgtggctggattggcacattggcgcaaaagaaggtgtcctattttccaaacttaacggaaaaataggacgccttttttgaatgggttgtttttttatagtcctaattccaagcccggtatataccatgaggtgcttctggacgcagaagtcggggtgtgagggtcttgagcgcaatggccaagcccggggtcgtcacacctgaggccacttatgctctggtttatgcccataacgcgttcgccagcccagaaacctgcacataaggaccttggacgcaatggccaagcccgggccatcacgcccaaggccgcttatgctccggtttctaaccgggctggctcacgctcactttctataacgcgctccccggcgcagaagtctgcgtgtaaggaccttaagcgcaatggcaaagcccggccatcacgcttaaggccgcttacactccgacttctaagcgcgccggctcgcgctcactttctataacgcgttcgctggcctagaaacctgcacataaggaccttgggcgcaatggccaagccgggccatcacgcccaaggccgcttatgctccggtttctaaccgggctggctcacgctcacttaggcttgcgtgattgttgaaagtgcgggaagatgttctgtgaggtgatcgcatgtttcaggaaatcggcctaaatgctgccataacccttgtttcccattttgttttcatcatgttggcgtttcgggcgttgaatgcattacgctttgagcagtttattaaggccaatcatgttcgcgaggcacaggtgctgttactttttatggcagttggcttaggttatttagttagttccttctttttatcactggttcaagcagctttaaacttacctaaacttttcctataaaaacctcgtcttaactatgttataatgcgatagttagtcaatttacgaggagagatatatacccatggcaaaagatattgggatcgacttagggacggccaatgtactaatcaatgttaaaggcaaaggcatcgtcttgaatgagccgtccgttgtcgccattgatacccataccggcaaagtgctggcagttgggacagaagcctacaaaatggttgggcgcacaccgggtaacattcgatcaattcgcccattgaaagatggcgtgatcgctgatttcgacattaccgaagcaatgcttgaatatttcattaacaaattaaatgtaaaaggcgttttttcaaaaccaaatattttgatttgtgcccctactaatattacggacattgaacaaaaggctattatccaggccgcggaaaagtctggtggccgccatgtttaccttgagtttgagcctaaggtagcagcggtaggagcgggattggatattttccagccgcaagggaacatggtgattgatatcggtggcgggaccagcgatattgccgtgctttcgctgggggagattgttaccagtcgttcactgcggttagccggcgataaaatggatgcgtccattgctgcttacgtcaagaacaagcacaagctgattattggcgaacacactgccgaacaaatcaagatcaagatcggtgcggtttatgatgccgatcctaaagaaacgattgaagtccggggtcgcgatatcgcaaccggactgccacgcgaggtttcggtgacctcagctgaagtgtcagatgcgttacatgagaccatgatggcgattattgatggtgccaaaggggttttggagaagaccccgccggaactttcggctgatattattgatcgcggtatcatgctgacaggcggtggtgccttattgaaaggcatttcacagctatttgccgacgaattgaaagtaccggttctgctggctgacgatcctttagatgcggtggcactgggaacaggcgtgttattagacaatattgaacatcatcgccaatactaggagttgtcacttatggactcgcaatatcctaaacgcgtttttcatcacgtcaagatttggctgattgttgccttgattgccttgattttgggcttgttaatcggctttggtatgggtggcgataatccatttaaggtatttttgccttcaacctggatccatttctttaacttcttgcgttaggagtggacatgaaacaaatcctgacttggctggtgcggggctaccagcgatttatttccccgttatttccgccgagttgtcggtattatccgacttgttcgacgtatatgattcaggcgttgcaacgacatggggcggtaaaagggcttttaatggggattgctcggattttacgatgcaacccctttgttaaaggtgggctagatccggtgccagcttattttacgttgcggcgtaatccgcatcccgaaaatgatttggatcttagtgacattcaaaatcttaatcgcaagctaggaggccatcatggctaaagaaaaaaatattaaagtcgcacagatggatgaaacccgcaatggccacacggtttccgtcttaagaatcggcgatcaggagattggttttatcgaaccggatggcacgcggtttgccgcttatgttgccggttctaacaagcccaatcgctttaaaaatattgatgatgcagtgaatgctttaattgcggaatatcatttgcatcaaggctgagcaattttcttttgttaaaataacggtaacaataacctagcgaaacactgtaggtgaatgactaacctagcttttaacggtgtggcaatgggttcatgaatgtggtgtaaggaggctggccgtggaatcgcatgaaatcaaatccaattctgaaggcgatcgcatcgactacggtattattctgtcggtcatgctgctggctttgattggactagtctcgatttatttggcgaccgctcatgatacgacaacgcttcaaaatccggttcgcgcaaccatcatgcaggctgcttggtacgtgattggcggcatcggaattttctttgtgatgcgttttgacgctgagcaactttggcggattgcgccttatctttacgggattggcattttcttgatgattgccgttttgattttttatgataaaacgacggctattaatacaggggctaaaagctggtttgctttgggaccggttagttttcagccttcagagattatgaaacctgcgtatattttgatgctgagtcgggtcgtgacccagcacaatgccgctttttcgcacacgattcagcatgattggcagctgatcggacgcatggttttatggaccttgccgattgcggtattgatgaaattgcaaaacgactttgggacaacgctggtatttttggcgatttttgccggggttactttagttgccggcattaactggcgcattttattgcccatcgctttaattggggcagccattggaacactggcaatcttgctggtaacccaatcgtgggggcggtctttccttggatccattggctttaagacgtatcagtttgcacggattgactcatggttgaacccttccggcagcacaagtggcgacagttatcaattgtggcaatcgatgaaagcgatcggatccggacaattaaccgggaaaggcgcgtttcatatcgccgttgcggttccggttcgggaatcggatatgattttctcggtcatcggtgaggcgttcggatttatcggcgcggctgtgttgattctgttatactttatgttgatctatcagatgattcgggtgacatttgacaccaagaatgagttctatgcttatatctcgacaggagtcatcatgatgatcttattccatgtgtttgaaaatatcggtatgaatattggcttgttgccgctgacagggattccgttaccgttcatttcgcaagggggatcattcttattggcgaatatgttatcggttgggatggtactatccatgcgttatcatcacacgagctatatgttcagccgggacacagaagattttgaataggggagattataatggcgacaacgtatttttggcaagatgaattggctgcaggacaagttcgcttgggcttgacgcaagaagctcaggaagcgttgggtaagatcaagtttgtggacctgcctgaaattggtaccagcttaaccgtgggcaaacccttcttgagtgtggaagctgaaaaggccgtgctagatcttgaggcaccgctggctggtacggttgttgatgttcatcgtgagctcagcgacaaacctgctttgttagacgaaaccgatcataacgataattgggttgtcacggtttcaaccaaataagcgtcagcaatcaatcgtgttgtgacttctcacagcgtaaaaaaagcagtcgggtcaacgataatgactcggctgcttttgacttttggaaaaggttattaacactgccataagtggcggacgtgagcttcaggcaaaaaagcgtttggcaatttcttcgtaagttttaatcgctgtcgtgtagctatctaaatcaacatgttcgtcaatctgatgactgaaatgattatcgccgggaccatagacaatcacgtcaaactggttatcggaacggatgaattctgacgcgtcggttccgccaaaagccaccgctaactcggctggtttaccagtcacggcggcaatggcttcgttagcggttgtcacgagatgcccgtttttgtcagagtgtaccggcaaaaaacgatgtaaaacgttcaacgtcaagttagcggcggtggctttatttgcctgatcgactaatttttccaataacccgacgactaattcgatatttgctgcaggagtcgggcgcaagttgccgcgtaagtatgcatgggccggaatggtgttgacttgatcgccgcctttgatcacggtaatggagtggcggaatggaccgaggtcaggatcatcaggggcctgatcaaaggcgtgcggttcgcgagtagcaaatgccaccaacccttcaattgcgttaacgcctttttccggccgggagctgtggacggaaacgccttcgctgtcaatttcgtagttaaccgttccgccgtgtgcgtattttagcaatttgttcgttggttcgcctaccacgagtccggctaagtcatcggcataaccttgttcggtgagttggcgcgctcccattgcaccaaactcttcaccgaccgtggccatgaaacgcagcggatgggcaaagccgctttgcttaaggtggatcagtgccaaggtcatggctgctagaccacttttcatatcatcggtgccgcgaccgtacatggtgttgttcacgatctttccggaaaaaggcggataggtccaggcgttctcatcgccgggactcaccacgtcttcatggccggtgaagcctaatacgcggtcaccgtgattgagctgggcaactaaattgacccgatcatctttgtatgggatcaatttggtcggaatatcggccgcttcgagttcagcttgcaaaacgcgggctactgcaagttcgtttccatttgcagagtcaatttggattagtttttgcaaaaacgcaatgggatctgtcatgtttgatcatcctttccgtatgccggctgtgtgattggcgatttgaaaatgtcatgtcggtgttgaagacagcttacactctttttgaattaaaattcaatgattgactaccaagaaatttgtgctaaactcatgaatacaaacttgaaattgatgataaacggactgagtgagtagtgatcgcaagacagtacagaaaacctgtagtgatgagagcagggttgtgagtgatcatgaacatggcttagtgcacacggcacaccgagcatttttgcaaggctgtgatggttggcgcccattatcgtgctcccggatgaatacgtccggtgagtgggtcgcgtttttcgtggccaattagaatggtaccgtgggccaaagctcacttctaacagcaactgttaggggtgggctttttttattgggttcattgattggcgatttcaggtaaatgcggcaagttaataaatcgtacttggtgcaaacaaacgaggaggatgcaggatgaagcgtatctggaaaatttttgcaacggtggttcttttaggattgattttggtaggctgcggaaaaagtggcagtcaagctagcagtcagaagcagacaacggtcaagattggggttgtcggtgctgataatcgcgttttaaaggcagtcgccaagaaagttaagaagcaaggaatcaatattaagattgttcagttttcagattacaaccagcccaacaccgctttgaaagatcatgatattgacttgaacttattccagcatcaatatttcttgaataactggaataaaacccataacgctgatttggttagcattgggcagaccattattgcaccgctagccatttattccaaaaagatcacgaaaatcagccaaattaagcaaggcgacacaattgccttaccaaatgatccgacaaatgaaggtcgtgcgctgcaattgctgcaaacagctgggttgatcaagcttaacaagaaagtggctttgccgacaacgcgcgatgtgaccaccaataaattgaatctgaaacttaaagccgttgatgctgctcaaactgccagctctttgccagatgtggcagcgtccgttgttaattccggcgttgctcaggatgctaagttaaatccgaaaaaggcagtcttcacggagaaagtgaacaagcaaagccaaccgtggattaacgtctttgtggctaataagaaagataagaataacgccacttacaagaagattgtgaaggcttttcggactaaggatatcgctgatttgatcgagaagttgtatcacggaagcgaagtaccggcttggacgcagaagttttagttagatgtttgttttgggggatgtgagcggggttggattatgcttcgctatggcacgcttctggatgcggaggtctgtgtgtaaggagtttgcttggaatggccaaagcgcggccgttagtttgggggcgctgacattctagcttacgcccataacgcgctccccggcgcagggacctgcatgtaaggaccttggtcgcaatggccagacccgggccatcacgcccaaggccacaagtccgcctttacgcccataacgcgttcaccggcgcaggaatctgcgtgtaaggacctgagtcgcaatggccaagagcgggccatcacgtctcaggccgctgacattctagcttacgcccataacgcgctccccggcgcagggacctgcatgtaaggaccttggtcgcaatggccaaagcccggccatcacgaccaaggccaccttacactccggtccctaaccgcgccggctcgcgcttactttactttttacttgacaatgactacttttatcgtctagaatcgatttaattcatttagggaaacgaatgatatgagtgagtagatttgatgagactgtacagaaaacctggttggctgagagcagggtagttgattgaattgaagatggctcattgatcggcatcgctgagcattggttaagcgatgatggctggcggtcattattccgcacacaggttattgcctgttactgagggcgctttggcgtcgaattagaatggtaccgcgagttaactcgcttctaaaacattgttttggaagcgggtttttttaattttcggcaaattgctgacacatattgtttgtgacccgaacgaggaggaaaaagtttatgaagttttggaaaagagccattataacccttgcattggttttacctgtcttcgtcttggcggcgtgcggtaagtcgtcatcgagttccagtaagaatgagacggttaaagtcggtattatgagtactgacaaagaaatctggaccgatattcagtcccgcttgaagaagcaaggcgtcaccatcaagttggtgcagtttactgattataaccagccgaaccaagcacttgaagatggcgatattcaactgaacgcttttcagcatcataatttcctgaataactggaataagaagcacaataccaagattgccgatattggcgatacttatatcggcccaatgcgtgcgtattccaataagatcaagtcacttaaagaggttaagcaaggcgatcagatttccttgccaaacgatccatccaacgaaggccgcgcattacaacttttggcacaaaataagttaatcactttgaagaaaggcgttgcttcaccaacgatccgcgatattacttcaaacaagcttaacttgaaattcacggaactggatgccgcccaaacagcacgctcattgaacgatgtggccgttgcggttgtcaacaatgatattgccgcagcagctaatctgaaaccggccaacgcgattgcggttgaaaagattacgagccaatccaagccgtgggtgaactttatcgctgctaagtcttctaaggataagaacaatgcaacctataagaagatcgttaaggcctatcagacgaagcggacagctgaattgttgaagaaagtttataaaggttctacattaccggcttggaactataagttttaattagaaacggggacaattatgtcagatcaagcagttgtgactttaaaagatgtggacgtcgaattccacggtaaaaaccgttcagtccatgccgttgaccatgtaagcttaaccgtcaaccgcggcgacatttatggcattgtcggctattcaggcgccggtaagtccacacttgttcggacaatcaatttactgcaacggccaactggcggcagcattcatgtattaggacaggatatgcttgctttagcaccggcagaattacgtaaggaacgtaaacggattgggatgattttccagcattttaatttgatgaatagccgcaccattgccgataatgttgcgtttccgctaaaaggtatcaagtccaagcaggagattcaaaagaaggttgctgagctgttagacctcgttgggttgacagatcgcgccaatgcttatccggcccaattatccggtggtcaaaagcagcgcgtcggtattgcgcgggcgcttgcctctgatcctgagattttgatttcagatgaagcgacgagtgcgttggatcctaaaacgaccagttcgattctggaattactgcagtcgctgaacaaacggctgggactgaccattgttctcattacccaccagatggaagcggtgaagcagatttgtaatcgggtcgccgtgatggatgccggcgcgatcattgagcgtggtgacttattgcaagtcttttctgatcctaagcaacagttgactaaagatttcattgatacaactttgcaactggatcaggcaattgaggccgttatgcagcagccggcagtcaagaatctgggtgctaacgaccggctattgcgcttaacgtacgtaggagattctgcagataagccgctggttgccaagttgtttgaaagctatcatgtgaccgccaatattttgtttggtgatattcaaatcctgcaggacacgccttttggtaatctgattgtggtgttatcaggtgctcagacggatgttgacgccgggattcattatctggaacaacaggatgtcaagattgaagacattcttaagaaggaggcctaagtagatggcacaattttttacaaaatattttcctaacgttgttcccatctggtccggtgatggcggcgtaactcaagccattaacgaaacgctgtatatgactgctttaaccgcaatcgtggctggtatcttgggaattatcatcggcatcttgctagttttgactgatgaaggtgggttgcttgccaatcatccgttttactttattttggataaattggttaatattttccgagcggtccctttcatcattttgctggcgattatgacgcccgtgacccgagcaattgttggtacggggattgggccgactgcggcattggtacctttaatcgccggcacgaccccgttttacgcgcggcaggtacaaaacgcgttgttaacggttgatccaggtgtgattgaagcggcagaggcgatgggtgtctcgccattaggaattgtctggcgggtttatctgcgtgaaggactttccgaattgattcgggtttcggtcttgaccattatttccgtgatcggcttaactgcaatggcaggcgcggtcggtggcggcggcctcgggaaccttgctatcgccgtgggttaccaacgttatcaatatgatgtgatcattgtatctttgatcttcatcttggcattggtcttcctggttcaattcatcggcgacttctttgcccgcaagagtcatcattagaatttaagctgatttggcagcactctcgtttgagtgctgccttttcctttacacgcgtccaaacaaccatgaacgattaactttatagaaagcaaaaaaagttgccgtgtttgccggtatactgtttctgacgtaaaatgaccctataactaaaagtcaaatccattcgggggtaacgttgtgcatacacttgagattaaagatttacatgtcaaaattaaagctgaaccagagcatccggagattctgaccggcgttaacttaaaattagcaaccggcgagattcatgcgatcatggggcctaatggtacgggcaagtcaacgctagccgaaacgattatgggcaatcctgcttatgaggtaacgcaaggcgacattttgattgacggccaatcgattctcgatcttgccgtggatgagcgtgcgcgagccggattgtttcttggcatgcagtatccccaagaaatagcgggcgttacaaatgctgaattcattcgggcggcaatcaatgcgcggcgcccagaagatgaccagattcgcattactgactttttgaaccagttggataaaaccatggcaacgctggaaatgccggagtcaatggcggatcggtacctgaatcaaggcttttccggcggtgagaagaagcgtaacgaaattctgcagctgatgatgattcacccgcattttggcctgctggacgagatcgattccgggttagatattgatgcgctgcggattgtcgcaaaaggcgtcaacttgatgcgtggtcctgagtttggcagcatgatcattacccactatcaacgcttgctcgattatattattccggatgtggtgcacgtgatgaaaggtggccggatcatcgaaagcggcggcccggagctcgctaaagaactggaaaagaccgggtatgaacatcttaaagtaggtgatcagaatggttgagaccaccaccttaccagcacctaatctgccgaaattcccactagcacgttatttaaaaaatcaacctgatgccgttgaggatcgtgtgattttacatgcacctcaagacattgcctatgctgccggctccagtgaagcgcagcgatttaatcccaaaacgagccttgatgcttggctgttgcaatcacctcaaggcgcaacgactatcgatattcctgcccattttgttagtggggacgatccgattgtcttgactggtcccaagaacgctggtggcttgttgtatgttcatgttggcaaaggggctaacgtcaccgtccaggaaaagtgggctagtggcggtcatgtgctgggtatttggttaatgctagtgattgaagctgatgcccaggtcaattggttaagctatgatagtttctctgcggataccgttttggttaatcgcaccgccactttggctgacaatgctaaacttaactggacattagccggtttttcgcataactccggcctgaatcgggttgacgtccgcttattaggtcaaaatgctgaagcaacggttaatgtcggtgtcttggcttcagggagtcagcatgtcagctacacaacttctgtgaccaacgaagggcagcacacagttggccatattaaccagcgcggtgtcattaccgggagtgcccatttgttattcaatgggattggccatattgtcaaaggtgcccggggaagcgatgcccagcaggaaaatcgggtactgatgctgtcgccgcgtgcggaaggtgatgccaatccgattttgctcattgatgaaaatgacgtcaccgcggggcatgctgcttcggtgacgcgcgtcaatgctgatcaactctactatttaatgagtcgcggtctttcagcaacgttagccaaacgtctcgtgattcgcggctttttggaaggcggtttggctgagattgatgatcagcggctgaagaaagaactgtttgcaacgattgatcgaacgttggtggctgaagatgcgtgaacaatttcctttttttaaggctcatccagaattggtttatttagatactgcggcgacctcacaaaaaccgcaagccttgttggatagcctgcaaaactactatattaatgaaaatgccaatgtacatcgcggcctttataaactggcttatgatacgaccgaggcctatgaaggagtgcggcaggaagttgcggattttctgggagctcaaagtgccgatgaaatcatctttacgcgtggcacgactgatagcctgaatctggtagcgagtgcattcggaccacatgcagttcctgaaggcggacggattgtggttagcggtgcagaacatcacagtaactttattccgtggcagcaattagccaagcgtcaacatgccaagtttgaagtgacccccgtgtatcctgatggggtggtcgatgtgcctgccttgcttgcagcgattacgcctgagaccaatttggttgccatcgcccaagtgacaaatgttgccggtgatacgctaccggttgcggccattgccaaaaaggcgcatgcagttggtgcggtggtggtggttgacggtgcgcaggccgtggcacatttgcccgttgacgtgcagacgttaggcgcggatttttacgctttttccgggcataaaatttatgggccgaccggtatcggggttctttatggtcgcgctgatcttctagccaaaatgccgccgattcagtttggcggcgaaatgatttcagaagttcgcgatgatgtcagcacttgggcagaggggccgattaaatatgaggccggaacccccaatattgccggtgtgatcggattaggaacagcgctgcactggtttaagcaaaatgttgatgcggcagtattaaaaaccgaacacgacctgtctgatcagctgcgttctgagttggcagcgataccggatgtcacggtttatggcaatcaagcgagtctggcaacggtgtcatttaacttggcgggcattcatccccatgatctggccacctttttagatgagcagcagattgccgttcgtgccggtcatcattgcgctcaaccgttgatggcacgattaggggttccggcaaccgttcgcgcaagctttggcgtttacaacaatgctgatgatgttgctaagttagtcgaagcggttcgggcggcaaggaggtatttccatggcgttgactaaactggatcaaatgtatcgtgcggtcattcttgatgaggcccaacacccgcggcatcatggtacgttaaccgatttcgatcatgaaataacggtccgtaaccctagctgtggcgatgttttgcatttgcagattcgcgaacaggccggtcgggtggatgatgttgctttttccggtagcggctgtacgatctcgcaagcaagtgccagtttgatgacggagcagattttagggaaaacgcctgcagaaattgagcagatggtcgagactttttctgacttgattatcaatggttcggtgcctgatgcggagattctgggggatgctgctgttttaaagggtgtccatcagtttccggcgcgcatcaaatgtgccactttagcttggaaagcagccgcgcaagttttgacgcagagaggtgaaaccgatgactgaaaccaaaaacactaaaaataatgaagtcgttgccgcggatatcgactttttaccggatgagaatccagctgatttcaaagatgatatcaagccggtttactcgaccgggcgcggtttgaccgaagacacggttcgggctatttccgctgaaaagcatgagcctgattggatgttggcatatcggttaaaggcttatgccacttaccgcaaactggccatgcctaactttggaccggatttatccgacttggatttagacaatatgctgtatttccaaaaggctactgatcgcacctatcgtgactgggaagacgttcctgataccatcaagaaaactttcgaccgtctcggggtgccacaagccgagcgaaaatatctagctggggcgagtgcgcaatatgaatccgaagtggtttaccataatatgcgggatgaatttgaaaagcttggcattattttcatggatatggattcagccttgaaggaatatccggaattggttcacgaatacttcggaaaattggttaaacctagcgacaacaagtttgcggcgctcaacggggcagtgtggtccggcggtagttttatctatgtgcctaagggcgtgcaaaccgatgttccgattcaaagctattttcggattaatgccgagaacaccggccaatttgaacgcacgttgatcattgttgaacccggcgcacatgtgaactatgtcgaaggctgcacggcgccgaactattcaagcgacagtctccatgccgcggtggttgaagtctttgttaaaaacgatgcttactgtcgctataccacgattcaaaactggagcaagaatgttttctcgcttgaaacgaagcgggcgcaagcattggataatgccacgatggaatgggttgatggtaatctcggcagtaagacaaccatgaagtatcccagcgtttacttggatggtaaaggcgcgcacggcaccatgttgagcattgcggtcgccggtgaaggagtcgatcaggataatggcgcgcgcatgattcacaatgcccctaataccagtagttcgattgtgtccaagtcgattgccaaagatggcggcgcggtggattatcgcggcaccgtgcgtttcaccaagaaagccgacaacgccttttgccacgttgaatgcgacaccattttaatggacgaaaagagctccagcgatacgatcccatacaatgagattcacaattcaaccgtttcaatggaacatgaagctaaggtttcaaaggtttccgaagaacagctgtattatttaatgagccgcggcatttctgaagccaaagcaaccgaaatgattattatgggctttgttgaaccttttaccaaagaattgccaatggaatacgcggttgaacttaatcgcttgatcggcatggagatggatgggtctgtcgggtgatgctttggtggcgcggtttctcagactttcaggtcaccttccaggtctttcaggtatctggcaaaaacagctaagtgcaagtttttaagatgtatttatcagtcaaatatcaatgtagcctcatttgcggatggagctacagtgatgtttggcttttttttgcataaaatattaggcaagcctaattttttgggctatgatagatgcggcaccaaaaatgattctattgagggggctgcagatggataactacgacaaggcaagaaaggtcttgcaatcaatggcgttgtccaaaattgcgcaggaaacaggcatcagtatcggtcagatctggcattaccgggatcgctatgagggcattcaaaaggcgccaccggcatatgttgagcgaatcgcaagcttgtatcgaaaaaaacgggtctagttggggcatacgctggtccggatacgaaaggggagactttcgtaagatcggttggactgattgaaaagtccggcactttgagtgtggtgactgatcagtcttgataggttgacaacgtcgataaggctcaatgactcagcaaagtgggtcattgagccttgtcgacgtttttgcaggtttaatgatgaccatggttggatactgatgcgatttagcaggctggctcacgttatgtgggggtgctacaatgaatgaatgtatgaatactcaccttaagctaaagaatgcggctggggtcgggtagcaatgtagctggattaataggaggcggatgatggctgaggacttggagcatttcatcaaggcgatggcgctggggattccaaccattaaaccggatgagaagcgagcatttttggggaattttcgcgaacgggtggcgatggcagtgacgattcgacaactgcgcgatgcccagatcaccgcaatgcttgattcagtcttgaagcgttaccccggttaccgaatatttttaaacggtcggatgggtgagagtttggtgaatcagtatatgatgcaggcgctggcacatcagtatccgtttacgatcatgaatcagcccggtatgcgcgtgaccaaacgggtattgccgacagactttggatgggtattggcgcatccgacccagaaaataagtcggccgattttgttataagtaacatcctaatcatgattactgcttaaacagctaaggattttttagaggaggatcattttgacgcaacttgataccattcaaaccaccgtgcaacagttgcggatttcgttgaatcaaggcaagatcttcgcgactttaccggacatgctgggcaaagtcatcactagcatcgcgactgagccaaaaacgagtctgaaaattccctgggatgataaaacggctgtcgccagaattcgggccattcaaaagcgggttaaacaaaccagcgatccaagtgtgaccgatgatgaaattgcttttttggtcgcacacttagccagtaccaatccggctgttcgcgataaaggcgtgtttttcctgtttaacgatttgtttcaggctgaggcgttcacgaatgaacaagttaaggcactttttaagcgcttgcaggcacccgatattttgttcagccacatctttgaaccggaaaatgacgcgatttttctgcggagttttgccgttatgattctcagtgggatgatctacgcggatcagaatcgttaccatattcttagcaaaaatgattatttgagcaccgtgcaaaatatcggtacttatattttgctggagaaagatggtcgcggttatgttccgaataaaggctgggcgcatgcttttacccatatcgggaatatgcttgaggaattgagccaagtgccggttcttccgcgttcagaaaaggtctttttgatggctgccgttgttgaggcgtggcgacgggtcgaaaccccgttgatttttggggaagatcatcggctggcgctttatttcagtagcttaaccaacgtcaatcagttttatagtgagacctttttgatgtgtctgaaaaattggcaacacacgctggtcaatgtgcggccacaggaatcataccgtttttgggtacaatggtataatcgcaatcgcttgttgcaggcattaacgttgcgcgctgatttaccacagccgattgcggattatattcaacagattgttgatcttttttgagcgttcgaagcgccagatcattaagatatttatttttgatattaatcggcgttgcagctgacgttcgctgatataagctggttccgaatgattaaaactgtgataacgcggttttgaatcggttttttattagaatggcgtgtgttgcaacggcataattaggttgacgtgatacttgacgaagcacaggtgaaccatcctgcactaaatgcagatcagaaaattatttaccacgttaaaaaaggcagatcaaggtatacgtagtcgttgcccaggtgaagatgctttcgaaaggcaaatggttaaaagcatgcgatcattcaactgatacttgagtactatgggttaaggcctaaatgagattaaaaccgagctgatgaacgtattagctaacttttaacaatttaaagatggctgaccaataaaaatagttataaatgattataagtgagtagatattatagtatattagttttaacgttgtgagccttttcattatcaaagctcaaaatttaaaaaatttttttacaaaaatagaataaatatcggttgttattattagcttttaaaaccagttatccgtataattgacactaggttaagggggagatcccgccgatttctatgttgatatgtaagaaggaacactggggagtgataagtgtgcgaaaggagcagcaaacgctacggattttgggggataaagtccgctactatcgtaagttgaaaggcctatctcaggcggaactggcagcaaatatctgtacgcaagctaccattagcctcattgagaagcggaacaaagtaccaagcatgaatattctgatgcggcttattagtcgactgggtattcaactcgatgatattgtcgttgagcatcatgatcgggctcaacaaatgcttaatgcgattgattatcagattcaccatcaccaatatgcaatcgctgcagacaatctgagcaaaattcggttcgaaaagattaagaatgaagacgatcagaaacggtattactactaccaaggtattgttgagttattcaagaacaatgcccctgatgaatccatctacttttttggtcgggtcttaagcccgcttgttaattcggaacgggatttatacggtattctagccacgcttggcttaggcttagcatatgcggacaagcatacctttgatcgttcgcgggtctatattgatcaagcgctacgaatgttgaagcatgtaccattgtccgacagcaaatatctcgatattgagttgacgatttattggcatattgcccgcgtttactatgagttaagtgacttcaaggccgttttgaagtatgccgatcatgggattcgcgaagcagttaagcacgataaactgtttttgcttgacgaactgtttaccctaaaagctcgtgccatgaaactactgggcgatccacaggcagataagatttaccaaatcgcgattgcctttgctgaagtcagcggttcaacaacattagctgctgggttaagtgcagagatggcagcgcagaagcccaatattgaaactgcataatccggttatgcggtgatgtttaaaaatacctgagatagtcgtcttgcagcatcgttgctgcagctgacgacattctcaggtattttttggtgcggtccggcatctttgccgaggcgcaagatgacatgattaacttacaaaagtagttcgttcttgattaaaacatttatatgatgaagtcgttgatttaactaatcatttggttcgtgtggggtaggcttttttgtacttgctagagccggcttgtttgataaatcggtccgaaccaccaggacgtcgcataaggcgtttcgggtgacatattcggttaccgaaccaataagcagacgttcaacggcatttaaccctgtagccccaatcataatgagatcaatattcttagctttggggatgtcgcgggcgatgattgtttttggcgcgccgtactcaatactgaaactgaccttttctagtcccgcttttttggcctgatcgacgtaaccttccatggtggtcttggcattttccgtaacttgttcaaccattgcggaatcaaaactcgaaacattttgaaacgctcgggtatcaacaatatgaatgagaattagttctgcttgatttcgttttgcaacggcaactgcttttttgaacgctagctcggcttcatatgagccatcgatcgcaaccaaaatatgttgatattgttgtaacattcctcatcacctctaccttcattgtacttgattccatcatgaaattaaatgaaaagcgtttcacaacttgatctgggtaagactgataaaaatgaaaatggtggccagaaaagccccactgaccagaatcaccagatttgcccaagttgggaaggctaatcctccaataatggcaaagacaccgaccaccgtaaaaagaaccgtaaagatcttcaaaaaacgggtaagggctggggctggttttttgatcattaaaaagttttggttgcggtgacgccatgtataggcggctaaggcaaatacgaaaagcgcatagatgctcattaaaatgagtgtcacgggtaaaatccctcctagctgtttggttctattatgccacagtgagtgggagtgctggtggagatttttgtggtgaagtgtttgggtgtgggtggttaagttttgatacatgagcacctgtttacgcccataacgcgttcgccggcgcaggagtctgcgtgtaaggacctgaggcgcaatggtcaaagtgcggtcatcacgtctgaggccacttgagctctggtttacgcccataacgcgttcgccagcccagaaacctgcacataaggaccttggacgcaatgaccaaaacccggtcattacgtctgaagccgcttgagctctggtttacgcccataacgcgctccccggcgcagaaacctgcgtgtaaggacctcagacgcaatggccaaagcccggccatcacgtctgaggccacttacactccggtttctaaccgcgccggctcgcgctcaccacaaaaaaagccggcgcttggccggccaaaaacatgattggtttttatgaaagactaactggtgccgttttcttcccggatcgttgaaacccgctgctagctatgtgggcccagacgccaaggacattagccgctaagtgaaatagcagcaccgtccatgactcttccggtcccaaggtctcgatactgttcggtcaactgatagttaaggaagcgcgaacaccttagaactttcaccgttatagtagcacgagaacgaccattcgtgcaagcgaaaccgctttcgttactttttcttcaccttttgggcttcgtgttgccagcttttaagttgttgttgacgttgggcaagtgcagcttcatagcgacccgttgtcttgggctgatagtattgtttatttttgaggttatccggcaggtattgttgtgccacccagccgttgggatagttgtggggtagtttgtatccttgcccgtggcccaattgtttggccccgcgataatgtgcatcgcgtaagtcatcaggaatctgaccagcttgtccactttcgacgtcagctagtgccgcatcgattgctttgatgccagagttgctttttggtgccagacaaagatcaatgacggcatcggcgagtggaatccgtccttctggtagacccaagcgttccgcactttgaatcgcggttagtgttcgactggccgtggttgggttggctaaaccgatgtcttcatacgcaatgactaatagtcgacgcgtaatgctatttaaatcaccgatcgcaattaaacgtgccagataatgcaacgcggcattgacatcagaaccgcggatggatttttgaaaagccgagatgatgtcataatgagcgtcaccatttgtatcaccggaaatggctggtttttgaaggctttgctgaatggttgttaaatcaattgtgatcgttccgtcacttttagcaggcgtagagagtaccgcgagctcaagaccattgagcgccgcccgtaaatcaccattagtggtgtgggtcaggtaatcgcgtgcttctggcgttaaatcaacttgatacttacctagtccgcgtttgttatctgcaagggcgcggtcaatggcggttgaaatatcggttggggttagtggcttgacttgaaaaatctgagttctgctgcgaatggccggttggatgttcatatacggattttcggtcgtggccccaatgagaacgatgcgcccactttctaatagtggtaatagaaaatcctgcttggttttgtccaatcgatgaatttcatcgagcaacagaatcacggttccgctcatcttggcttcttcggcaacaatttgcagatcttttttggtatcggtagcggcatttaagattcgaaacgcatattttgtgctgccggcaatggcactggcaatactcgtcttaccagtaccgggcggaccataaagaatcatagaactcaaacgatgcgcactaaccatgcggcgaataattcgtccgggaccaacaagctcttgttgaccgacaacttcgtctagattttgaggacgcatgcgaaaagcaagcggttgctgcaaaaagatccctcctaaagaaagtgagcgtgagcaggagcgcttagcaatcggagtgtaagcggcctcaagcctaaatggccgggctttggccatttaggcttgaggtccttacacgtagattgctgcgactgcgaacgcgttatagaaagtgagcgtgagccgagtctacgtcgacgagcacctcatgcggtcacctgatacattaaaaaatcatattttaaaattcggctgcttgcagttctaacagtcaaaaaatgctgcacccttacaagcatgctgttaaacccgccggctgcgtgttaatctaattttaaatcatcaattaaaggaatgacacattgtgaatcattattggcaactgattcgaaaagaacatttgtttggcttggccgctcagacgcgaatgggtgtgattcgaactgtcaaacccattctgccggcagaaaccaacttaccgcagtggccgcaacgtagccgccatgctttggttcagccactttctgcttcagtgttgcaaatcgtaaccccattactagacgattttcctgccgttattgaccagttacgggctgggctaagtcgaatttggacggcattaccggaagcagggcacttatcggcttttaccgcggaaaaagtgaaccagcaaacggtccggatagttttaccggaaacactatttgaacggttgtacacagcagagaattttcagggccatggtccggaatatgttgcctatcgtaatgaagtttatcagttggtagcagacgggttaacgcggcagttgccattgttgacttacttgttttctgcttctccagctgacggtcaccgcgcattttggccgtcaccggatcaggaacggcaactggttcaaaaagtgacggatccagaccacttggatcgaattcttgcgctggacgttgtggtggagcttgatccgtacgctgctagcgggatcacgacccaaatgctgacattcttgcgtgatagctgctggtttgcgctaagtcaaccggccattccggttgccgcggcaagtgaagtacgccggcatgctgtcatgcaggcgcggacaattgcccagatggcacctgatgccaaagtcgccgagctgccggcaatgctggatgcgatggcgacatggttaaatcatgttggcattgatgcgcaacaaaaacaagcttttgaattgatgcagacgcgattagtgaagccggaaacgagccttgccagtcaagttcttgcaacgtttcatgaccaaacagctgcggatgagtcattgagtcggcaagcacaggcggacttaaccagtaccaatgagttgccggggatgacagatttatcggaaaacacccagacattgttacaagctgctatggatggggggtatcagttcacgatactggatcgtcaacagaatctggtgcaaattgccacggatacccagacacaagtcattgcagacggcgttgttaccaactatacgccagccaatgccatgatcgttgccacccatcggcacacagccaaacagttgctggccgcagcaggaataccagttgcacgtggggctaagtttactaaatggccggatgccaaagcagcttttgagcacagctttgcgcataaaagtattgtggtgaaacccgaggcacgcagccaaggcgaagcggttgagcagttttcgataccaccgactgaaaagcagtttgaccgagcctttcatgaagccaatcgccatcatggggtgctcattgaaatgatggcacgcggcacgacctaccattttaccatcatcgggcaacaagtgctcagcgttttggaaacagcagcagctaatgttgtaggcgatgggcgcaaagccattaaggaattgatcgccttgaaaaatggtcaccgcgcgacttcccggcaattgcagcttgatgctagcgcgcgccgtcagttaaaggcacaagcgttgacacctgagactgtgcttcaacgcgggcagcaggttttcttaaccactgccgcgcatccgcaaaccggtggcgatttgtatgacgtgacggacgagattgatgacagttacaagcaactggcgctaaaagctgccgccacacttgatttgccggtagcagctgtcgacattgtgattgataatctgtatgcaccatatgatccggaggcagatgggcaggcgaacgtaattagtgtcaatccggtaccggatctcgctgcgcctttgcacctggacatgggcgaatcacgcgcacttgccccggcattgctaaactggctgtttgctgtgagataagtaaacgaggtcatattaaaaccgacctcagcgtggtaaatttgctctaaggtcggttgggttacaccgttcatgatcatgcttctgcgcgttacgggcacgatgctgacatttaggtgcggtcacattccattatatttgttaagttgcgccaaatgtctttagcggttgcttaaataagtcaaaaccactttttcttaggcttttcttgcgtgtcatcaagtggcggcaatgtgatgttagcctgattgatggcagtggctgccacaataagcagcccaggcgcggtatcggcagtttgggccgtttcgttagcaaccaatgtaaatggcacattggcatcggtgaggagcttcatgtaaggaccggtaatggcattatcaagtttgccgttgagtagggctttatagttgcggtcatggaaatcttttaaaaatggggcaacctgatgctgtcgtttgggatcagccagttcctgattgctgatacataaagcgacccgttcacgtaacgagcccatgtacttgcggcgttcgtcgggtttggtttgcggtgggccgtataatgcactgttgagatgttcctgcatattgtcttctgccatgatgaaaagcctccttatgattggtttgatcaattaaagatataacgatccctggtgaaccgtcttgttgtgtgaacgcgagtcgtaaagttgaaacctgacaacgcgttacaatatgacctcattgtaacatgttctagcgtaaagaaaggaatgacgaaagggtgtttacaagtgacgactttgcagtttttgctgcgccaacgctaagtgcgcggatggccttgattcggcaacagttggatccgaagtttacgcaagccgcgcagagcattgtgccattgttgcagacgccgaaccaaccaatttttgcccatattgcccaacatcggcgtcggcataagaacccgccgccaaacacctgggtagccttttccacgagtcgccgcggctataaaatgttgccgcatctggcgttaggtttttgggatgatcgcctgtttttgtggctgtcctgtttgcgcgaaagtaaacctgtaccgaatgatttttcaggtatcactgatgttatttcgacattacctgacagttggttactggctagtgagcatacatctaaggcaaccgtgccgttaaccgctgcgtcattggcacagacgattgaacgatttgagaccgtaaaaagtgcggaatttctggttggctgggtttatctggcaagcgacccgctttggcaaatacctgataagctatggttagacatacaacagcgggtgcgaaccttagcgccggtatttgcgcggttagttcaaaatactgccgctgtccggtaagcataactacttgtcatgatttcgattcttgatgtgatttcaaaaaaagctgataaaaacttagcagtgaaaacatcagggtggtaaaatcacactgattaagaaacgggttgtcggcttgaacgactgaaaacttcgacttcggtcatcataaaggagaaaactatgccagatgtacgttttcacagcgtctttgatattattggaccggttatggtggggcctagtagctcacatacagccggggcagcgcggatcggtaaagtcgtgcgcgatatttttggcgaaaccccggagacgattacgatttacctttacgaatcatttgccaaaacctatcgcggtcatggtaccgatgtggcgctagtagcagggctgttggggatggcacccgatgatccgcggttgccggaatcgctgaagctggcctatgaccaagggattaaagtgagttttgtgccgaaaagcgataaggttgatcatcctaacacggcacatattgtcttgcaagccggtgatcaccggttagcggtcaccggggtttccattggtggcgggaatattcagatcacggaaatcaatgggtttaagatatcgttgagcatgggtcagccgacttatatcaccattcatgacgatgtaccggggatgattgcacaggtcaccaagattttctccgatgccggcattaatatcgggacaatgacggtgacccgcaccgctaaaggggaacaggcaattatgatcattgaaacggatgattatcatgatgatattttggccaaattgaaattattaccgcatatgcgcaatgtcacttactttgagtgatgacgcgctaacaactggttacgaactggctaataaaggagcttatcatgttttataccgttaaagaacttgtagaacaaagtcatgccttctcctcggttgccgaactcatggtgcatacggaagtcgaaaactcaacgcggactgaagcacagatccgtcatttaatgagccgtaatctggaagtgatggaacgctcggttaaggaaggcattgccggggtcaaaagtgtcaccgggttaaccggcggcgaggccaaaaagctgaaccattatattgctgatgaccggttcatgagcggtaaaccgatcatggaggctgttcgcaatgcagtggcagttaatgaagtgaacgctaaaatggggctgatttgtgcgacgccgactgcgggatcggcaggagttctggccggtgttttgttggcgatgcgtgatcgcctgcacctgacgcatgatcagcagcttgattttctttttaccgctggggcgtttggcttggtcattgcaaataatgccgggattgccggagcagaaggcgggtgccaggaagaagttggctcggccagtgcgatggctgcggcggcgttggtttgtgctaatggcggcagtgccgaacaggcagccaccgccgttgcgattacgttgcaaaacatgctggggttggtttgtgacccagttgccggcttggtggaggttccgtgtgtgaagcgaaatgcattgggagcaagtcaagccatgatttccgctgacatggcattggccggttgcatcagtgtgattccggccgatgaggtgattgaagcggttaatcgcgtcggcatgcagttgccagcaacattgcgggaaaccggtgagggcggcctagcaacgacaccaactggcttacggctgaaagaacaaatcttcggcaaaaagtaattgtgattcaatgacggcacgacagatttttacccggcatgagttttatttaaacggcgttactggcaacaaggcatttggaaagggtcaatcgtgattaatttatatattattcgacatggtgaaacagcaggcaatgtgcgccgcttaattcaaggcgtgacgaattcacacttgaatgcgcgcgggcgtaaacaggcatttgctttaggtgttggtttgcgcacgagtggtttgaaggtagagcgtatagtggcaagtgatctcattcgcgcgcaggaaaccgcccagcagatcttattagggatgcaaaaaaagttgccagttgaaactgacagcggtctacgtgaacaaaatgatggcatttttgaaggccgtgaactggaagatgtttcccaggaagtttttcaggttccagattatcatcagctggtcaccagtggcaaagtgccgattgaagcgattgcggacgggtttcatgccgccgataccacgaatcaggcggaagacagtcaacaagttattgcccgctatgattttgccttgcgtcggattgttgcagcggcggaaacagccggccagtccaatgtactcgtcgtgagtcacggcacggctagcttgttatggttacgtgcacatggaggcgttttgcccaatcgtactgaactaaccaatgccagtgttagcaaggtgacctaccaagatggccggtttaaagtcgcctggttggataatacgagttttcgcgatcagggtttgaaggaagcctggacccacgatgcttgaaaagaaacgtctgcttagtcacatcatcaagtaggcgttttttttgcgcctgtgagtgctggtgaacggaaaatcaagtcattttttgcggataccctgttattttcgaaaagattgtgcactatctaaatcggccgtgcgcgcgtatacttaaggtgaattttgaagtggaggcggtggatgatgaagctgacagtcgaagcttatcttgccaagttgaccaatttactattagcgccaggcacgcgtgcgtttgagcgccaacagttagtgcgggccaaacagcaggtggaaggcggcgcttctgtcggggcgagctgggatcaactaaaagcaagcttgcgacccttggcgattcgcgataacctgacgccggatgtagccgatttttatcgggcgcagacaggtgattctgaaggtgcgcaaacaacggatattagtgcacattttcagcatgatctggcttatcaggagcgggccatttttgctggtggctgtttctggtgcatggttgagccatttgttgatcagcccggtattcaatcagtcatttctggttacacaggtggggacgtacccaatccgacatatgagcaagtcatcagtgaccagactggccatgtcgaagcagtggagattattttcgatacgcggcggattcgctatcaggaattggttgacttgtattttcaattaacggatccaaccgatgcattggggcaatttcaagatcgcggtggtcattatcgccctgtcattttcgttgccggaccgagccaacgtcaaattgctgaagctgctaaagctaaggtggcggcttccgggcgttatgtgcggccgattgtgacggccattgaacctgctgccactttctggcctgcagaaaattatcatcaggacttttacaaaaagaatccgcaacgttaccagttggttgaaaaaacccgccagcaatttcttaagtttcagcatgcgcaaggtgatttgcgggtgttgctgaaacgccgtaaagctaagtagcttggccgaggggatgatgacatgcaaaaacctaaacgtcattggagcgagcgtgatatgcctaatcttgcgggtaaggttgccgtggtgaccggcggaacaagcggggttggcctagccatgagcgcagcgttattgcgacatggcgcggcggtgacgattgtaggtaaaaataaatccaaaggcgagctggcggttgtgaagttaaagcaacagacgaagcggcaagccattaccttcatggccgcggatcttagtgagcaacaagcggttaaccggctggcagatcgccttttgcaggtgctgccgcatttagatattttgatcaataatgccggggttatgatgccggctaagcgaatcgcgacggctgacggcgttgaattgacttgggcggtgaactatttttccggatttatgctcacgctgcggctggcgggattactagagaaagcaccggcagctcgggtggtcaatgttgcgtcaattgcaatgggcaacccgcagctgacgtttaaccagtttgatggccacaactatcgaccatggcatttttatatcacgtccaagttggctcaagccatgatggcggtcaaactcaaccagctttttcaagcagctggacactcggtcatggtgaatgcgtccagcccgggactggcggcaaccagtcttaaggtgattcaatcgaaagcaacggcctggcccatgcgactggcagcagtgagttttcgggtgctgccttggatgcgccaatccccgcagcaagcagccttacccgcactctatgccgcaaccgcacctcgagcagaaggcggggttatttatgctccggcattatggcacggtctgcgcgggtatcccggcttatcggcatggaatcagcgaccggaacttcatgatcaagctttgttggaccgtctttatcgtgcttcacgccaggtgacaggtatttagcctgtactcgaaatgttcacgcagatgttggggctgggtttttttcaacaattctgatttgaccgctatgaaaagggtttcttaatattagcacatgttgtggtgatcgctcctattaccaccgatatattgtatattcaagacttacatttcagattttcttgcggcataataaaaacggttgttgtcgtacaacgaaaactgaaacttaagggagtcttgttttgtgcaaacgtctgggaattattttagttggttgctgcatcagttaaaaggatggccgcaacagaattattatttattttggtttgcctttgggtgtcagctgatgacgttggtggatgcaaaaattactgctgttaccgttattacctttattggcacaaccttaggggtactttgtgtgctggcaattaacgcgaccaaggctgtcaatggctggcttgggttgctgagtgcggcctgctttatttttgttggttataccgctcgtaattacctttccatgttcgaacagattgcttacgtggttaccttggatctgccggtgttaattagtgtgcggacttggaatgatgataccaagaaccatctgaagactttcaacttgcagaaatgggtgttgtctattggcttcaccttggtggtttgggcagtcagtgcgtacttaatcggtcaattcacaaatgatcctcgcccagtttatgatggtatggcatttgcaatttcgttaacaggtggcattgtttgcttcttgcggtacaacaatcaatatttctggtggttgttcagcgggattgcacaacttattttatgggcagtcacctttgcgcaaggcgatgcgagcttggcaatggcgatcaactccagcatttatgtcatcaatgatatccttgcgttcactgtgagtccttggttcaatcgtgggcgtaagcaacttggtttaaagacactttaaatagcacttttgctattgatgtggtaatgttttaatttgttataacctaattaagctaattaaggagcgagatttgtgatctacattctgggcagtattggtgcaggaaaaacgtctttgacaaaagttttgtcagcggatatggaagcacctgcgtattatgaagatgttgaaggtaacgggatgattgccaatatgctgcagaagttctatggtgccggcgctgacagtcgtaaacgaactggggccatgttgcagattgcatttttgaccttccgttatcagcaattgaaaaaagccgtgacgcaggaaaatgcgattatggactcatcactggaatcggactttgtgatggcgtcacaactgcataaacatggcgaaatcgatgacattgattacaacgtctatgtcacgttgtctcaggaaatgcaaagtaacgtcaatggcagtccatggaacgggttgccggatttagccgtttatctcaaaatcgatccggatcatgaactcgatgaaattcaaagtcgcggtcgggatatggaagacattcgccaaaagccggaattggtcgcatattatcagcgcgtcaatgctgcctatcaagattgggcaaaaggttacacgcgctcatccatgattaccattgaccgtgatcggtatgatttcatgcattccgcagcggatcgggcgacagtgcttgatcagatcgagtctaagctagttgatctaggcaagctatcaccccagacttttgaggcgttacaagccaaacatgcagccggtccaatttcgaagtttgcataattttgatggttgccaccaaaaaggttccaagtagctatcctgattggcaggatcgttaacttagaacctttttgtttggcgctcatcaccagaattcaaaaacagggtactgaaattgcacggggaaagctacagaggtacgttttaaggtttggcaatcattaccgcgtgtctatgctatgattaaataaaaataggagtaggcgtcatccatggcgttttggcttagatgtggtgaactattgaaggaggaaaccattcgtgacgatttatgatcagcatatgcatacactgtattcatttgattctgaagcccagttgcgggattatttagcgcagactcaggcgcctgttgtcaccactgagcatcttgaatttgataatcctgatgatggcgggcgtgatgatctgccggattatgccgggatgaaacgaacacaagccgctcttgctagtcactatcaaaacgaaatgttacttgggatagaggcaggctactttgcgccggcagaggaacgattacgcgattatctggccaatcacgactttgatttgacgctgttgagttttcatcatgacgggcagcatgattacctagatgcgcagctggctggattaccggcaaaacagcaattggaagattactttacgcggatgctggctggactcaaacagtttcacgatgcggatgttctcgctcattttgattatggcttgcggctctttgatatcacaccggagcagttggaagcatggggaaagccactgctggatcagatctttgccattgcagtcgcgcatgatcttgcattggagttaaacaccaagtcgatgtatcgctggcagaatgcgcctttgtatgaccaagccatctcatggtatcagcaggcaggtggccatttgttcacgattggcagtgatgcgcatgaaggtccgcattatgaagccaactttaaccaggcactggccatgttaaagcggcacggcgtcaaagaaattgcaacttatcgccgccatcatcggacaatggtgccaattgagccgcctgtggttgatgcagataatgtttattgaaggttaacgcactaaaaagccgtttccgcagatgatgagcggaaacggcttttgtttacttcaaataagcatagacaaagttgaaactgttacccgggctggtttttagatcgtgcatttttggattaaccatccgcgcggcaacgagttgataaagcggaatcgcaccggcttgattgacaagtagttgttcggcttgcgtcatgtctttaaaccgcgccgttggattgttggcatcagcaccattggccttggccatgagctggtcgtaatcgctattttgccattgaccgtggttgtactcactggtgctggtgaacagatccagatacgtattcggatcagggtaatctgcgccccaagtacttaacaccatgtcaaaatcacgcgtcgatgcccgctgttggcgattcttggccggcacgctggcaatactgatcttcaagccaggcagattttcctgaagtgttccttgaagatactcctgggtcgccttgactgcatcaacgtcatcaccgagaagctcaacattaacattcttaatgccgagttccttaagcccttgattccagagcgtttgggcctttttcttgttatatgtggtgattgtttttgtgcccttaccaaccgcagtggcaaaatcggttgagctgtcaggcaattgactcaagtcggccggggtgatgccgcgtgcaacgattgagccgtcagcaagaacgtttttaacaaaagaatcgcgattaatggccattgaaattgcctgtcggatcttcgtgttcttaaacgcgggcactttgttttcgtttagttccaggaaatacgtgcgggcgcgtttggtggcgacataaccggttttacctttttgttgtgcggcaagttggccggttaacgtggcatcatccagtttgccagtgtggtaaaggtcgagtgccgtattggtgtctttgaccacttgaacatcgatttgagtcaggtgaacattcttttgattccaatagcggttgtttttaacctcggtccacttgtcgccggtaccggtccaacctttggatttaaaggcaccgtttgaaagggtgtattcggacttggtgccatatttgttgccccattcctgcacttttttagcgggttgcgggaagaatgcgacattgtttagcaggctgttgaaatagggaatcggatgttccaacgtgacttccagcgtcttgctgttgattgctttgacgccaagggtcgcggccggttttttaccagcgcggatgtcgtcagcattcttgatcccggaatacatattggcatgggatgacttagtggccgggttgaccgtccgctgccaggcgaaaacgaaatcctgtgccgtgaccggggtgccgtcactccacttagcatcgcgtaacgtaaaagtataagtaagcccattgttagttggcttcacaatcttggttgccattgccggctgtagtttatgaccgtaatacttgtacaggccattcatggtatcaataatcgcctgaccggaaacgccttccgatgccttacttggatcaagcgtttgcaacacatctgattccatgcggtgccagacctgttgtttgctcgaattgggactcgattgtttgccttgctgaccgcatgcagctagaacaattgtgagtgttaccgtgagcataacgagccatttatgttgtgttttcaagtcttgcccctccagttaatagactgttaatagaataacaatctccttacaaaaagcaagcgttttagctcgaaaaaacctcgtattcagctgttctgaagtgggtctcggataaggagtatcgcgggatttagtgtgctggcagcttatcagtccgaaatgtcaatttaacggtgaatgagtcgtcatgggcctcaagcttcatttttccgccaagtgtggtcgtcagcgattggacgatgcttaaacccaagccgacactttgcgtggtgcgcgccgcatcggtggtgtagaagcgatcgactaattgatcgacgtgcgaaaccggttgtgccgtgtcatttgagaaggtcatgaccaagtgatggttatcttggcgggcaaaagaaagcttggcctgacttttggcgtatttaagccaattgccaattaaattctgaatgatccggcgcatgagggtttcatcggtttcgagcattaattgatcggtgatggcaggtgtcacttttaatccgctggcggtgagttggtcatagtaatcaaagagttcgtttttaagtaattccgaaacgttaacagattgatggttcaaactgcgggtcttttcctgaatcaggttgaagtccatcagataatgcaggtagtagttgactgaacgcaggttgttggcaatccgggcgagggaaggcttgggatcggcttcaggctgacggtcaagtagttgaacataaccggttgccactgtgagcggggtcttgatatcgtgcgtcagatccatgagcatttggtgaatctttttttcctgttcaacttgttcgatttgaagttgatgcatcgtattgagattttgattgatgcccgcgctaagtttgcgaatcaaaggtaggttcgtgttacttgtgatccctgcattggtgttatggtgattaatataatcaagatcacggctgatgcgatgaacatcggttatcaccagtaatagcaaggcaaagagtactagacagatcacgataagtaaaataaggaagccaagcataatgatttctccttgctaaatcaaacgtacaccgatgccccagattgaaatgatgtatttgggatcatgggcaagttcattgatttttgtccgtaagttgctgatgtgaacgtttagggtattgtcggcatttaaaaacggctcaccccatacatgttcataaagttggcttttatcaaagacttgatggggatcacgcatcattaacgccaacatgtcatattcttttttaggcagcgttagggtttgctgattaacggtcaccacatgacgcttagggtctaattgaatttcgccgacttttagttgatcgttcgtcattaacggttggccgctgacttggcgcagttggacttgaatgcgtgctagtaattcgtcaatgtcgaacggtttggtcaaataatcgtttgcgccttgctgcaacagggcaacggttttggctttttcctgaatcgccgttaacaccagcacgggaacttgggatgttttacgaatggttgttaaaacactttcaccggtcacgttgggcagcattaaatcgagaatgatcaagtccggttgttctcgatgaaaggccgttaaagcctgaatgccgtcataagcctggatgaccgtataagtcggggttagcacatcttttaataaggcctggatatcctgatgatcttcaacaattaatatcttcgccatcagcgtcactcctttcctccaatgatagtgtaagctattaatgcaccttttcacaatttaggtttaattaaggattgattatgctggtaattaaggaatgatcgctatgctggttttgtaaagcaaaataatggaggtaaggacgatggatgaaccggttttaacgattgatcaggtcagtaaacaattcggtcattttcaggcactggatcaagtgagttttacggttgaacgtggtgatatttatggcttaattggcgaaaacggggcaggaaaaacgaccttgatgcggctgattaccggcttatccccaatgcaggcaggcacgattacactgctgggcgagcgggccggacattaccagcgcgctttgagtcgagtaggggcgattattgaaagcccggcagcgtttgaaaaattaacggtcactcagaacttgcgactttgcgccattcagcatggcatcaatgatcaacaggtcattgcagagacaattgattttgtggggcttcgggaaaagcgaaccactagagttaagcacctttcacttgggcagcgacaacgtttggggttagcattagcgattttgccacggccggattttttgattttagatgagccgatcaacggtttggatccggccgggattatggaatttcgacgattacttaagttattaaatgaagaacgtaagacgacgattttgatttcgagccatattttgagtgaactttatcaagtatccactcgatttggcatcattcaccatggtcaaatgatcaagcaattaagcaaggcggaattggatcaggctaatcaatcaggactggccattaccgttgaccgggcgacggtggccgcacaggtattggatcagcacggttatcagccgtttgatgtacttgacgaccagcatctgttattacgccaaaaagatgtcgatgcggccgcggtcaatcaattactggtgaccagtggggtgagtgttcaagacgtcagccaccaagccggttcactggagcaattttacatgcgcttgctagggcagactgaaaaacaggagggacaggcatgatgaatcaaattcgcgccgatttctatcgccaacgccgtacactaggcatgtatgtcatcgttcttatcaccatcgcctatgctgtttggtctgttacaagcaagaatgtcggcggtgtgacagtacatggggatgacaatcttattgctcaaattgctgcaaaaacgtggacggttcagtttggcgtgcaggccgccaatatgacggacacgctcttactttatttctttatcggggtctttgtgattgtttttggctatgagtttagccaaaaggtttacaagaacacgctgatttcagggatttcacgcctccaatttgttctggcgaaatacttagtgatgttgctcgacttacttatcttatttaccgttaactttggcattgcgctgcttggcggtttagcgaagggccgcgcattaggtgccagctggccaagtgttttgaataccatgagcttaagtattgtagcagccacctttttcctgagtgtcatctttagtctgggtgtctttttattaatcgcgactggctcgatgacaattgccacgattgtcgtggttattttcccgattctcgtaggggtgatctatctaattggagagtggtcttggttgaagtatattgatttcttggcagtttcccagaacttgggcgttggtagcatggaaatgagcgagttgccgccgtatattgcagttagcctcggatttttgattgtgatgatcggatcgtcagcatggcttttgcagaaaaaagagttataacctgagtcactttcaatcatagcttgaataaacaaccagcagataacgtctcctcagtcggcgcatctgctggttgtttgcgttaatcttcaagtggcgggtgacgggttttgttgctgaaagattgtcagaaacttttgcgcggttcgcgacatgggtgcatggcgggtccagatcaacgtcatacgggtcgtgagcttaggcgaaaatgggataaatgataaggccatttcccggttatcgagtaaatgatcaaggcccacagtgtaacctaagccaaggtttgtcagtattccggcattgtaggctaaattgaagcgggcaacgatttgcgcgggatcaaaattcggaccggcccatttttcaaacaaggtgacaactggttgtcgttctgaaatgatgagtggttgatggcggatcatttttggcgtgacagccgcgaatttagccaacggatcggttttaggaaccaccaatccccagatgttttcaccggtaatcggggtataggcatatttataagtatcggccggatcgatcacaacgccaaagtcgagtaagccatggtcaagttgttcggtgatctcggccgcattaccactgtagatttttaatttaacatcaggaaatgtggtcaccaaggtcttggccgcgtgcagaacactgcgattaagcctggattcacccaaaccaatggctaagctgccgttaatggcttggtcatcggtcatatcggtgatagcagcgtctgtcaggttaaggatttggcgtgcccggttgacgagataagtgccattagcagttaagctgatcgcccgatttttccgattaaaaagtttggtgccaagttcacgctctagttcctgcatttggcgcgacaaggcaggttgggaaatgtgaatcttattggcagcagccgtgatcgtgcctgcgtcggcaattgctaccagataacgtaacgtgcgtaattccaaggtcaaggctcctaatcatgataaaaatgcataatgatatatgctatataagtattatacatttttcgatcgctgacgcataatgaactcaatgacgaaagaaggtagatcttgtgaccaaagagaatgatcatgcgggtcttttcggactaggccaagctaacaccgcttatcaacaatattttaaaggccagagctatttgcattcacttgtaggcgcggaaaatgaaattgatgtccatgtcgccaatgtgacgtttgaacctgggtgccgcaataactggcacattcatcatcacggatttcaaatcttgttggtaacaagtggtgaaggctggtaccaagaagcaggcaagccggcgcaaaagttacgtccaggcgatgttgtcacgattcacgaaggtatcaaacattggcacggggccacaaaagatcattggatgagccatattgcaattacaaagggaactagcgaatggcttgaacctgtcagtgatgaagcatatgcagcattaacggaggttgagtaattaatgaagaaacaaacagcaggaagaaaacagttaggcgattttgccccgcaattcgccgcactaaatgatgatgtcttgttcggcgaagtctgggccaaagaaaacgagttgtcggcgcgtgatcgcagtttgatcaccattgcctgtcttatgacgagcggcgatttcccccagttaaaagcacacctgaaaatgggtaaggatcatggcttgacaaaagaggaagtcgttgcaaccatcacgcatttggcattttatgcagggtggcccaaggcgtggtcggcaatgggtttggctaaagaagtgtacggcaaatgagcggatgcggcaccatttgagtatttaggaagtgttgtgtgtgaagggcaaatcgcaccgtttggcaatgtggtcactggtcatcggatgcaagaggttgccgattttatcaagggttataacgctgctaaagtagaattaactgaacatatgaaagattaatattgagcgcctgtggggattgtcaaagtaagttgatgatctaaccacgggctttttattttaaccgaatatgcgtttttagatgatgaccgagtcaactctgaaaagtatcaatcaccgttgtacggttacgcccacgataagcaacttgccgtcctcggtgaaaaaccggcatgagaattaatttagactaatgtatacttaagaagtaactgacacaagatggtaagtcaacaaagggacaggtggcatggtgttaaaagcggatttttttgatcattatcactacaagaccgagttggctgcactttgccgtgagtatcatttgactgcttccggtaccaaagcggaattgaattagcggctaagggcggtaatgttaggtgagcctcctgaaaccccaacgcgaacgagcgggccgacagccaaggttaatcttggtgcgatcacgctcacgacgccacttgccggatcgggtttcgcgtttaacgcggccgcacgtcgcttttttgcggcgtattttaagacatctaagtttgcgttcaccaagccaatggcagttgtcaaacggcaagccgagtcgcggcctgagttaggattgacggtggccgatctagttgcggtttatcaagcgacgcaaacaccatcggcgcgcaaacagtttcttgcccataatgtcgaggaacagacttacgagtggaatcgatttgtacgcgacttctttgctgatcatgctactgttgtctttagttctcgattaaaagttgcagcaattctctggaaaaacgtcaaaagatcaatgactcccaagcgttgtacacatcagttattgagccgatatcgtgaggaaatcgcacgatataaattataatttgcgagtccttttccggaagggacactcaatatgcggtgaaataccacgatagcttttcatgacctctttgattttcattttattttagttgaatattcagtataatcaaagccaagtaagcgtaccactttacaaatgctatgatcaaaagtctttgaacaaagcaattacttttgagtctttattactttatttataatgactggaggatgaaatgaaaatcaaatcaggcaccttggatcaagggtgggaactggtagaccgattagatcacgataatgtaaagtcgcaccctttttccgggaagggggctgacttgaccattaatctcgttgttaaacaaggcactcaagttattggcggcgtggcggcgagttcggatgattacgggatcggttatttagagatgctatgggttgatccaatgtttcgtcggcagggaattggccaggctttgctagtggcagtcgagcaggaacttttcaaggcgggatgtcgcaaagtcaggttagaaactttcgattatcaggcgccgtctttttatcgcgccaatcaatatcaagcgttcggcaagttgcattatacccatgcagcattgaccgaatacttttttgtcaaaccattgcagttgcaagtatcaccagtcttgccagcgatctatacgttagcctcaggggatgatgcagcgatgacttgggttgaagatcagtttgaagcagagaatttggcgaagaagccgcttttgcaggcaaaaccgggaatcacgttcacttttttggccgaagaagatggccagtgtgttggcggtatctttggctatagcgctatgtatcgaatcggctacattgaagccttgtggatcgcaccggcgtatcggcgtaaaggacttggcacgcggctggtgaaccaactattggccgcgttcaaggaaattaattgcccgatcgtccatttagatacgttgtcattccaaggcccgcagttttatcctgcgctaggatttcaacaatttggaaccgttgattatcctgacaatggcgtgagtgaattgtttttcgtcaagttaatccaagattgaaaagagatgcagcatggtcagcagcaacagtatcatcgtcacacgtgaaaaagcgccagcaaaaaagcaggccattgtgcgcgaagttttagcagacttgcctgaatggtttgggctacccgcatcaacacaggaatatattgatgcggcggcaactttaccactgtgggtcgctaaacaggataatcaagtcattgggttcattgattttgataaaacaactcaagcaacaggtgagattaactgtatgggcgtcaagaaagcttaccaccacaagggagttggccggcaattatttcaggcgttagcggtctttgcgcggcaacatgcacattatctgcaggttaagacagttgatgaaggtcattatccggaatatgatcgaacgattcgtttttatgaagcgatggggtttgagcgcttagaggtcttcccgcagttgtgggatgcctggaatccgtgtttggttttggttaaaaagttataaaaatggctatggttctgagaacacagtgtttgtgagtctcagagccatttttgtttgtggaagaatacaaataaaagtgataaacgtcatgaacctatttacatctagtttttaaaactatataatatagtcattaaagctgatggaggcgcaacatgaccgaaaaaattgcaattctcgttgattcaggttcggatgttcctaaaagtgtgctggatacgaacccgaatattgcggttgtcccattgaacattacgatgaacgggcataactatttggacgcggttgatattaccccggatgaattttattccgcattggcaacggctgaaaccttgccgaaaacatccagtccttcaccgcatgcagccaaagaagcgctggcagggctgtttgcggcgggttatacgcagattcttgggattacaatttcgagtgcgctgtcagtcacgcaccatgtctttcaactagcggcggaggagtttcccgacaagcagattaccattttggatacgaaaagcatcggcattggcagtggcattcaagttgcctatgcgacctcgctaatcaatgccggcgaatcgtttcagacgctggtggcaaaagttgaagcgtcaattgttaaaagtcggatctatttttacgtgccaacgctgaaatatttgagtgcggggggacgaattggtcgggtagccgggttagtcggctcagtcttacatattaaaccggttatttcatgtgatccggaaggcgtttattatccaatctttaaagcccgctcggaggaaaaggcactgcaaaaactggtcgatcagattaagcaggattgcgtcaacagtgaccattatcgaattggagtcgcgcatggtcagaatccaacgctggtgaagaaactagccgcaaaaatagaagaagctacaggacacccggttgattttatcggtgaagtgtcaccatcgctcggcgttcatactggaccggggttgattggtgctactgtgcaatcgtattaagcgtctatgacgaatggttattttttgcgaatgttaaatgatgaccagtcattaaagttaaaactaattctttgcaaattaaagtcagatagattttcacacataaaggaaaatctatctgacttttcagcaattatcggaaaagattgaagatttatttttgatttaaccataaccgataaaaatgattaacatcgccaatttccataattgttaaatcaccattgatctttcgggcaaagtcgattgtgaaaaaagaagatttaatatcagcgccttgttttttaatgaattgctgatcgtttgcattcaagctttcaaaattcttcccccaataatcaataaccacaaatggatttctttgccaatagaaaacgcgatattcctcaaatgtcggattgtttgataagtaggtgcctgtctgaagtagcggaacaaactcacgtatgacaagaccaccaacaaggttctcgccctgtcgagtaatgaagttatgaatcacttccaaagcttgtgaaaagttttgagcatttggaatgtaaaaggcactataccattcgtgttttctgctcttaacaaaatcctttattgtgactggtccggaaaattggttaagcactcgtatgatatctttatcggataaatcggttgtccaagctgacttgagtgtgttagagtgatgggcccatctaggaagcaaatgggtccctgtataggcgtgggtatcagtaagcatttttgctccagaagctaagattaaactattcattttagaatatgtctctggccgtaacatccatccacgatagataactgttgtttcagaaggaaaagacgtattcaactcaagctgattttgatctaataagcaatcaagattaataagccgaacattagtcatggattttgcaaccgtatattcctcggcgtaatctgggtcgggttgagagactcttaagggatttcccggaaacaacaatgttagtttgctagtgtccatttttagaccccactttgaatgatggtgatgacctagaagagggtagccatagaatgagctttgaattagtttagccagctagttgaattttatcgaaacgacgccttcatgccaaccacttattccgtttcgccatctcaattgcctcaatccgattatgcacccctagcttactaaagatggccgacaagtagttacgcacggtgccttcagatagaaaaagcgaggctgcgatttgtttggaagacaaaccactggcgacttccccgagaacggccaattcgcgctctgtcagggggttgctttcagccgtgaccatgttcgcaactaattccggtgcgtaaactgtttgccccgtcatcactttccggataacggcgattaggtcatcgcttgggctgtctttcaaaagataaccgttcacttgagcagcaatagcgcgttgaaaatacgctttttgcgcgaaggtggtcaggataatgactttggtaggtaaagcgtgcgtgtgaatttgatcagcaacatccaggccggtcattttcggcatttcaatgtcgaggatcgcgacatcaggcggctgcgattgaatggcttgccaagcggtggcgccgtcttgtgcactgccgatgacggttgaatcatcttccaagttgagtaactgcgacagtgccgagtttaacatgctttgatcttcggcaaggtataacgtgatcatcatcaggcctcctttggcaaagtaagtgaaacccgtgtgccttggcgattatggacaatggaaaaagtgccattgaccgcttgcatgcgttgttgcatgccgctaataccatttgacccagcgcgaacatagctttttgaatgaccgtcatcttgaacctcaaccagataagcggtcggggtttgatcgaaggtaatgatggcttggtgagcgtgcgcatgacgaatcacattggtaattgcttcggaaatgacggcactcaattgggcttgaacggttgtcggccattcagtggcttcattttccccgtttgtcagtaaaaccacatccgcttcggcaagatttttaccttgttccaacatcatttcgctgagggactgctgatgaaggtcgttgacaatggcgcggaccaattgtaggttgtcgcggctggttttagcaatatcgtctagttcttgggccacccgttccggcgccttgatgagtaacttttttgccaattcggttttgagcgtgatcattgagaagctttggccaagtgtgtcgtgcaagtcacgtgcgatgcgttcacgctcaccgcggcgaacaaccgcctgcagccgccgattggtttgacttaactggcggcgacggatgactgagcgcgcaaccgcgtatgaaatcaacggcgaggctaatggaaaaataaggtcgccaatattcgcattgtcgagactgatgacgccaggatgaaagtgattataacgccagagtccgatgaacataatcaggtaaaaagcggtggcaaaccagcgaaaatattttcgcgggtaccgggccaagataaatgaaatctgccatccggggtaaataatcatgtagttattgaaggcaaagatcgaaaacaagccggcaatgaagagttctagtggaatcgtcaccgccagccaccgatcgatttcattaacgagaatataaacgaccaggaaaaggacccctaagccgatccacagccagtcaatactggacttggtggggatgaactcgctcataatatatggcagataaagcagccatatataactggtccattccagattacttaaccataatcgaaagctatgcctcacccaatgccacgcctctccgttgttcgtttcgagtcattgccacaacgaccaagccggcaagtaagacccaaacagctatgccaatcaaattggttaagtctactttagcacgtgacgtcagttcatttaagagattgttgacgaaataagtcggcatcagcttgccaatcgcttgaagccaacttggcaacatgctgatgggccaccataagccactgacaagggccatcgggaaagtcagcaagttactggcaagactgagcatttcttctcgatggatatgcgacaacgcaattccgatcatgagcaaaggcagctggccaattaagaccacaactatcagccccaaccattgggtgatttcgagccgaacgccattaaccccaactgcaatcccgcctagcaccacaactgacagcaaactcatcatcaacatccaaaaagtgatggacgtgtaataaggtaaagtgccatgcggagaaagccgcaaaaaagttgtcagtcctttttcacggtcacgtcttaagatagaagcaatgctgaagaaagcctcaattaaaacactgtagacgatcatctggcccaggtaagtgagattgaattgcttgatttctgcagctgatccactcaccatgatcttagtgaaaagtaaataaaatccagctggcatgatgattgaaaagaaaatgaatgaggcgtttcggacgactaatcgcttgccgtcaaaagctaattgtgcaaagaatgttttcattttagctggcctcctgttgggttaactgtaggaaaatatcttccaatgattcacgattcacactcacttggtgtagacggtcaagcagcggtgtcaatgcgcgcaaggtctggtcaccatctgtgctgtgaatgacgagtttatgcttgagatgatcaacgcgatcaactgcaggcaatccgttgaaaatgggcagttgcaggtcagtttcgaatgtaatggtggctccgagatgctgtttttgcagttgctggagggagccgtcaaatgtgaagcgacctttttgcagaatcaacaagcggtccgcaatttgttggatttcctcaagataatggctggtaatcacgatggttttaccttcttggcgcaactgctcgatgttgtcccaaaatgctttacgcgagtttgcgtccatcccgacagtaggttcatcgaggaagagtaagtccggttggttgattaaggcaacggcaaatgtcacccgacgcaattgcccaccggaaagactgccgagtcgctgtgttttaaaaggttctaagcgtaagtccgtgagcaatttattagtgttaagcggatgatcgctttcagccgcagcaagctttagtaaatctgcaatcgtgatgccgggaacaaccatgtcgccttgaagcatcgacccgatccgtgccttgctaatggccgatccgggctgctgttcaaaaacgctgaccgcgccttcacctttaagtagtcctagtaaaatgtttagcagggtggttttacctgcgccgttaacgccgatcaaaccgatgatttcaccggcgtttaccgttaagttaatatcatttaaaacttgttttttaccatagctgaatttcagatgttcagttcgaataattgtgtgcatgtcatccacctccaacatcgatactacgcggccaccatgattgccagtagtcgcgattgtcatgtatgtgatgtgacaaatgtcatgactgacgatttttattgcgctggagaggcacacgaccttttgttgctatgatgatgaatcatcggaagcgtcagatcaaaggagcagcagcatctctattgtgcgaaccgtacttcttgtataatggaaggaatatggacgcggattaaaagaggggaatcaggaagatggcagcgacattatcggagcctttgcgtaatctattattagcaagtcaattaggactgagtgtgcatcatcctttagccggctggtcagtattgacgattctttatcgcgatgctggcagcagcagtgaaccgattaccttgagttatttagcccggaagtacaacaacgattatcttgatggcctcagtggggaaacgcccattgccgatgacgtcttgaaaaaggtgctcgatgtcctcgtgacgcaagcggggttagttgaagtaagcccgcgaaaagtacgcgcccgcatgcgcagcggtcagtaccatatccgccagtcgtatgtttaccggatcacaagcagcggcattgaatacttgaaaatgatgcaaaaagtcatcgatgccgaaagtaccattacggccaacaccaatcggattcaggaatacgtggatctggtcgaaaaactgagtgtaccggttcgttcgggggccgacacccggctttacaatgattttaaaaatatgctcgatgcctatgacgatgtgatgaaaggcattcataaattagaagatgatcttgatgagattgcaaacgatattgcctttaaccatggaagtcaggctgcagcccacttgcagcaaatgttgcgccaagaagcgatcccggcataccggcaaatgttgaatcaggcagcacgtattcaagggttggctgacgaccgtacttttcctgatcagattgcccattcccagcaaggtgagggggacttggatgctgcccatgctgctggccgccaagatgtgttggtaacgcggtttcagcggaacaagcaatgggcacagtcgcagctcaatcggttatcgctaagcatgagtccaacgacgaccgcgattgatagtagtcttgactcgatttatcttgtctttaataccttgttaggcattgtgcgcttacttagccaggaatttgaacatgccaagcgccaaacgatcgacttgaaagtactgtctaagaaaattgatgggttactcgcacattacgtccagctgacgattcctgcccagatcccacggcacttgccggcggatcgtgaagttgatgaccccaatgatttgctagatgcgtctacgatggggccagttcattatttagccaatcccattacaaagcagccggccagtgccgccgacaatccgaccgtcaccgatgatgcgccgagtgagcaggctcaactggcaggactgcgagaatttcggcagacgttgatggtggatgatttccatggccgggttgatcacaatttgacgctcaagacagttaccgcgcgcgatgaaatcgttaaactatttgctgccacctatcacaaagatcttgctgcttttgctccatttggtcgcgcaaccaaatcagtcgaagcattaccggattcgccgccgttacagctgcaagtggcaggcgaagattatgcagttgtgctgccgcatgggttcacgttttcgtttgattaaggagaagaaataagatggcgcaaataactaaacgcgatcaactggtgattaatgaattgttggatcacggggtgtttaccaccacgccgcttgctgccgccacgcaattgagtcgaggtgccattgcggatttaaagaaaccttctgtgcagaaacgaatcggcttttactttaagaatatgttcggcatcatgcccgaaaactttcaagaaaatctgctttttctattgggaaccgagaaactttcgccggtgcaggttcatgttcttttggcaacggttaaaacgatcattaatgagccggaattacagaataatcaagcggaccgggccattgccacccaaaaaatcgtccggcaggtgcatagcgaggttacggagctagatgagcgggaattgttgcgtaccattgatgcactgttcgtaaaacgattcgggttgttcaccccagatcgccttgaagacgactcggaaaatgtaccagctgaaattgatgattattgggaggttcatccggatttcaatgaatttacccagaacctggtgaattatttggtcaatacccaatcccaagaggaagtaagcgagattcaaaaagttaaccgtgttttactgacagaacaatttatgagtcctaaagccaatccgcaactttggtcaacgttggctgtcaacaaacaagagattgccgaacagtgggcgcaaggcgggcggtttgttttagaaatcggggatcgttatgcgctgctactggacacgcaacgccagcctagtgttgccaagccttatctggtcgctttggcagtggcccatcaacttggcgcaggggtggcggctgctgatttaaccgcactcattagaaaaaaagcagtcgccatgggactcacagcgcatacactcaacgatgctcgtgaagatccggcgctgtttgcttactaccggtgggtcatgacgcattgctttcagtctggacaggtcaatgaactgacagcgcggttgatcggcatggcgttcacctctgcaaatgtttttgaaaccgacttaccccaaccattgacgttgaatccttggcaactcacaccgatgctcgactttccgttgaaaaacaaacaggcggtggtcatcgaaaataacggggtgtttgcgttgcttcatcaggaacatccagactggccgttgattttacagtccggcaatgatttcaatgatgtgtatgtgcgactcattcaacgactggaagaacgagggatgcgttatgcatatttaggcgacattgatagtgctggtatccgcatggccgaccgatttgccagtcttttgaagcaaacgccagcagaagcagtggcggccttgcaaacgccaagggatgtccgactttggctggcagaattagggaaacgcaactcggcccggacacgtgcgcttcaagtcacttcgccggttttccaagctgaaatggtctcggtcacaatgtttggaaaatttgtggaacaggaacagctcatgccgatttatacccagcggatcgcggattggttgaagcaggaagattagtaagaaactgagcaagtgtttttaatcaattgcaaaggaaaatagcccaatgtatacgatcgaaaattatcgccccgagctactagaaagttggttgcgttgtcgtgccctagcatatatgcgcagtgggtttcaggatgagatcaccggtgaaaaagaaactgtgacggcagaaaatggcatctcactagtggcaacggttgatagccaagttgttgggatcgctgaagccatctttttaaatcaagaacaggccaaaccggaatcttatggtttgcccgcaaagatgccattgagcacccttgacaccatggcagttcatcctgattttcaacatcaaggaattgctaaggcgttgttggctcagctgaaacggcggttacaaagtcgtggcggtgcgttattgatctatacgctggatgacgaaccagcgaatcaactgtatcgagcagttggcgccaagttgtgttatacagcggcaattgtccatgggcacagttctcataataaagtgccgcagtgggtgaattttcacgtgacagatgatcatcaaatgacgctttatgatgctcaaggtgctgagattccgtacgggcaggatatggagacgtactttgttggtaaaaaggtaaatattgacctgcttaaagatgtcagtaagattgtcacggaacatgtttatgtgttagatatctgatgatcaagtgctgcatttaattagatgttatcttatcaagaaaataatcttaaacgaatcgctaaacgagctttttcacgattagatataaaagagcacagcctgatcctagtcagtgatctgtcccccaaagttttgtgccaactttgggggacagatcactgttttatctcgctcactgggttgctataatgatatttgctgagtaactaagcagactgaacagaaattgtggggaagatattttgattgaagaccaaaccattcaaatcgtacaacaagacttgacgggaatgacgagtcggcaaatcagtacggttttgaatttgatgaatgagggcaatacggttccgtttattgcgcggtatcgtaaagaaatgaccgggagtctggatgaagttcagattcaggcgattgaggaagcctataaacgggtgacggcgctgcaggatcgtaaagctgcggtgatcaagagtattgccgaacaaggggcgctgacacctgagctggagcagcaaatccatgctagtaccaagttgcaggatgttgaggatatttatttaccttataagcaaaagcgtcagaccaaggcaaccattgctaaagcgcgcggacttgaaccttttgcgcagtggattctttctttcccagtaggcgatttgacgtctgaagcggctaaatttgtgaatccggacaaagaggttgcgactgagcaggacgtattggacggtgcccatgaaattcttgcggagaagtttagcgaaatggcgccgatccgcaattgggtgcgcaatttcaccatgcgtactggtacgattaaaacgaccgtcaaaaccaaaggcaaggaactggacgaaaaaggcgtttatcagcaattttacgactttgaagagaccgtcaagaaaatgtcatcgactcggacgctggccattaatcgcggcgaaaaagagaagattttgacagttaaggttcaagttgatcctgcttcggtgatgcaatattgccattttaaattgattgataatcgcccgagtaccgaagcaacagcgtttattgaagcggcgtatcaggatgcctacaaacgcttcattggcccggcgattgaacgggaagtgcgcaatactttaaccgaaagtgctgaggagcagtcgattaaggtctttggtcagaatctgtacaacttgctgatgcaggcaccgattaaaggcaaggtggttctcggatttgatccagcttatcgcaccggctgcaaactagccgtggtggacgaaaatggtaagtttttggacaaagctgtcatttatccgcacaaaccggcgccagagaagaagcgtcaggccgcggcttcggaactgatcgcgctactcgaaaagtatcatgtgacgatgattgcgatcggcaacggcacagcaagtcgggaatcggaacaatttgtggcggaaacgcttaagcagatcaagcgggatatttattatgtcatcgtcaacgaagccggcgcatcggtatattcagccagtcaagaggcgcgggatgagtttccggacctgcatgtcgaacagcgcagcgcaatcagcattgctcgccgcctgcaggatccactggcggaattagtgaagattgatccggaatcgattggtgtggggcagtatcagcacgatttacccgccaaggcgctggcaagtgaagtcgatgcagtcgtggaacgcgcggtcaatcaggttggcgttaacctgaacacagctagttaccaactgttaacccacatttccgggttgtcgaaaacgattgcgactaatattgtgaaataccgcgatgaaaatggccgctataacagccgtgccgaattgaaaaaagtaccacggctgggaccgaaatcatttgaacagtcagttggttttctgcgaatcatcggcggtaagcagccacttgataacaccgatattcacccggaaagttaccccgttgccaaaaagattctggctgcggcggggttatccacggctgatttaggtgatcatgaggcggttgccaaggttgctagtgttgatggtgcgccatttgtcaatgatggcgttggcgttgagacagtgaatgacatcattagcagtctgcaaaatcccggtcgcgatcttcgtgacaacatggcagcaccgcttcttcggcaagatgtccttaccatggaagacctgaagccgggcatgaagctggaaggaactgtccgcaatgtcgtggatttcggcgcgtttgtggacattggcgttaagcacgatggtttagtccatgtctctaaaatgacccgcaagtttgtccgcgatcctaaaacggttgtggcagtcggtgatattgtgacggtctggattgaatcggtggatctcaatcgcgagcggatacagctgacgatgatcgcgccgactgttggttaagcggctagcttgcaataaatagaaaaaatacgagcggtggtttttaatgttggttcaaggaccaatattaggaagccaccgcctattttttttagtttaatgaaggttggatgtatccggtttcgtgtgcttaatgacagtgtcgataaaatcttcagaataaccgtatattaaaacaacggttgaaattaattatagaaagattaaaatacaagaatatctaaaaaaggagctgacagtatgcgaccaatcatcgcacttaccggagattcaatggtcgcgccttcgcctgtcattaatctgaactatgcagacatggcgccaaacatgatcaaaaatgcaattgtaaaagttggcggggcaccgttaattttgccgtatcctgaagatgacgctgcagcagcgtcgttggcagcacaatatgttgatgtttttgacggtttggttttgccaggcggaccggatgttgatccgacattttatcacgaagaacccattcaagcgatggggcgggctacttatcaaaaggatcggttcgaaattgccttaattaaagcaactttgaaggcgaataagccgatttttgcgatttgtcggggcattcagattcttaacgtggcattaggtggcaacctttatcaggatttgccaagccaaaacccgcaagccaccattcgccatgcccaggctgcaccgggacagtggccgacccatcacgttgcgattacgccgggctcccatttagcagcattgttagggacgagtagttatgttaactcccggcaccatcaggcagttaaggatgttgcagcgagtcttaaagtcactgccaaagcgccggatggagtcgttgaagccgttgaaagcaaggagtcgaatctgattctcggcgttcagtggcatccggaaaatatgtggcaacaatttccggaacaactaccattatttgccgatattgttaaacgtgcaggaggtgatggcaatgaataatgttgtgaagaaagaacaaatgggttattggagcatgattttgctggggatcaacggcattatcggttccggaatttttctgttacccaatcaggctgctaagttaattgggtcagctagtatttttgtcttactttttgatgctttgttggtcatcagtattgcactttgttttgctcaagccgcgacctattttgatcgtgatggtggtccgtacttatatgccaaagatgcatttggcgattttgtcggctttgaggtcggctttgtcacttgggcgattcggattatcgcggaggccacgatggcggttgctttcacaactgcattagtcgggacttttccagcgttaaaccagcctattattcgcgattcgattatttcagtcatggtcatcggcttggcgctcatgaatatcgccggtgtccgggtttcaaccgtggtcaacaatgtgattagcgtttcaaaattggttccgctagttttgtttgttgcaatcggcattttcttcatcaaaggcagcaatttcacgccattattcccaggcggcagctataagtccggtagtttcgggcaagccgcggtggtcatgttttatgctttcaccggttttgaaggcttagtcgttgcggcgggcgacatgaaaaatgccaagcgtaatttacccaaagccgttgctaccgtcatgacggtggttgcacttttttacatcctgattcaggttgtcagcaccggtattttgggaaatgcgttggcaaatacagatacaccaattcaaaccgctttcgctaaaatcaccggtggctttggcaatgctttggtggccgccgggacgctgttatcgactgggggactgcttgttgccagttcctttatcaccccgcggtctggagttgccctcgctgaaaatcacatgatgccgcaattattggctaaacgtaatcgggtcaactcaccatatgttgcgatcgtcgtgtccgcaaccattaccttactcatcgcgtattccggcacattcggctacctcgctcaaatcagcgcggtttcaagatttgcccaatacattccaacatgtttggcggtaattgtatttgccaaaaccaagaccaaggataaaagcagtaccttccatctgccgcttggccccgtcattcctgcagtagcaattttagtcagcatctggctattggttcaggttcaggtaagtcagctggtcatcggccttggcgcgttgctcgtggcggtaccgttttatttcttgacatacacgtaccggcagcatgggaaagtttaaccactcaagaaattggaacaagttaacaaaaaccaggtcgggggttagcaatcaaacctataattcggttttttacgtgcaaactggtatgtgcagttcgaatccattagatctgcgagactctgaacgataactgtgttttaggtaatgcgtgacaaaagatatcactttttccccaaatatttgattgattactcttaaccatttagtggttggtgaattaaaaaagtatagggcatacaattacgcccagacatgttttgcggcatagcctactacggtttaaggtgatataatacctctgaggtgcacgcatgaaacaaaacatcatagacttgttttcgggcgcaggaggacttactgaaggctttcggcgccctgaatataatatcttggcgcacgttgaaatgagtgttgatgcctgtcagacactgagattacgagatgactattaccagctgaagaagcgtaacatgcttcagcaatatcgcaatttcctggatggaaaaatttcactttctgaactggaacagcagtgtggattacgccaaaaagctttaacaatcaatgaaacaattgatacgggtactattgacggaatattggcaaagatcgactcgaagctttcgaacagacaagtacatggaattatcggtggaccaccgtgtcaagcttactctacagtgggaaggaagcgtaatgaggctaagaaggaaactgacaagcgaatttatttgtatcgcttctatattcagtttttggagcattacaagccggagtttttcttgttcgagaatgtgcggggacttctttctttcaaagatttagatggtaagcgactgtttccaaagatgaagcaagagttcgaggcaatcactgataaactaggctaccatattgattggaaactaatcgattgttccgaatttggcgtcccccaagaacgaaagcgtattattctttatggacagcgaaatgatctgccgaagttttctttctttgaaagacttgcagatctgcaagaaactcccgggactgttggtgaactcttcagggatttaccaaagctgaaggccggagagacctgtaacaaatattccaaggctcaaccgtgtgcttttgttgtggaaaatcttcgcactcctgcaagtaagctaactcagaacgttgcccggcccaatcgggaattggatctaaaaatctacaagattgcagctgaaaagagagcaaaacataaaattttgcattacaatgacttgcccgaagacctacagactcacaataataaaaaggcatttttagatcgtttcaaagcggtaccggcagatggggtctcacaaacagttgtagctcatattgctaaagacgggcattactacattcatccagatgtggagcaaaatcgttcgattacagtaagagaagcggcacgtattcagacattcccggatgatttctatttcatgggttcacgaacgcaggcctttaagcaaataggcaatgcagttcctccctacctagctaagaaaatggcgcaaacgatattactaaacaaacaatgaggtcagcttagctgacctcattgtttgttattcgttaatgtaagctgagaagaatcctaaattgggctcatccagagtaccaacaaggacgccccgatctaagaacacattacccatttcacaactcgtttccgccacaagcgcacacgcatgacaggcagcaatatttaacgaatcgcgtccttggccagaactatcaatgcaggtggggtcgtagctacaccagcgagctttttctaaggcactggcgagtgttttgaagaaattatctggtataccctggcgaacaagacctcctaacgtgccttcagagtctgcgcttgatgtatagatcaagatgccagccatatcagatttgtctgcttgtcccctagaaaagtacagtcgctcttttaatgcagaagacgaatagccgctagcgaaactgagttcacgtaaaagtatatgagaaaaggtgtgaagcatatagtatgcgggatcgatcaacggtttacggttttctgggacttgaaccgaacgtttacgcacgatattggcgaagatttttgaaccgtcgagtttatttctccaaaggtttagatgttgactgctcagttcaatgaatataccttcacctgaatttttcagagcgacaaaccggttatctgagcgacgcaacgaaacttcattaacaggagcctcgtctgcgaggccagctcgtcctgaacttgcacgttcgatttgttcttgttccagcatcatatccgactcgattggacgaattcgactatagcctttaagaacagaaatgacctcgagttgatttaggagcgtaatgttttggaagacacttgcgagtttcgtatccccaaagtgttcacgaggttgcagtgtcatgtcgaagcgattggtgttacgggcatattccttagcgccagttaaaacgagatattcatctcgtcggtaatccatctgactttgtttttcttctgcgtgagcagcttgccacacgctggaaaagacattaattagtttttccggtgtgagtgagttttcggtttcatcaacaagcgtttccaaaaggggggcgtatctttgagaaagaatcgttttcgcctcgttgagcgttgtagacttcaacacttgtttgagtaaggtctggtaggtaggattctgaactaactgctcctggagtgcagtgtcttcctcgggtatattgacagatccgacaatgtcggaaaagtaaaggttattcgcgttccgcatgagtgcgactggctgtcggtgacattgtttagggtgttcgttcttcttccatccgtaccgaccgtgacaattcacgccaatgcgcaaaagggtggcgccaaatgaatcatcaaacacaccttgcagattacgtttagccgtacacgaacactcgaccacaagatccccaatcgtgccagaaagaaggttatcttttagctttagccgatgagtgccgcggggaaaatcgtttttttctttagaatgtgcccactccatccatggaaagtcttgaatgtgcccatctctgcaagcgcagacaagtcggaccgggattaattcctcccgataacgcttgttagactttgatagttcaaaatgaaacggcttgacattaaatcgcttcagatcagcatcgtttcggaggtcagcacgccactgcgagagtgtccgaagttcgcggttctttggcccgaaataccactgtggaaatgaaactccagtgataaattctttggtaagatcagttgggggagcgataaatcccgctgcattgaggctagattgtaatcgaatgtcaacgatagggtcttcgttacttgtgggttgccagaactgcgagtcacaaatcataaccgattgattgttgatttgggtaagggcgccagtcccaaacggagtaatcagctgtgattggcgaatttggttttctggtgaacggcgctgaccgtcatttgaaattttaccatcgttaaacctagtcatctgtcagactctcctttatggaaatattcccagagttttctatatcgcgcatagagttcatcgcgaaataagcttcgtgatgagcttgtctcatatcaaaacttttaaggaggtaaacggtatctggtgtggcgtctttcttccccgcaaagtataagagatttttgtttgcagtgttgtcacttaacacggcaaattgcaaccagtgttcagagatggcatcaagcttttcacttgctttagctgtgtaaagattttctgaatcgtttcgctgtatgcgatcaagcaaaaatgtttttgcacgtgctagctctggtttgaacttaagaattgagctagcatttttctgggacaagagggcaggattcgtgtgtcgtagcataccaatcaaaacagctgctaaagccttatctaaggcaggttgggagaatggtgttacgctgcttggctctacttgtgcgtacatactctgatgataacttgtgaaagcctcatagtgagaacggtcgcgacttttagtcgagctgtatagtgcaaacaccaaacctaatgtatctcggccaacccgactggtcgcttggatatattcagaggtgagcttaggctgaccgacaacgatcatgctgttcaatcttgaaatgtcgatgcccactgagagcatattagtagcaatcatggtgtcgacagctcgttcatctgaggtatgcgcgtgcgtgagcttctcaattgtgctaacgatttcgctgctagaaacgtgtgaagtaagctcaagattaccgaacgtattaagctgccgcgaagaagcggagccttcaagtttggtgaggcgacgcagctcatcacgcacatcatccatcagtaaagtggaagctttccctaactctctgaggctattgaaataaccgacgactgtccagaaaagatcctgctcttcaggactcagatcaagctcaacaatcgaatgaagaagagccgcaaatagacgaatttctgtcgtcacttgggttttgcctgtgcccatcacgccaacatataggcgaccgtatagattgccaccagcagacggcttgcttgttttgacgaagaagttgtcgtcaacgtctagtccgtccggtggaaactgcataacatctcgatcaaaaagattgcgaacttgttcttgagaatttctgatagtcgctgttgaggcgaggtatttaggccgtgaagctcctgaagacaagatgtaatcgaagctactctcataaagcccgacgatactacctaacggaccagagataaggtgtaattcatcctggatgatgagctgtggtttatagactttgcccgttttgttgttggagcaagaaaacagggccgcggtcttttcgttgatcggcacttgtgcaaacttatcaacggttccaaataagagcgtcggttgatttttgtagatagaatcgtcaataacataaattggcaacttctcatggaaagggcaactgaaattttgacattggagatcaaaaccattgtcattgactagtggggcgtatccccaagcatctatgacaagtttttctgtatcatctgggataatgctgtgcttttgatgacaccaaggacattcaagtacctgaaacggatttgggctgtcatggtttttccgaagattaataaaatccatttttgcttctttacgatgattgggtgttgaccctccgccaacccataaaccaacactaatttcgttgatacccagatcgtcacgatgctgacgcaagaattcaagagcgcagatcattgaagaggcacgttgaaattgttgtgcggtcaacaaacgcaatgtatagcgcatgataactgtgacacctttagcatcagcgtcgccgagacgctgatagagaaccaccaacgcaatggcacacaagtatgcctcagttttgccaccgccagtgcttatccaaatcaaatctaaaacgtcacggaagtcgcttctttcatttatcagtgaatcaatcgttgtgagtataaaggccagttgaaaagggcgccaagcaaaactcgtgtttgggtcgtcttccagattttcataggtgcgagaccgaaaacattgcatcttccgttcgaggtttttacttctttgcagtaagatagcctcgttagctagatcgaaggcgagcagagcagctgggtccttacgcaggacctcaataccttggtgtatgcggttgctgcagattcgacagtctcgaaggttgctattagcaatctcggcgtaacatgggttctccattttgatctcaggtacctgtagctcacgtttagcaatccatgcgtcgtatttcgcagcaaacttggtcaaggattgtatttgtgtctctttaggaacctcaaaaaggtaactgtccgggcggagtatgtccttactaagcccctccaaatcaaaagacatgggtgagagttcataggttgggatatactctgtgaatatggattgaacttcgccagcttgcggtaaccagccaaccgaaataccgtgcccgatagcgaaggttttcttgttgcggtactcaaagcgaattttttgatcttctttactaagctggtctaggtgagtatccatgacatcctcggaagcatagaacttgagtgagcgcgttgcattcaggatgacttgggtttggaaaaaaatcgtcgactttgaagtattctggacgaccaacgtgacggagcaaacttcccctttgttgtcagaaaggggaagttctcgtaccttcgcaaaaatcgataatcccagtggtttgccggatttcataatttctgtagtgaatcttggctttgtcaaatctaaagtgaccttggtggaaatcggacgacgctgataaatttggggttttgccttcttagatttttccgagcggtaattgagattgtaaagccgataaagaaacgcagtggcgtctttcatttccggtttttctttaagctgatcaagtaagtttctaagctgtttttggagacttatcggcttttgagcatagctatcagcatatgcaatttgtttttggtcatcagaaattttcaaaattggttcggttgcttgagcatcagttacaatgtttaaaatcgactcaagaagatccgttggtaaatcaatccaaggattgacagttgtgtcataaaccgatgtgttaatcgtgaaatccaaggtggaagttttcaagcagtaaaacgataagccaatggaactcggcttgaaagtgttatcgacaacgataggctcgctttcggcatcaaagtcgacatcttggtcatctccggaaacgccatctgttgctttgcttgctactttcggataaaggataccagtaatgtaacgattgcggggaggctcggagatgatttcgacgcttgaatctgagacgaaatgttcagaccctggtcctaatattttggcagtgatcgaattcagatagcgactgcgaatggcttcttgctttgactttgaaattctatctgtcatattttacctccgtgtcaatcttctagtaatctgttcgttctgtatctaggtaagtactcggatactggtgtgatagtggcaattgtcataaagctaatgggtgtgtcagtcatgtcgagcttttggccttcaatgcgatcaagtgcttgttgtcgttgatcttgataccagtcacgaaccgtaacgctcgattgccgatacgtttctgcgttttcttcgatgtcgagattattggtgagctgtccgatgatgcggatgaactccagatcttgaggaacaaacttaacgctattcggctgagaccagtaccggaaatatccctgagtgtgatcgagaccgtatcgtaggaatttctgtacaaggtcgttgggtgtcaagtgattagagcgaacgtatttgatgaacacttgtttccattcgaagtctttttgatggtctggatgattttcgaataatttagctaagctttcagtgctatcgaagagctttgcaaagtcattttggtaccatcgctcattttctatgcgctggacataggcaacttcatccatgggtttgaaatcagcaattggcttgtgacgaagaatgccctcgttgtcacgcgtgaggatggttgcagaaggagtgacaaacattttcgcccttttattttccagaaaagccaaccggtacttggctatgacatggttgtcctgcgtggccgttggcgaagtttttgaaagttgttcttttgtttcatcattcaaaatggattcttctcgctctaaagaatcggagtcttcttcgggagtcaattcagagtcttctttttccgatttgcatgttaaagagtttctcaagttagaaatactgtttacaaaagcggaatcataatcgacatcgacgagttgatcagtctgaaggacttgttttagaaaaaaaaggtcattggaaagagaagtggccagctgacgtgcgaagtcctttggtgcgacaattgtgacttctcgggcgatgccagaatacatccagcgacggcgctctgagatctgtggaacgatcataatcaggcgttcggggacataacgcctgtcgattgattgaatgggctcgccatactcaatcacatgagcttttttctttcgaaggttataattcgttctcatctctccggctaatactgagtgagttaaaatgacggtctgattatcaataattaaaccggcaagaagattatctaactgaacagcatagtttccattaaccaaccgagtaagatgttgcaaaagatcttttgcagtatcttcagcgacaatattttgaagttgcagctcatctttcaccaattggaacgcttgagcaacactttgggaatttgaaatcaccgaagaaaacagtgtttgctgaaaacgtcgcaaacttctctcgagatcgaagagttgttgatctctaatacttgccaagaattcggtaatttcggtcgattctgcgtcgattgtggcatcagtctgaataaagtttgcagaaatagtcctcgtcttgaactcatctgctgtcagccaactgtacagagtatccgacgcattcatgaaagttgcaccagcggtcgacacggcggaactaagcatggagagaatgtgcgtctctatcgagtgtctggtgataaaatcacggacattggccaacatgtccttgttcgagtacttccaccaagtatcgcctatcatgtagagcgtgaaacgtttgctgattcgttcgtggagaagggtatttagggtctgaagttttgaaacgaaggtaaccatgggaaccatcgttttcgtcgtaccttttagatgctttgtctttccacctgcagggtaatattcgcttggcacaacagcaccgaagctaagggctcttccttcaattctaaagttcatcttttcaaggcgatcaatgactaccttgtcggtcaaaattacaatgttagattcatccgttcggctgaagtgagaaatgtgaaaaagagcagctacttttgctcttgtgtcggtagttttccttgaggaaaccgattttgcaaggctgactgaggataagaaaatctctcgtgggatcgtcaatagcagtccatcagaatctgaggccattttgcagacgtcatggccattaagtttttctacgccgataaaagtataacttgtttccgcatatactagaggggtcccggatttgattttctctgggtaaaggacttggcgatcggctatgtttgacaatagtgtgcgtagagcagccaatgctgctaacgcggcagggacttgttctgataggtagtaatataaatagccaccgcctgagtcctcggcggctgtgaagtcgcgcaaaactttactaagcatcggatctttgttgaacagttgctttggtaaaaagctgatcatcttttccgtatacttttcaagattcattaccttccccccaaaaaaagaaataaaactaaacgctcaagttaaagcgtttacttatgagtataaactttttttatctgaccgtaaattttaaaaggtgtgaaaaagaaaatgggaagaacggagaaagaaaatacttcaagcaaccttttttggcggcatcaaaattgggctaaatccttgttgcagtttagattcatcacaaaaatagtcgtaaagttaagacagcaacaattaggttgtgccgcttgagcattgagctagaatattacatcacgttaatgcccgaaaaaaacacgcccaagacggacgtgttcgacaattatttgacctactgaactgagtgcacgaaactgcacgcaatagatcgcaacaaacaccgatgtaacagtatttgttgacaaaagtattaaagtttctggttatagtattcaacaaccagtgattcgtcaacttctggttcgagttcgccacgttctggtaagcgaacaagggaaccttccttcttattgtcgtcaaaggttacgtaagctggacgggaaaccgtgttctcgatagcttcattgacaacagcgaggttttgtgagcgttcgcgaagaccgatcacttggccaggctgtacttcataggaaggaatatcaaggcgcttgccatcaactgtgatgtggccgtggttgacaagttggcgcgcttgaggacggctggaagccaagcccaaacggaaaaccaagttatctaaacgggtttcaagcaggatcatgaagttatcaccatgggtaccttctttgatcttaccagcgcgcaggaacaagttctggaattggcgttcgtttaaaccgtacatccaacgcagcttctgcttttcacgcagttgctgaccgtattcggaaatcttacggcggttgttggcaccgtgatcaccgggtgcataaggacgacgagctaattctttaccagtgccggaaagggacaagccgagacgacggctttgcttccagcgaggacctgtataacgagacatatgagtattcctccaagtttttatttggagtaaaataacgaattgcggctttagcacacgggcagtcctgcaaaggttcaccttcgcagccgcggttactactgtcatcggcgtgatgccgaggcaggactggagccgaccatgccggccgctgctgcattattttacacgcgagctagtataccgtgtttagcgcggcggtgtcaaggtgactggcgagtgtttgaccgaactgtgtcaggatctgttcatcattttcgctaaaacggttgagtttcggggagtcaatgtccatgatggcaacggtttcgccattaacgttgatcggtacgacgatttcggcgttgctggctgaatcgcaagcgatgtgaccggcaaattcatggacgttagcaacgcgaatcacgctattttgctgatagctggtcccaacgacccctttgcccggttgaatgtgcatgcaggcaactttgccttggaaagggccgaggtcgagttgtccggttttgccattataaaggtagaaaccagcccagttgagctcggagatgctgtcatttagcagtgcactggcattggcaagtacggtgatggggttggtttcgcctgtaagtaggccatcaagttgatcgataataataggatcaagggttgtcatttgatcagtccttttaggaatttatgaaaagcagcatctaggccttttaactgcgggctttttttgcgatactggtagctaggatgttatcgtttttaacacttaacggcattttagccggtaagtaggcaaaatgcaattagaaagataatcggtaaagcagagggtgtagggatgatctggttcttcattattgttgcgattataattgtggctgctggcagtgtctggtggctgcagcattattttcaaacgcgtatcaaagacttagacgaaaaagtcgaagcgattgatattggtgcgctctcgagtcagattcgcagcattgagcaactgaagctgaccggtgacagtctggcaacctttggcaagtgggagcgggcgtttgatcaattaaacgaccatgatctagctgagctgcaaaaaattctgcttgatctcgaagaccaggttaaacgcttccgtttagatcgggcatcgaaaattgctaaggtgctggaagataaaatcgagacggctcagcgccaatacgaactgattagccaggcactacaagacattcggcacgacgaagcagataaccgtagtaaaatgttgcaattgcgagatgattaccaggtttcacgcaagacgattcttgccaagagttttgtcttcggtgatgctcagccagcattggagcaacagttgcagcaattggcgcagctttttcaaaaaattgaccagatcaataatgatggcgatcatcaggcggcaaaggcagaaattaaacagttagccgagcagatgcgggttttgaagaagcaggttaaggaattaccaccactggtaaacgagcaggtcaacgagtttcctggacaaattaacgaaattcagcacggttaccggcaactcaccaccgcccattatgtgttcaccgatgatattccggggatggttgcggatgtcgaggccaagatgaaggatgccaatgcggctcttaaatcgattgatgtggaggcaacagaggcagccaatgcggaaatcgaagctgaaatcgataaaatgtacgccattatggaaaaagagatgcaggccaagaaacgggtggatgttgcgtcccctgatttgcggcgcttcatcgatcatgcactgcgccaaaatcgggaattgcaggcagaattggatcatctgaaccaaagctatacgctgaatcatcatgaaatcaaaaccgctaaaaatttaaaaatgcagttagatgcgattgacgcaaattacacgaaggataccgatgcgattgaagcaggcgaggccgtgtactcggacgtgattgcgcggtttgatgaaaccaaagaacagttaacggcgattgaaaagcaacaggtccagattaaccaagacgtggcaggtttgaaaaaaggcgagatcatcgctaataaacaagcagagagttttgaactcgatatgcggaatattaagcatgaaatcgtccgccatcacttgccggggttgccgcaagactatgtggataaggttaaacatgttactgccgaaattgatcagcttaatcacgatttggatcaggttaaaattaacatggatgcgattgccaagtttctgattaagattgccagtgatattgatgatttaaagaaaacaaccagtgccttaattgatgcggccggattaaccgaagaattgatgcaatatgccaaccgttacaaaataacggttaagccggtagcagacgcggttaagcatgcgaccgaactgtatatgcaatttgactatcagcaggctgccgatacgttggcgaccgcgttggagcagacggagcagggcagctacaagaaagttgaagatgcttatcttgcgcggaagaaagcttcattatattgatttgcgtgattggaaagccagcctgggttggggctggcttttggtttggggtagaggttgtgatatggtgcagggatctgcagggaaaattgcagacttaaatggttaataatcattcagtagggtatatacgtctccgaaacgcgttcaccggcgcagaagtctgcgtgtaaggacctcgagcgcaatggccaagaccgggccatcacgctcaaggccacttacactccgacttctacccgcgccggttcactctcttgcttaaacgcgttcgccagcccagaaacctgcacataaggaccttgagcgcaatgaccaaagcccggtcatcacgctcaaggccacttatgcttcggtttctaaccgggctggctcacgctcttgaaacttactaactttttgtctataattcaatccagtcgaattaacggaaggggccggctgatgatttattttgataatagtgcaacgacgaagatttcgcctgatgcgttggcgacttataacaaggtcagcacggatttttttgggaatcctagcagtttgcatgctctgggaactaaagcaaatgaggttttgcaaagttcgcgagcccagattgctaaattaatcggtgcgaagccggacgagatttattttacgagcggtggaacggaaggcgataactgggtgattaaaggcactgccatggctaagcgcgaatttggccgtcatctgattacgaccagtatcgagcatccggctgtgatcaatacgatgaaacagctagagaaactgggatttgaagtgacttatttgccggttgatcggcgcggttttattcatattgacgatttgaaagcggctattcgcaaagatacgattttggtgtcgattatggcggttaataatgaaattggcagtatgcagccgattgttcaggccgcgcgggtgttggataattatccgaatattcattttcatgtcgatgccgtacaagccgttggtaagggcttggatgcagcgttgcaagacccgcggattgattttctcagtttttccggtcataagtttcatgctccccgcggtaccggctttatctatgccaaagagggtcgcatgcttgatccgttgctaaccggtggcggtcaggaacatgattggcgctcaggcacggaaaatgttccggcgattgcggcaatggccaagtcgctgcgcttacttttggctaatgaagatgctaacgtggctcggcagcaagcagttcgcaagcggatttttgatcatgtcagccaaaagcccaaggtgacgatgtttagtcagttaacaccggattttgccccacatgttttatgttttgccattgctggtgtccgcggcgaaacgattgttcatgcgtttgaggatcatcagatttacatttccacaactagtgcctgctcaagtaagaaaggcacggaaagcagtaccttggccgccatgcatacggacccgaaaattgccacttccgcgattcgggtgagtttggatgaagctaatactttggatgaagcggatgcgtttaatgcagcgtttgatacgatttatgcaaagtttgccaagcttgataaagcgaccgtctaaacgagcatcagccatttccagtgcgaggagtggccgggtgtcagtcatagcgactaatactgccaacttgttttgacgcatcaccggttttcattggatcggttaccgcctacatgaaaggattttaagatgcaatattcagaaattatggttcgttacggcgagctttcgaccaagggaaaaaatcggcaagcgtttatcggtcgtttgaacggtaacgttacacgagcgctgcatgaattccccaacctcaccattcggcctaaacgtgatcggatgcacattgaattgaatggcgagcctagtgatcaggtgatggcacgactgtcacaggtattcggcatccagaatttttcaccaagtattgccgtagaaaaggatatggcaaaagtccacgaggttgcgttgcagctgatgaatgaaacggcaccgcacggcattagctataaggttaatacgcggcggagcgatcatgactttgccttggataccaatgctatgaatcttgatttaggcgatttcttgacggataagcggccggacttagttgtcaaaatgcatcatcctgatatgattttgcgagttgaagtccgtcgtgaagcaatttatttatccactaaaacaattcaaggtgctggcggattgccggttggaacagcagggcgcgcggccttgatgcttagtggcgggattgattcgccggttgcgggttactatgcgttaaaacgtggcgtggacattgaaatggtgcactttttcagcccaccttacaccagtcaacaggcgctgaataaggctaaacagctcacggccaagctgaccccttatgttggccggatttactttattgaagtaccatttaccgagattcaggaggcagtcaaagcaacggttccggaaggttatctgatgaccgtgcaacgccgaatgatgttgcgactaaccgaagcgattgccaaacaacgtggcgatctggctatctttaatggtgagtcagtcggccaggtggcttcgcagacgctggaatcaatggctgcaatcaatgatgtcaccacgatgccgattattcgtccggttgcgaccatggataagaatgagatcattgccgaagcagaaaagatcgacacgtatgatttatcgatcatgccgtttgaagactgttgtactatttttgccccgccgtcgcctaaaaccaaaccaaagacggatcgcgcacggtattacgaaagcaaacttgatgtcgatggtttgatggcgcgcgcgttggccggaatcaaggttcaggagatcaagtcatctgatcagttcctgaatcaggatcaggatgttatcgcagaattgctttaaaaattgaataaaagcggtagttgctgataagttatttgcttatcggtaactaccgcttttttagtttagcgttaaaagtcggcgaatgatcttaaaaaagaaataattcacaagatttcgcgatattaataagctgctggagcgaatgccatcatggttgcccgaaaaatggttgtcacctgcagaagacgcattgtgcttaattcctggtttgaaaagatcgttaatataaaatgggtcagtaaaaacagtggtaaaagagcgcgcaatttgttaaacttaatatgtgaaaatggtaacaaacatgtgcggaggtgttgatggtggtcgtcagtaaacaagcgttatcacaagcaacgattaagcgaatcccggtttattatcgaaccgtcaaagatttgcaacagacgggggttaagcgggttcggtctgatcggctaagtaagctggttcatatcgcgccagcaaccattcggcgggacttctccaattttggcgatttagggcgcagcggctatggctattcggttgatttacttgcacaggtgtttggcgagttattagaagtgcactcggaagaacagatgttactggtggggtgtggcaacctcggacgggcgttgttgaccaataattttcgccggaatccggatctgaccattgtggtgggattcgacacggatccgcagctcattgggacgacaattgccggggtgccgatttttgatctcacaactttagccaaaaatattcgcccggggatgcatactgccattgtctgtgtgccgagttccgcccagaccagcgttattaaccaacttgaggctaatggcataaccgctattttaacctttgcccctaagccggtcccggcaaaaccgacaaccacgattcgctatattgatcttacgagtgagctacaggcgttattgtttgttgatcatcaaaaacaggtttcgcgacaggtgacggaaccgttgcgctagcgttacttgacgcgctggatcacgctcgttataaggcgttcagctgcccagaaatttgcatataaagatcttgggcacaaatccgcttttacgcccataacgcgctccccggcgcagggacctgcatgtaaggaccttggtcgcaatggccagacccgggccatcacgaccaaggccacaagtccgcctttacgcccataacgcgttcaccggcgcagaagtctgcgtgtaaggaccttggtcgcaatggccaagcccgggccatcaagaccaaggccacttacactccgacttctaaccgcgccggttcacgctcacctcacattgaccctgtcatgatcacgggttataatgcagctaatgcaatgatcaagagggttgcgttctttttttccagcgacgggatggttggtgtgaatctcgaaagaagaccgtgattgtagcttgtgagctgccgtcctgaagtgagtagggaacggccggtgacagccgttatcctgaaccaagtggggattgattcccaatttaggtggtaccgcgagtagactcgtcctaataatcgatattagggcgtttttttgtgtatacgcacggcgcgacccagcttccgggttggcgtgcgtgtgatgcatcggcgcgtgccaattctagaaaccggatggacgaaaaaattttgtgaggtggagccagtgagtgatgaaacgttagcaccaaagtatgatcataaagcagtcgaggaaggccggtatcaggaatggcttgatgaagatgtcttcaaaccaagtggtgataagaaggctaagccgtattcaatcgtgattccgccgccaaatgtcaccggtaagttacacatggggcatgcatgggataccacgcttcaagacatcgtgatccgccaaaagcgtatgcaggggtttgataccttgtggctgccagggatggatcatgccggaatcgccacgcaggctaaagttgaggcaaagttgcgcaaagaaggcatcagccgctatgacttaggccgtgaaaagtttgtccagaaagtctgggaatggaaggacgaatttgccaagacgattcatggacaatgggccaaaatgggcttgtcactggattatagtcgggaacgttttactttggataagggcctgaatcaagcggttcgacgggtgtttgttgacctttataaccagggtttgatttaccgtggcgaatatatcgttaactgggatccgcaagcgcgcacggcactatcggatattgaagtcattcataaagacgataaaggtgctttttaccatgtaaaatatccattcgcggacggtagcggctacattgagattgcaacgacgcgtccggaaaccatgatgggtgatactgcggtggccgttcacccaggcgatgaacggtataaagatatggtgggcaaggaacttattttgccattagccaatcgcaaaattccaatcattgaagatgcttacgttgaccctgagtttggaactggggcggttaaaatcacgccagcccatgaccctaacgactttcaggtgggcaatcgtcatgatttgaaacgaattaacactatgaatgacgatggcacgatgaacgaaaatgccggcaaatatcaaggaatggatcgctttgaagcccgtaaagccatggtggctgatttggataaggccggtttattgcttaaagttgaaccgattgtgcacagtgtcggccatagcgaacgtaccggcgttcaagttgaagcacggttgtcaacacaatggtttgtcaagatgaaaccattagctgaagcggcaatcaaagcgcagcaagaaccggacaagaaagtgacatttgttcctgagcggtttgaacatacctatttgcagtggatggaaaatattcatgactgggttatttcacggcagctgtggtggggtcatcagattccggcttggtacaacaagcagaccggcgaaacctatgtcgggatggaagcacctaaagacattgaaaactggaagcaggatcctgacgtgttggatacctggttttcaagtgcgttgtggccattttccacgatggggtggccgaataccgatgcgccggattacaagcgttattacccaacagataccttagtgaccggctatgatatcattccattctgggttgcgcggatgattttccaagggttgcattttacccatcaacggccgttccagtacaccttgattcacgggttaatgcgtgatgaacaaggccggaagatgagtaagtcactgggtaatgggattgacccgatggatgtgattgaaaaatacggcgccgatgccttgcggtggttcctgattaccggtaataaaccgggacaggatacacggtttagctataaacaggttgaagcagcttggaatttcatcaataagatttggaacatttcccgatttgtgatgatgaacctaggcgacttggatacgccgcaacagccagatccaagtacctttgatttgtccgacaaatggctttttgcgcaattgaacgaaaccatcaagcaggtaacggatttgtcggcgcggtttgaatttggtgaaatgggtcgaaccctgtataacttcacctggaatgttttcgcggactggtacgttgaaatgagtaaggaagtgctttacggcgatgatgagcaggccaaagcagccaagcgcgtcaaccttgcttatgcactggatcagattttacggctattgcacccagtgatgccgtttgtgacggaaaaactatggttggcgttaccgcatacgggcaaatcaattgtgacggcgagctatccagtggcaaacactgcctttgaaaatgctgacgctaccagtgcaatggatgcgatcattgcgctcatccgcggcgttcgcggaatccgtaaagaggccggcgctccgcttaagaccaaagtcgatattctcgttaaattgacggatcctgctttgaaaccaatctttgaacagaactttgactttatcgatcggttcgtcaatagtaaagccttcacggttggaaccgatgtggccgagcctaaaatggcgggcagtgcggtgatcacaggcgccaccattttcgtaccgctcaatgaattaattgatttggacgaggaaaaggccaaactgactaaagacgctaagaagcttgagcaagaaattgcccgaattgacaagaagctcaataaccaaggcttcttatccaaagcaccggaagcggttgttgcagaacaacgcactaagcgcagtgattttgaagatcagctaacgagcactaagcaacggttggaacaattacaacgagcttaagttaccaagtggctttaagcgattttatggtgaaaaaaccggtattagggttgagttttaagccctagtaccggcttttttgatggtcgtggttaaagcatgccgcaagcaagcaatctggcgcgcggccgtttgtccgatgggttctggcagcaatgaaaacgtaaatttggctggctaagctcataagttagacccatttttctggtatgatgaagctatatattgcagcagtatgaaagctggctgcctaaatgataaaaataaggaaagttaacaatgaattacacagaaagcgttgcctacattcattcttttccgcgtttggccaagaccggtgaccatcggcggattttaacgttattacatgcactcggcaatccgcagcaacaagggcggtatattcacgtgactggtactaatggaaaaggctcagccgctaatgcgattgcacatgtccttgaggcaagcggtttgacagtcgggttatatacctcgccgtttatcatgcggtttaatgaacggatcatgattgaccatgaaccgattccggatgctgcgttagtcaatgcggttgcgtttgtcagggctgcactggagcggcttcagcagcaacaagctgattttaacgtgacggaatttgaattcattaccgcgctggcgtattggtattttcgtcagcgtcaggttgatgttgcggtgattgaagtcggtattggcggcgacacggattcgaccaatgtcatcacgccggttgtcagtgttttgaccgaggttgctttagatcaccagaagttgctggggcatacgattacggcgattgccaagcataaggccggtattatcaaacggggtattccggttgtaaccggtaacttggtgccggatgctgctgccgttgtcgcagccaaggtcgcgacaacagggagtcaatggttgcgttttgaccgcgatttttcggttcctaaggctaagcttcacggttggggccaacggtttacttatgaagaccaagatggacgtattagtgatttggaggtgccgttggttggcgattaccagcaacgtaatatggcaattgcgattcaaacggcaaaagtgtatgccaagcagacagaatggcctttgacgccccagaatattcgccaagggcttgctgccagtcattggccagcccgactcgaaaagataagtgatacgcctttgatcgtcattgacggggcgcacaatccggatggcatcaatggtttgattacggcgctaaagcaacttttttcccaacccattactgttattgccggcatcttggcggataaagactatgcggcgatggcggataggctgaccgcggcattttccacggtttatctggttccggtgccggggacgccgcgcgccttgcctgaggctggttatgaggcgctgcacgaaggtcggttaaaggattcgtggcaggaagcattggcggcgagtcttaatgatgtgccggatcagccgattgtgatcaccggttcgctgtatttagcctcagctgttcgtcaaactttattagggggaaaatcatgaccgcaacagtcatctttgatcttgacgggacactggttaacactgaagcactttaccttaaaagtaatgttaaagccgcggcagtattgggactgcaccggacagaagctgattttcggccattagttggatctgccggaccaagtgaagctaaaatcattgccgatttggttggggccgatcatgccgcatggttccagcaattttcaacccaggatgttttggaccagattcgcagcggtgccgattttgtcttacccggagctgacaaaacgttgcagacgcttgatcagatgggttatcggttagcgttggcaacaagtagtgccaaacattacgttgacgtggtgttggctgcaactggttgggtgaagcggtttgacccgattctgactggcagtgatgtgacggcacacaaacctgatccggaaatttatcacgtgatgaaaaccaagttgcctgagacaccggcgattgtcgttgaagatacgcatgtgggtgtggccgcagcagaaggggctggactcccggtcgttatgattccaggcatcggtcaagggccggatcataaggcgaccgcgattttagctgcgatcacggatttacctgactggctgcaaaatcaccctacctttgcgtaatgtccataatgagtcttcagatgactcaaaatggcggccccatcagagaaggctgaagaggatgcagtcccactctgaaagcggcatgacggagggaaagacgatggcagatgcgactgaacaaccacgtgagcgtttattggcgcatggaccacaggcactgacggatgcggaattattgcaattgattgtgcgcgcaggcaaccagcactatccggtccaggaaattgtcagtgaggtgttgaccacttatcctgcattacgaggcttagcagaaggtgatggtgattcactggaccatattcgcggactgggcgcggctaaacgggccagcattttggcgggtgtggagttaggacggcgggtcatgcgtcgtcaatcggttcgatatgggcagatcaaaaatagcgagcaactgggtaaaacgatggtgtcacgctttgccggagctaatcaggaatccatgttgattttatttttggatgtcaagaatcagatcatcacggaacaaatcgtggcaattggaacggtggattcagccttagccgatccgcgggtggtgtttcgggaagcattaaagctaagcgccacgaatttgatcatggtgcacaatcatcccagtggtgatccttctccgagtcaggccgatcgtgatacaacaacgcgatttcagctggcggcagcgttactcggcatgcacttgcttgaccacttgatcatcgggcggcagtcgtattattcgtttgcgcgcgatgatccggaatttaattaatttgctaaaaagttgtaaggttttctgaaattggcgcaatgagggcaaaaacaggcggtttcacattttgtcatagaaaataatatgctataatgcatggagttaatacgaaatgagtcagcataaggagagaacgtcttgtttggatttggatcaaagaatatcgggatcgatcttggcaccgcaaataccttagtttacgtcgacggcaagggcattgtgttaaatgagccctccgtagtcgcgaagaatacccagacggaagaagtcattgccgttggtgaagaagcccgcgacatgatcggtcgtaccccgaccaatatcgtggcgatccgaccaatgaaagatggggtcatcgctgactacgacacaactgcggccatgttaaaatacttcatgcaaaaggcattaggtaacggcagccacccgcaagtgatgatttgtgtgccaagcggcgtgacggaagttgaaaaacgggccgttattgacgctgcaaaagtcgcaggagcacgcgatgctttcgtcattgaagaaccttacgctgctgcaatcggtgccggtctgccggttatggacccgaccggtagtatggttgttgatattggcggcgggaccactgatgtcgcaacgatttcattaggcggtattgtttcgagtcgctcgattcgggtggctggtgacaagtttgatgaagccatcatcaatcatttacgccagaactttaatttgctcatcggcgaacgtacggctgaagccatgaagattcaaattggttcggcatcggttgaaaaggctgccgatatcgatgggatgaccgtgcgcggacgtgatttattgagcggcctgccaaagaccatcgacatttcggccacggatattgcatctgctattcacgaaaacgtgcttgatatcatcacggcgattaaagaaacactggaagaaacctcaccagaaatcgctgccgatgtcattgatcatgggattgtgttgacaggcggcggtgcgcttttgaagcatttaccggatgtcatttccgatgagaccaaagtaccggtcttcattgcgcaggatccgctagattgtgtggcaatcggcactggtgaatcgttgaagaatattgacgttttaaagaagcgttaacagcccataaatgaagatggtttgcgtgtggcaagaggctgggatgaaggatcctggcctcttttcgcgagtgtgacggaggaaccaatgcagaaattcttttccaacaaaaaattgatcgccctcatgatcgcattgctggtcagtcttggtctggtcgctggatcaatctatgcgagcaataatcgcaatacgccgccgtttattcagcggattgccaatgatgttgttggcatcggtgggcggttagtcgcgttgccgggagattttgcccgcaatggattagatgacatcaataatctcatggatacgtttcaggagaatcagcgcctcaagcaacagctggataatttagcgcagacaaaggtgcaggtacaaactttaaaacgcgaaaataagcagttgaagcaacagttgaaacttaacggtactttgacggattacgcgcagatcagtgctgctgtcattttacgaacaccgagtgactggcgcaacatggtcgttattaaccaaggaagtgccgccggggttaagaagggcatgccggttatggcaggttccggcttgattggccgtgtcgttgaggtcaatcggacgagttcaaaagttgagatgctatcaacggccaataaatccagtgaccggattgcggcggccgttgagaccaaaggcgaaaaagaagttaacggcatcattaccggatatgacgaaaaaaccggtgatttgattctcggcgagctgaatacggataccgcgattaaaaaaggcgatgaggtggttaccagtggcttaggtggcatgacacctaaaggattactgattggcaaagtcgccagcgtcaagaaagatgactatggtctggccaacaccgtttatttggatcccgccgcaaatctaaacgatgtcaccgttgtaaccgtcatctcacgtacgatcaaaggtgactaacatgttaaacgaaaaacatttcacaggacattggtggatctttttactgctgcttttgttattattaattgatggcagcctagcatcagtgctggcacagtggatcatgcagccgaactttatggggacgccgcaattgaccttgttagggttagtcatggtgacgttgttggtgccgcaagaaaagtatataacctggattgcggcattgattgggttgctattcgacagtttttacacgggcattctagggattaatgcgttactgtttgccttggtcatttacgtggttcgccagattcggccgtatatcccgcacacgccgatttttgttggtatggtttatattattgctttgttgctctatggggttgccagttatgctgcgaatcattttattggctacggatctgccagtgttgttatgctgatagcgaatcatttagggccgggattaacggtcaatctcattctttttgtgattgtctatggtccattacatcgattgttgatgaatttagcggaagaataatttggggtgataatgtggacagtgtggtcttaaaaggtcgaaatgatagtctggcgctgcaccttcaagatacagcggactttacgcagattatccagacactgaaaacattactaggcaaattgtacgaagaaacgccaaccggtgatgtcagctatcgtttggagacgggcaatcggcttttaacggaagagcagttggcgcaaattcaggctgtatttgaagattacccgcgcttttcaattaatggcatcacgagtgctgtggttgataaagcggtcgttgccgatatggtgacggctaaaatgacccatcgcatcggtggtgttgttcgatcagggcaaacaattgatgtcatgggcgatgtgctgtttttaggcgatttacatgccggtgcctcgctgtgtgcttctggcaatgtctttgtgatgggcaaagttagtggcgttatccaggcaggcagtcaaggagacacccgcgcagttgttgtgggtgacttgcaaggtgctagtcaggttcgaatcgccgatgtcatcgaaattgtcgctgaccattatgatccggttaaaccggttgcttatttgagcgaattacatacgatggcacataccaagttggctgaactagcaaatcttcggccgcgattatttaagcaaatggaggcaatgtagatggggacagcgttagtagtgacttccggtaaaggcggcgttggcaaaaccaccacttcggcaaatatcggtaccgcgttggctttacaaggcaagcgggtcgtcttgttggaccttgatattggactacgcaacttagatgttgtcatgggtttgtccaatcggattatttacgacattgtcgacgttgccactggccgcgcaaagctacaccaagcgttgatcaaggacaaacgatttgacgatttgctttatttactgccagcagcgcaaaatgcggaaaaagacgcgttagaacctgatcaggtcgttgagattgttgaacagttacgaccggattttgattttattattttggactcgcctgccggaatcgaacaaggttttcggaatgcgactggggcggctgacggtgcgattgtggtcacgaccccggagatatcggcggtgagtgatgcggatcgagtcgtgggcttactggaacaacgtgatatgccgctcaaaccgcgactcattatcaaccgcattcgccaaaatatgttagctgatggacgctcgatggatattgacgaaattaccagtcatctgggacttgatttactcggcatcattgttgacgatgatggagtgattgagagttcaaacaaaggtgaagcgattgtgatggatccggatgaccttgctagtaaaggctaccgcaatattgcccgccggttactaggtgatagcgtgccgttgatggacattcgtttgaaaaaacaaggcttttggtcaaaattgttccatcgccatcattagacggtttacggtgattttgtgccggctgttaaagattaattttctgaaacagttgactttcgttaaagttcggtgtaatttagtgataattaattaaagcgttgagtggaatcgataagcggtcatggttcacagcgagttcgggttgatgggaaccgaatagccatccgtttatcacacatccatgagtggacgattgaacaacagtaggtcgtctcggttgggctcgttatcgccgtggttgaagcaactacatgaggttgattgtgtgagcaattgacaaatctgaggtggaaccgcggtttaagccgtcctcttacagcaaagtgctgtaagaggattttttaatggtcgcgattttttcgaaatcatgtgcggtgctgcaaccacatgaggccgggtgtgtgaacaatcggtaaactgaggtggtaccgcgcagaagcgtcctcttgcatcaagcaagaggacgcttttttcataccacgaacaagttgcccaaccgctcaactcatcgacagccacaaagcgcaattagaaaagaaacggatctgcgcgactcaaatataggcaggttcaaaggaggaagcaccatgacttatatttttcagattttaccggcattattatctggtgtgaaaatgacgttggggatttttgccatcactttagtcggagccattccactgggtctcattttatcagtcggcctaattcccaagcctaaatcgctacttggtaaggcaggaaaaagcttgctggaaggctatgtgtgggtatttcggggcacgccgctgttgttgcagctgatgtttatcttttacggcttgccgattatcggtatcgtgtttgaccgcttctcagctgctttagtcgcgtttattttgaattatgctgcttacttcgcagaaatcttccgtggtggctttggcgcaattgatgaaggtcagttcgaagcaagtacggtcctcaacatgacccgctggcaggcattgcggtttgtggtgattcctcaggttgtcaagattgtgctaccttccatcggtaatgaagtcatcaacttggttaaggattctagcctggtttacgtcattggcttaggcgatttgcttcgagcaggtaacattgccagtgcgcgggatgttaccttgctgccactggtattggtcggggtcatctacttactgctgacgctgattctgacgttcttacaaaaacggatcgaagcagcattttcatattatcgctaggagggttaaaaatgttagaactcaagaatatcagcaaagcgtttaacgggcgaccggttttaaaagatgttaacgtcacgattgaggatggcaaaacattggcgattgtgggtcccagtggcgccggtaaaaccaccttattgcggatcatcagcggtttagaaagtgctgatggcggcaccatgatctggaacggtcagccgacgaccgcgcaggctttacgcaaacaaggggtgatcggcgtggtgtttcagaactttgaattattcccgaatttgtcggttatgcgcaatattaccttggcgcctactttgcagggggttgatcaacaaaaagccgatgcgacagccaagaaacttctgaatcaacttgaactaaccgatcaggcgcaggcgtatccttattcactgtctggcgggcaaaagcagcgggtggcaattgcacgggcgttggcattaaatccgcaaattcttttgtacgatgaaccgactagtgcgcttgatccgatgttgcgcgataatgttgctgcaatggtcaaccaatttaaagtatcaggtatgactcaggtggttgtgacccatgacatggactttgcccaaagtgttgcagacacgacttatcacgttggcaaaggcggtgatggtcaatgaaacggcgaatgataatggccgtcatggtgtttttgaccatggccggtatcgtaatcagtggatgcgcgcgcgaaacagtcgacaattcctggccacgcattgaacggaccaaaaaagttgtgattgggctagatgatacctttgttcccatgggttttcgtcaaaaaaatgggcagttggccggctatgacattgatttagccaaagcggttttcaaacgatatggcattaaagcggatttccagaccatcgactggtcgatgaaggaaaccgaattgaaaaatcagaccattgatttaatttggaatggctattccgtgaccccggagcggaaagcaaaggttgctttttcgaatgattatctgattaaccatcaaattctggtgaccaaaaccaaaagtcagattaacacgttgaaggatatgaaggggaaaaccttgggcgtgcaaaccggatcaagcggggcatttgatttagatgcccaacccaaattgttaaaaaatatgatcgccaacaaaacgccgatcctttacgataccttcaatgatgcatttattgacttggatgctggacgaattcaaggcattttaatggatgaggtttacgcacgttactacattgcccacaagccggatcctgcaagttatcacattatcggcgactcattcccgccagaagagttcgcggttggtatgcgcaagtccgatcatgttttacgagagaaaattaacgcgggattgaaggcgttgaaggcggacggaacgattgctaaactgcagaagaaatggtttggcaaggtcgaacaatgagttgtttgttagcgctgataagggttcagagtttagacatcgtggcaattttatgttgaggctggaatcattgtggttgtgtggatactgtctattgcgacaggtaactgcatgaaaactttgattctggcttttttgttggttgttcaacacgcctcccttaacgcgttcaccggcgcagggacctgcacatcaagaccttgggcgcaatgaccaaagcctggccatcacgcctgaggccgcttgggttctggtttatgtccataacgcgttcgccagcccagaaacctgcacataaggaccttgggcgcaatgaccaaaacccggtcatcacgcctgaggccacttatgttccggcttatgcccataacgcgctcaccggcgcaaaagtctgcgcgtaaggatctcagtcgcaatggccaaagcccggccatcacgcctgaggccacttatgttccggtttatgcccataacgcgctcaccggcgcagaagtctgcgtgtaaggacctcaggcgcaatgaccaaagcccggtcatcacgcctgaggccactagtccgcttttacgcccataacgcgcttgccagcccagaaacctgcacataaggaccctgggcgcaatgaccaaagcccagtcatcacgcccaaggccgcttatgttccggtttctaaccgggctggctcacgctcactggactttttcccctgattatcggtaaagtagagtatgataatcgcatgtagagactggacgaatggctgaggtgtgagattgtctggttagggaggcgaaatttatgtggcttgggctgattgttggcggtctttatatcatcaatgcatttattgcgattgtgacggtgtttcggtcccatcgtgatatttctgctgtatgggcgtggctgcttgtgctgttgctgctgccgtttgttggtttcttaatttattttgtctttgggcgtaaactgcgggcggatcgcatgcaggatttaatgacgcaacggctattgggtattaatgatttggtggttcagcaacaagaagcgcttgcggcagggcagccgttgattgggacgccaggtagcggtggggtttcggagctggtgcgaacgttattgcgggcggacgatgcgttggtcacaactcacaatgaagttcaggtgctttctttgcgggaagccttttttaaacagttatttgaagatattggcttggctaccgaacatattcatattgaagcctatacgattcagcctgatgcagtgggccggcaattgcgtgatttactgattgaaaaggcgcaagcagggatcaccgtgcgcgttttatacgatacgtttggttcccacggtttaccgattagcttttggaaaggcttgacagcagccggtggtcaggtggagcgatttgtggcgaccaaactcggacggtggaatccgcgcatcaactttcgcaatcatcgtaaactgattgtgattgatgggcatttggcatacttgggtgggtttaatctgggcaaagaacatcgcggtttgccaacactgcgggatactcaactacgaattcaaggtaaggcggttgccgtgattcaagcgcgtttcctgatggattggaatggtactagcaagaggcaacaggtcaaagacgtcgatgtgctgtttcgtgaaccggttgtcaccggaaacacaaccatgcagattgtcgctggtggaccggggcagcaggttgaagcaattaaacttggctatttaggattgattaatcaagccaagcgtagtatctggatcgagtcgccttattttgttcccgatgacagtttgttggacgcattgaccattgcggctaatgcgggagtcgatgttcgcattatggtgccgaagaaaacaaatcagagtctgatggccaaagcatcgcagttttacctcaatcaagtagttgccaatggtggtcaggcctttttatatgaagaaggtttcttacacgctaaaacgattgtggttgacggcaagtatgtttcaaccggcaccgcaaatttcgatatccgttcatttaaattgaactttgaagttgctgcgtttctttatgatcatcatttaggcaaaacatttcaaaaactatttcttgcggatatggaacgtgccatgccgtatacgcaaaaggtcattaaggccaagaaacgaccagcacgcttggccgaagagttatcgcggttgctggcgccgattttgtgatgggcgaaccattcactgattttttggcaattaaaaaagccgctgaaaaatcagcggctttgtggtcatttggtgatcggattagatgatttgcaaacttgcgagcgcggtgagaacaacaccaagcacggtgataataatcatcacccaagcactaataattgtcattttctggaatttgctctttttctttttctgcaccgaaaacaccacctttaaagttctgctgggtctcattgtactggtttttggaaaaaacggcaactaaaactgagcgcgagccggcgcggttagaaaccggagtgtaagcggcctcggacgtgatggcccgcttttggccattgcgttcgaggtccttacacgcaggtttctgcgccggggagcgcgttatgggcgtaaaggggaactattggccttgggtgtgatgaccgggttttggtcattgcacccaaggtccttatgtgcaggtttctgggctggcgaacgcgttatgggcataaagggggactagtggccttgggtgtgatgaccgggctttggtcattgcacccaatacaatgtccgtacacgcgaattcctgcgctgaagagcgttaacttctgcttgacgcctttctttcctttgggtacggttaattgagaagtatcaacagacagcaccttacgtggttgctgccgctggagggaattgtcatggtgttgcttgcgttgggattaccaattttagtgtggctcttggttgttgccgctgtcgtctatttcgactttcatggtggttcgtggttttttttactgacaatggtgaacctctgggccattttcgagttaacctttaccaaaagtccgaatttcatctgggtgatcctgtttacggcgatggtgattgccttaatcctggttgtttggcaggtaatccgcgaatatgacctgattattcaccgatattggcggatgctgacgcgcattctctccctagcaaccacttgttggtggcttagcggtatttttatttattttatgggctgagtcaccaccgacttaccacttgtgaaaaaatcccgtgatccttgtgatcgcgggattttttgtggcttaaatgttttttaaacaataaaataactaaattttgcttcagaagtggttagatgtggagaagagtggggcgttgtggtagactgaaaatcgtagggaggtgcaggccatgctcatgggtgaatttgaacgcagtatcgatgctaaagggcgtctgattattccagccaaatttcgtgagcaattgggtgcatcgtttgttttgacccggggcatggatggctgcctttttggttatccaatcgcggaatgggacaaactgcaggcaaaattggccacattacccttagctaaaaaagatgcccgcaccttcacgcgttttcttttttcggctgcgaccgaatgtgaaattgacaagcagggacggatcaatattcccaagccactgttcaaacatgcggcgttgaaaaaggattgcgtccttgtaggggtcaatacccgcattgaagtctgggatgccgagcgctggcagcaatttgccgacactgctgaagaagactttgatgacatttcagaaaacttaacggactttgggttatagccatgacagaatttaaacacgagacagttcttttaaaagaagcaacagcggctttggccgtgaagtcggatggtacatatgtggatgccactttgggacgcggaggccatacccgccagattttaaatcagcttacgaatgggcgtctgatcgcttttgatcaagacgaagcagccatcgccgcggtcaagcgtcattttgggacgttaccaccgcagttaacgctggttcaccgaaactttcgggatttaagcgcagccttggctgatttggacattaggcaggttgatggcgttttgtacgatcttggtgtatcttcgccgcaatttgacgattcaaagcgtggtttttcttatcgtttcgatgcaccgcttgatatgcggatggatcagcggcaaacgcttgatgccaaaacgattgtcaatgaatggccgtatgctgaattggttcggatcttttcgcgctatggtgaggagcatttttctaagcagattgcgcgtcgaattgagcaagctcgtgcccaagcgccgattacaaccactttccaacttgttgagttgatcaaggcaggaattccggctaaagcaaggagaacgggtggccatccggctaaaaaagtctttcaggctatccgaatcgcggttaatgatgaattatccgcgctagaagcttctttggaacaggcactcaagctgattaacgttgggggacgcatcagtgtcattaccttccagtcattagaagaccggctggtgaaaaccatgtttaaagaagtgtcaaccgtccaagatgttccgcgcgggttgccggtggtgccggaagctgctcaaccacattaccagttagtcaatcgtaaaccgattttaccgagtgcggccgagctggctgaaaaccatcgtgctcacagcgccaaactcagggtgatcgaaaaaattcgcaattaggggggttccatatatgcttgagagtacagcaaggcctttagtgcaacaaccggcaccgaaaccggtacataaatcagctcctgcacccgcaccgcacacacatattgcttttagcgggttcgagaaaacgatgatgtttgcctgtggcgttttagcaacagttgtttgtgtcgtttgtttgttcatgcaaaatcgcttgagcaacacgcaacgccagtatgaagatttacaggcgcaaattatgaagcaatcgcaagccacggcgaatctcaagcaagaaattggcgaactctccaactccgaacgacttgatgcctttgctaaggcccatggatttaaagtcattaacggcaatataaggcgtgttgataatcaatgaaaattttcaaatcaaaacgatcaacgaatgcacatccagcccgcaaccgtaaatttttcggtattgggctgatcgggtttacgcttctggtactcggtgggttcgttcttcgtttttcttttgttgcaaccattggcgaagtggattcaaataatctggcgaagcagcggcaaaagcagtatcagaccgacaccgttttgcaagcgcagcggggtgctattttggatcgtagtggtaatgtgatcgccgaagattcaaatacgtataccatttatgccatcctcgataagcaaaacaaaaatggcgataagcctgattatgtcaccaacaaagctaaaacggccaaaatactgagtcgttatttggcgattggtgaagataaagttttagcacgtttaaatccaagtaagaatcttttccaagtcgagtttggtcggccagggacgaaattaagtttggcgatcaaaaaacaaatcgaagctgagaaattgccggggattcattttcgcgaaaccccatcgcggctttatcctaatggtgtgtttgccagtcatgtgattgggttggcacaagcgcaggataatggcggcggtttgaccggggtgatggggttagagaaacaatttaacaccgttttaaccggcaccaatggctatcggcgaagtgaaacagatgcatatggatataaactgcctaatgccaagaccaaagccaaggccccagtgaatggcggcagtgtctatacaacgcttgatagtggtctccaagcttatttggaaactctcatgacagatgttcaaaccaaatatgaacctaaaggcatgacggcggttttgatgaatgccaagaccggacgtattttagctgccacacagcgtccgacgtttgatgcttcgactggcgaaggattaggcgatatgtggcgggattctttggttgaggataattatgagccgggatcggtaatgaagatcatgaccttggctgctgctattcaaagcggtaagtatcaccccaatgaatatttccagtccggatctgttaagcttgatggcggcacggttaacgattggcggacaggcggctggggatccattccgctgagcaaagcgtttccgttatcgagtaatgtcggcatggttaagatcgaacaggaaatgggtgccggcatttggaagagctatttggataaatttaaatttggccaaaaaaccggcattacgttaccgggagaaacaagtggccggattagttttcaacgcccattggatcaggctatcaccgcctttggtcaaggcattgaagtcaatgtgatgcaaatgatgcaggcaattagtgcggtggcaaatgatggcaagatgcttaagccgcaaattgtatccaaggtggttaataagaacggtaaagccactgtttataagccggaagtggtgggtcagccgatctcaaaagaaacggcagctcgggttattgatgccatgcgtcacgtggttaatgacgaggacggaaccggggtggcttataaaatgccgggtgttgacttagccgttaaaaccgggaccggtcagattgctagtgctcaaggcggctatttaaccggggattccaattacacgtttagcgttgccggaattgcgccggcttccaatccaaagtatgtcttatacgttgcgatgaaacagccacagaagatgacggaaccagcggaatcaatcttggcaagcatcttcaagccgatgatgcaacgggctttggacacaaccgcgaatagcacggtgtcaggtgaaaccaacactgctgaagtgcctgctgtcaccaatgcggcgttggcgagtgcacaggatacggttaaaaaggccggatttgacgtagcaacgatcggaaccgggaataaaatcgtccaacagttgccagcaagcggaaccaaagcattgcgggattcacgggtgttacttttgacgaatggtgccatgacaatgcctgatctcactggttggtcgaaatccgatgtgttaaaatttgtacaattgaccggcaagaaatttaagcttgtcggtgatggcttcgttgttcggcaaagtattgctaaaggtaccttattaggtaatgccagcgggacaattgagtttaaacaacaatagaattggggatagtcatgcaacttgctcaaatgctcattccgatggtttcggcatttgccattaccattatgtttatgccgctttttatcggttacatgcggtataagaaagaaggccaggtgattcgtgaagaaggaccaagctggcacgaaaagaagtcaggaaccccaacgatgggtggcttgatattcattgctgcgatcatcatctcggctatttgggtcagcatttggcagcaccaattaacgctgagtgtctggatttccttatttattttggttctttatggcttgttaggattttatgatgatttccagaaattggtgcaccatcgtaatgaaggcttaaaggcgtggcaaaaattagccggtcagattcttggcgctgtcatttttctgatcgcttattttcacgaaggctttgatcatacgttatgggttccggttttaggtaatgtcaatgccacttggttttatgtgatattcgttgttttttggctcgttggttttagtaatgcggttaatctgacagatggtttggatggcttggttgccggacagacgaccatttcgtttgcaacgtatgcagtgattgcggttcgtgaaggccgcgttgacgtgttgattatttgtctggtgactgtcggcgcgatgcttggatttttgatgttcaatcataaaccggctcagattttcatgggcgacctaggatccttggcattaggcgggatgctggcagttgttgccattttgcttcatcgagaatggtcgttattattgatcgggatcatctatgtgattgaaacagccagtgtgatcttgcaggttgcttcattcaaattaaccggtaagcgaatcttcctcatgtcgcctattcatcatcattttgaaatgaaaggttggtccgagtggcagattgacttgaccttctggctggttggactgatcgcaagctgtgtttatctggtatttttcctataaaatcaagctataaaaagaaggaacgattgtgaaaaacatttcggattatcgtaataaaaaggtgcttgtattaggactggcaaaaagcggcgtcaatgcagcgcgcttactacataaattaggggctttggtaaccgtcaatgataagaagcaattcgatgacaacaaagaggctcaggagttgttggcagacgggatgcgcgtgattaccgggcgccatccagttgaattgttagatgagcattttgagttgatggtcaaaaatccgggtattccatacagcaatccgatggttcagcgcgcgcaagaattgggcctgccgattattactgagccggagctagcttttcaggtatccgaagcagagtggatcggcattaccgggacgaatggcaagacaacgacgaccacgctgatcgggttaatgttgaaccaacagtggcctcaccacgcctttgatgccgggaatatcggcattccggtcagtcaggtggctcaaaaagcaggtaaagatgacaccattgttgctgagctatcgagttttcagctctgcggcattaagacattgcatccccatatcgcagtattaacgaacatctatgaggctcatttggactggcatggcaaccgcgctaattacgttgcggcgaaaatgcgcattacgatgaatcaaacgccggatgattactttatcatgaactgggatcttcccgaaatgcaccagttagcaaagcaaagtcaagcccagattgtcccattttcccgcaaacaggctgctggtgcacgggcttcgttaattgatggctggttgacgtttgatggtgacaagattatgcctgccagtgacctgcagattccggggttgcacaatatcgaaaacgccttggctgccattgccgcggccaaactgaagggtgtgagtgatgacgcaattcgtgaggtactgcggactttttctggcgtcaaacaccgaattcaatatttggaaacgatcaatgggcgtcgggtatacaatgactccaaggcaaccaatgtcgaggcggcaactgtagccttgaatgcattccagcagccaattgtttggttggcaggcgggcttgatcgtggtttgccgatggacgctttaaccccgctcgttaagaaacacgtcaaaagcatggtcgtattcggtcaaaccgcgccattaatggcaaaaattgctaaagaagccggcgtcccggttcaaaaaaccgagaatgttatgacggcggttccattggcctatgaagccagccgccccggcgatgtgattttgctctcgccagcagcagcaagttgggatcagtatcctaactttgaagtgcgcggcgatgatttcatcaaggctgttcatagcctacagcaaaatcttgaaagcgagggtcattaaatgcggctggttatttctggtggcggtaccggcggccacatttatccggctttagctttgattgaagccctaaaagcagaaggtaaacttgatgatgttttgtacgtgggcacgcaaagaggcttggaaagtcggatcgtccctgcaaccggcttgaagtttgcaaccctggacttgcaaggctttaagcgcagcctttcgttaagcaatgtgacaacggtcaaaaagtttatcggcagtctcggtcaagccaaaaagttattacgagattttaaacccgacattgtcgttgggactggcggttatgtttcaggtgccattttatatgctgcggcacggttgcatattcccacggtgatccatgagtccaattcggttgctggggtgacgaataagtttttaagtcattttgtcgatcgagtggcgattgtctttccggaagttgcatcctcatttccggctaagaaagtcgttgtcaccggtaatccgcgggcacaacaggttgccggcttaaagcccaatgaccggcttaaagattttgggctggatccgcataaacaaacacttttgatctttggcggttcgcgcggtgcccctaaaattaatgcagcagctgttgcggcgttgcctatttgggctaaggcagactttcaagtgttatttgcaactggtcgcagtcactatgacgccattaatgcgggcttgccagcgttaccggcatctattaaggtcgttccgtacattgatgacatgccatcgattttaccggacatcggtttgttgattagtcgcgccggtgcaaccacacttgctgaaatcacagcactggggatcccggcaattctcattcccagcccgaatgtgacccaccaccatcagtacctgaatgcgcaaagcctaaccaaaaaaggcgcggcgttaaccattaccgaaccagaattgaatcagaattttccccagcgggttgtgaccttgatggaagatgatgcaaaacgcgctgcaatggcacaggcatccaaaagactgggcgtgcctgatgcaagtgatcaattgattgcggtgatgacaacactacttacgaaacgtgggtgatgactttggcttggctccgaaaaaaagaacagcaatctgatccgctgacgccgtggcaacaataccaggcacgccagcagcagacgccgcgtcatgatcggcgccaaaaaccgaagttggatgttaatctcccgaagatccagacgttgcggcgccgtaaactcgtgaagaaccttgtcttgattctgctccccctgctgctattgctgggggtttttggctattttgccagcccgctatccaaagtcggacttgtgagtgttcaaggcgtgacaacggttccggatcagcaggtcatcaacgcgactaaattatcagacgatgacttgatgttgagtgtggcatttcataaaaatgccattgcgcagcgggtacagaaatctttaccggaaattaaaactgccagcctgacgatcaagggattcaatcgtattattattaaaaccagcgaatatcagacggtcggatatgtttatcaaaaacatgcgtaccacaagattctggttacgggggaagtgttagccgccggaacccaaacgccagtcacgacttatccggttttttccgggtttacagccaaagagttaccacaaatgattacgttacttaaacagttccctgctgccattcggcgtgatatctcggaaattgacgccagtcgcggggatgccaatcctaaccagattgcgctcaacatgaatgacggttatcgcatcattgccgatacgcgcaccattgccaagaaaatcaagtattatccggcgattgtttcacaggttaagcaaaaaggcgtggttgatttggaagtgggagcattttggcgaccgtattctagtagcgaaaagtcgtcaaatgactgattttgtaaggattgttttctcatcagaaaatgagtgtgttacactgatgatggcaccgttttaatatgaaaattgagttaattaaaaagttacacaaggaggttcccgatacatggataatcaaggtatttacgttggacttgatatcggaaccacctcaataaaagtcattgttgccgaagcagtacagggacaaatgaatgttattggtgtgggaagtcagcggtctgaaggcgtgagtcgtggggtgatcgttgatatcgataaggcagtcgcagtgattcaagcggccgttgcccaagctgaagacaaggcaaatatcaagatcgatcgggttgtagctggcatccctgctaatatgctgcagattgaacaggtttcggggatgattgcggtcggcgaggaaaacaaagaaatttccgataaagacgtgcgcagtgttgctgcggcagcattagtacgtaatctaccgcctgagcgtgaaacattatcgctggttccaaccgaatttatcgttgatgggtttgatgacattaaagatccacgtgggatgttgggtgttcggctggagatgcgcggtattatgctgacagttcctaaaactgtgattcataataccaaaaaggccatcgaaaaagccggcttacgagttggcggcttggttatttcaccactagctattggccggcttgcgttaacggatggtgagcaggactttggcaccgtcttgattgatatgggtggcggtcaaagcacggcagcagtgattcatgaccgtaagctcaagttcacttcggtggatcaagaaggcggggaatacatcaccaaagacatttccgtggtgttgaataccagttttaccgatgccgagaaattgaagcgcgagtatggaaatgcggattctctggctaccagtgaagatgagacttttccggttacggttgtcggcaagcatgatccggccatgatttcggaaaaatatctgtctgaaattatcgaagcgcgggttgctcagatattcaagcgactcaagaaggcactggatgcggttaatgcgcttgagttgccgggtgggattgtcattaccggcggcaccaccgcactgccgggtgtcaccgagttagcccaggacattttagagcgaccggttaaacggtttattccggaagatatgggcctgcgccatccgtcatttactgaagggttagcgctcatcaagtacgccgctgaaatgacggatattgaaatgcttgtttcaagcgttttgccaacaccgtttatggttgatggggcgcaaatgccaacgcaaccggcacggccgcaaccagaaaccccggcggcaccggaaaatcaacgttctgccaagcgcaaacctgataaacaacccgaaaaagcaaaatctaaggaaccatctcctttacgccggttctttggtaatttctttgaataaatctcgatcctaggaggaacacgaatggattttcaaatggacgcacaaagtgaaaaaggtgcaaacatcaaagtaatcggtgtcggcggtgcaggcggtaatgccattaatcgcatgattgcagaagatgtcaaaggcgttgaatttatcgctgccaataccgatttgcaagcattgaatgccagcaacgcagaaaccaagatccagctcggaccgaaattgacgcgcggcttgggcgccggttccaacccggagatcgggcaaaaggcggctgaagaaagcgaagaggcgattggggcagcattgcaaggtgccgacatgatttttgtgactgccgggatgggcggcggctccggaaccggggcagcgccaattgtggccaaaattgccaaagatcaaggtgcgctgaccgttggggttgttacccgcccatttacgtttgaaggccctaagcgtgctaaaaacgccactgaggggattgctcagttaaaagagcatgtggataccttggtgattattgccaacaatcgtttattagaaattgttgacaaaaaaacaccgatgctggaagccttccatgctgcggataatgttttacggcaaggggttcaaggcatctctgatctgattacaagtccaggctacgttaaccttgattttgccgacgtaaaaacggttatggcaaatcaaggatcggcgctgatggggattggcagtgcaactggtgaaaatcgcaccgttgaagcgactaaaaaagcgatttccagcccacttctggaggttaatatcagtggggctaagcaggtgctgcttaacattaccggcggcccggatctcagcttgtttgaggcgcaggatgcttcacaaatcgttgcggatgcagctaaagatgatgtcaatattatctttgggacttccatcaatgaagagctcggagatgaagtggtggtgaccgtgatcgccaccggtatcgaagaagaagaccaacgccgcgaaacaacgcgccggccagctgctgccaatcgtaacactgatcagacccagtcaaacgggtcgtatcggccaacattcggcgggcatgagcagtctgccgatcaagcccctaaaaatgatgatccgtttggtaattgggatttgcggcgggaaccaagcaagcgccagaccccgagtgcagatgatatgaacaacgttaagaagaaagattttgatattttcgagaatcaaaccaatgcagacgatgccggaaccgatgatcagccgccattctttaaacaacggcggcgtcagtagtcaggaggtcatgaaacatggcgtttggaaagttaggggaaaaattcaacaatttctttgccatggatgacgaagatgaatatcaggaccaagaagacgaacaaacgcaggctgcacctaaggaaccttcaaatcatggccagtatcgtagcaacaaagtcgtatcaatgaatagtccggttggtaaaactgccaaaatcgttgtgtatgaaccgcggatttattcagatgccaaagagattggttcgcatttactgaacaatcgcgcggtcgtcattaactttgatcgaattgaggccgatgatgcacggcgaattgttgatttcttaactgggactgtttttgcgattaatggtgagattaagcggattggtgagtcgattttcttagtcacgccagccaattttgaaattgatggttcattggctagtaccattgattccgatggtttgaatctctcatcgcaaccataaacgaggtgtcaagtgtttaattttctttatgcattatttcgagtcggcgattgggcgatttatttatacatgatcatggtatttatttatatcctgatttcatggtttccaaacgctcaaggaaccgccattgaccgtttcttaggtcggtgggttgatccgtttctgagtatctttcgccgtatcattcctgctattggtggacttgatctttcgccaatcctggcgttcttcgtgctttcgctgattaagtttggatggtcgcggttgtttctgatacttgttcaaataattgggtgacaagcatggatgccatctatcaacattttcgcaaagatgaagcagcattgattgatcattttgcagaattaatcgaaactgcgcggaccgagtatcgggcagtattaaccgattttaccgatcctaggcagcggttgattgctgcgagcctgatcaatgcacatgatgatatgaagttggtacatttcggcgggtatccgcatgctgaacgacaacggctgatttttgcaccggactactttgccgctcagccagctgattttgatattcggctcttacaagtggtgtatcccgaaaagtttgccgaaatgcatcacagtacgattcaaggaacattgttaaatgccgggcttgatcgggatgtttttggcgatattgtgacggacgggcgcacatggcagttttttgttgccgcacatatggaagattgggtgatgagtaatatcaccaaaatcgggcgtgtcggggtccattttacggactatccgttagacgctgccgttacgcctgaaaatgactgggaacccatcagcttttcagttagtgcactaaggttggatgccatagtggcccacggtttcaatatgtcacggcagcgggccaagatgctaattcaggcgggaaaagtccggctgaactttggcgaaaacgatgcacctgacgctgaggtcgccacttctgatattatttcagtacgtggatttgggcgattgcggctagatgcgatacttggtgaaagcaaaaaaggtaaattgcgtgtctctgctgccgtgattcataagtaaaccgtatcgtaggcggttcaatgcgcttggtttatcggtaactttttaacaggttgcagcaatcagcgcctgatgagggacgtatcaataagctaaagtacgttcatgatcacgcgtatgccggcctaacaagcggttggcgcacgttcactagaggaggaggactatttatggctttaagtccactggacattcacaataaagaatttagcagcaagatgcgaggttatgacaaggatgaggtcaatgattttcttgcgcagatcgttaaggattatagtagcctgatcaaggataatgaggggcttaagaaggaattagcggatgcaaaagaaaaggtccgttacttcaccgatatgaaagaagccttgaatcagtcaatcattgtggctcaagaaagcgctgaaaaggtgaagaacagtgcgcatcaagaagccgatttgatcaagcagcaggcgcaacaagatgctcaggggatcctcaaccgtgctaaggctgatgctgatcagaaagttcaccaagcccaagcgcaaaccgagcagacgttgcatgatgccgaacttaagcgtcagaacatttctgttcaaacagaggatttgaaacgccagagccgggttttccgtcagcggttacaggtcatgctggaatcgcagttggaagttgtgaaaagtccggaatggaaagaattactgtccagttctcctgaagctgcagataccacggatccaagtcaagaagcacttgacaattcgcaggctggtttcgtaaactctagtggagcagtttccggtgctgatgcgtatacggagattattttcccagatgatcaaagtgcaacatccgagtcggcaactgcaacgccggcaccggtggattcagatcattctgaatcagaagcgacaacaagcgcaaccacaagtgccgataccgatgttacaactgatcaagacgcacaataacgtatgaacacgcgtcatttgccggtcccctttgcagcgagtcaggaataggtgtgagcctgataagtaccgctgaatgatatcagttcgcagttgtctcgccgaataactaagcgagaccggttgatcaccgttaagcaatcactgagggggacttgttccctgaagttaggtggtaccacgtttgctcgtcctaatatagggcgggcttttttcattcaattaacaaaggagcgggacacgtgaaaattaaagatacgttgaacatgggcaagacgacttttccaatgcgagcaggcttgcctaaaaatgaaccgatttggcaaaaaaagtgggatgaagaccacgtttacgagcagcggcaaaaattaaatgaaggcaagccgacgtttatgctgcatgatggcccaccgtttgccaacggaaatattcatatggggcatgcgcttaataaaatcagtaaggatatcattgttcggtataagtcgatgaatggcttccgggcaccttatgttcctggctgggatacgcacggtttgccaattgaacaacagttggccaaacaaggcgttaaacgcaaggaaatgtcgatgaccgactatcgcgagttatgccggcagtttgcgatgaaggaaattgataagcaacggactgatttcaagcggcttggcgtcatgggtgactgggaacatccgtatattacgttacaacatgcttatgaagccagtgaaattcgggtctttggtgccatggcgaagaaaggttacatctatcatggcttaaagccggtttattggtcatggtcatccgaatcgacgctagccgaagccgagattgagtatcatgatgacaaatcaccttcgatttatgttgcctttccggtggttgatggcaagggaatcctggaccaagatacgtcacttgttatttggacaacaacgccttggaccattcctgccaactacggtattgcagtcaatccgcgcttcgattacgtccaggtgcaagttggcgagcataagtatgtcgttgctgccgagttgcttgatcgggtagctgaagaagtcggctgggaacaacctaagattttaaagacttttaaaggcactgaaatggataagatgacagccaagcatccgttgtatgatcggacaagtctagtgatgaatgcggatcatgttacgcttgatgccgggactggcttggttcataccgcccctggtcatggggaagacgactacaaggtcggaatgaaatatggcttgccggttatttcagtggttgatgccaaagggtacctgaatgaaaatgcccctggttttgaaggcgtcttttatgatgatgccaacaaactcgtcacgaaagcgttggacgaaaaaggtgccttgctgaagctggacttcttcacccatagttatccgcatgattggcgcaccaagaagccggttattttccgcgccaccacccaatggtttgcgtcaattgaggcctttcgtgatcaaattttgaaggccattgataccgttgactttaaaccgagttggggcaaaacgcggctgtacaatatgattcgtgatcgcggcgactgggtcatctcccgccagcgcgcatggggcgtcccattaccgattttctatgcagaagacggtgaaccgattattgaagaagcaacgatcaatcatgtagccgatttgtttggtaaatatggttccaacgtctggtttgaacgcgaggccaaggatcttttacctgatgggtacaccaatccgcacagcccaaatggcaagttcactaaagaaaaagatattatggatgtttggtttgactcaggttcatcacaccaagctgttttggcgcaacgtcctgaactaagcttcccggctgacttatatctggaaggttccgatcaataccgcggctggtttaactccagcttgattaccagtgttgctgcaaccggaatcgcgccgtatcgcgggattttgtcacaaggcttcacgcttgatggcaaaggccggaagatgagcaagagtttgggcaatacgattgtgccgtcaaccattgaaaagcagtttggtgctgagatcattcggctctgggttgcaaccgttgattcatcatctgatgttcgggtctcagtcgataatttcgctcagacgtcagaagcctatcgtaaaatccgcaacacgctccggttcatggttgccaatactggcgatttcgatccggaaaaagacgcggttgcctatgatcagctaggttcagtggatcgttatttgttggttcggcttaatcaggtcatcgccaaagtcaaagaagcgtatgatgcctacgactttgctacggtagagaaaaccatcagcagtttcctggtcaacgatttaagtgccttttatctcgatgttgccaaggatgtggtatacatcgaagccgcaaacgatcctaaacgtcgcagcatgcaaacggttatgtataccgcattgctggacttgaccaagttgttgacgccgatcctgccgcatactgccgaagaagtttggccgtatcttaagcagaaacaagcatacgcagcgttatccgacatgccagatgtgacccactttgctgatgaggatcagctcctagatatctgggcagcgtttatggattttcgttccgaagttcaaaaagccttggaagttgcccgtgacaacaaggtaattggtaagtccatggaggcagcggtaacagtttacccaacggagccggtgcgcgacatgctcgatgatgttgaagccaatgtgatgcaattgctgattaccagtcactttgaagtagcgccacttgaggcgaaggcgccggaaaatgccgaacagtttgaggatatggctgttgtcgttgaacatgccaaaggaactgtttgcccacgttgccggatggtacgaaccgatatcggcacagatcctaaattaccggagttatgcagtcggtgtgccgcgattgttgaagctaattatcctgaagcggcagcaaacggatttgataagtaagcggaggctatgatgcaaggacgggtcaaaaatttcaacgtcgataaaggctatgggtttattgaagctgaagggcagcctgacatttttgtccacttttcggcgatcaatgagtctggatttaaaagtctgacgcctggtgaacaagtcgattttgtcattgtcgaaggtccgcggggtccgcaagcagcaaatgtcacgatccatcacgaacccgacactgaggatcatgcataaattctcgttcaatcgtgtgacgtgattcattaaaagcaatccgaacagtctgtctttgggtggcaagctagtgatgcttcctagcaagtacgtctgtggctgtcaggattgctttttaatgttgacgactcaagtttataggacaataagaaaaccgcgatcattgcgttgatcgcggtttttgtatacatgctgctttttatttggtgatgctgggtaggttacttgttaacttcttcaattttaccgtcataagtccgagcaacggtcatcttggtgattggaatatagcctaactttggaaccagagtcttttgaacgttcttggactggatatagttgataaatgcggcagtcgatgcattcggcttgcctttggtgtacatgtgttcgtaagcccaaatcttccaggtgttcgttgtaacgttcttatcagttggttgtaccttatccagtgccagcttttggacgccatctttaattgccgagaaggctagatagctaatagcaccgggagttgaggagaccatctgataaacggtaccgctagaatcctgttcctgactggtcttgactttatcggtcttgatcccgaactgttcgaaggttgccctggtacctgaaccttgcgcacgattgatcagaacaatttgctgatctttgccgccgacgtctttccagttcgtaatcttgccttggaagatatcgatcaattgctgggttgagatgttcttaaccccggcatctttgttgaccaccggcgcaatggcaacgaccgctacctggtgatccaccagatcatcggccttcaagtctttcttttcttgagcgaaaatatccgagttaccgatcgtgaccgatccagctgccacttggcttaagccggcaccggaaccgccgccttggacagtgatctccgcttttggattatctgtttgatattgtttcgcggcctgttctaccagcggttgtaaggcagtggatccgaccgctagaattttgctttgttttgccggtgctgaactggatgaacttgaactgctggcggattttgacccgcaacccgttaataccaaagtggcagttaaggccacggtcaaaccgactaacaatttcgaatgcttcattacttttccctccaatacttgaataactttaggataaggtttgtgtgtaaagacttgaccactttgatgtaaataatgcgttttgcttttgtaaatatgttcaacagtcctttgaaaaagtaaccaaagtcggcgtataatgactcagttaggcgttattaaaggagcggaaaatgtgaaaaattacattgaggatcaaaaagttcagaaaaaccggtggtggatcatcacggcaattgggatgtttaccattatgtcgacattggatggttcaattgtcaatattgcgctgccggtcatgagtcgcgatttaaacattccaatgaatcaggcggaatgggttgtttccatttatttgatgatgatctgcggcttgttgctgttctttggcaaacttggcgattcgatcggtaaaatcaaagtatttcgaattggcatggttttgtttttaatcggcttgctttttgctggtttcaataatagtttggcgttattactggcggcgcgaattgtgcaggcgaccggtgcttctatgaccatggccaataataacggtatcgtgacggaaatttttccgatgaatgaacgcggcaaggcgctgggattgattggttcatttgtttcgatcggcgccattgccggtcccggaatcggtggcctgattcttggccaactgccatggggttatattttctggattaatattccaattgggattgttgccctcattctgggaacagtcgtcttgccaaaagatttgccaagtaagcgggtgccaatcgattggtcagggtttattagttttctggcgtacattctcacgctttttatggggatttttttgggtcaggaacgcggctttactgatccgctgattcttgggttatttgtgatcgccgtgattgcgctggctgcatttgtacaaattgaacggcacaaaaatgatcctttggttagttttaaattattcagtaacagtgcgtttacactgagcttgttgtcggcattcttcattttcgtgaccaacttcttttttaacgtgatttcgccgttttatttgcagaatgcgcgtgggttatcaccggaaaaagccgggtacttgttgatgattttcccgattgtgcaggttattgtggcacctgtagccggttcaattgcggatcgtatcggaccttatcgaattaccatggtcggcttgttgtttattgttggcagtcagatcgggtatgcattgtttaatttacaaacgtcttttgtttttgtcgcgttgatgatcggcttggttggttttggtaatgggttgtttcaagcgccaaataatacggtcgtgatgtcgagtgtggcgccgcgagatcttgggattgctggcgggatgaatgccttggcacgtaatttgggcatggttgtcggcatttcgagtgcgaccacggtgctattttcttcaatgagtcatactgccggacgcaaggtgacgacttatctgacgggtcagccaaatgtgttcatcgccggtatgcatgtgtcattttgggttgcaactgccttatgctgcctagctctggccttgacgggttatcggatgtggcagatgcgcacacaaacgcaggcatgaattcggtaacgagaactgataactgctgaatcgtacaactacacgcaaaaagcccgtgatcatcgtatgatcacaggcttttttcaaagtattgacgcaattatcaatggcgactgagtagatttaacttagtgtggcgtcacgtctttgggattttgttcgttcatactgccgtgcgtgtagtttaataattgttgctttaattcgccttccatttgtactaactgcttttcggcattttggcgttttagacggccgtcttgttggatctgcaaggtttgtttcaaggtatcgataagatcgttttgggtttgggtcaatgtttcgatatcgacaacgccgcgttcattttctttggcagtttcaattgagctgattttcaacatttcgctgtttttcttgagcagatcattcgttgtttccgaaacctgacgttgggcggttaccgcatttttttgccgtaaaagcgtcagggcgatggccacctgattcttccatagcggaattgctgtgttgacgctggcctgaattttttctgccaatgcttgattggtgttctgaataaggcgaatctgcggtgcttgctgaattgtaatttggcgcgctaactgtaagtcatacgcacgtttttccaaacggctggcaaattgcttgagatcattgacttgttggatcgccatttgatcattagcggcttctgcggctttggctgcttcgggaatcgttttttcatttaactccgcgattttgagattggccgcttcgatgtaaatattcagtgcatcaaaataggctttattttggtcataaagttcgtccaaaagtttattgtcatttaacagaccttgttgtgaagtctcaaggcgattggcgatggtgtcgatttgcgcgccaatcttttgatacttagccgtaatttcgtagatcgagcgcttgacacggccaaagattttgcggaaaatattattattttctgcttttagctcatcggggttggcctcatttaaacgtgtcatcaagctggttaaggcatcaccgactgcaccggtatcctgactttggacttttgtcagcatattttgggaaaagacgccaagctgcttttgagcatcggcaccataattaagcacggtttcaccttttgtgacatcaattttactggctaaatcccgtgctttggcttcctgttccggattcaatttaggtttagctgtcgttgcttctgggatgtttggctcggcattggcgtctgttgctgtgctgaacggatcagctaataaatcatccgttaaattggtttgtttatcatcgctcacgttggtcactccgtttcatgagttttttcgggttcaaggtgttttttagctaagcgcacatcgctatcgagatcagctaagtcgtctttaatgaaggcttggtaatcagtgcgaattttgcctgccatattcgtcatggtttcaaaggctttatcaagcgtttcataagtgtcggcggttttaacctcatgatgggtaatttgagcatatttttgcatgagatctaacagatttggcacttgttgatagacgaaggtacccgcatcggtcaagcgttgcggtgcctgaactagggcctcgaaataagcgtggagtaaatcaactaaatcagtgtttaaggttaatgcccgtaatttggggacttgttgggttaaggcttcaatcgtgcgaatttgctcggcaagatcagccatcgtctttctgaaaagtttgatttcttcttcacttaatccagatgccgcatagtgttccgccattttgggatctaaacttggcagactggcagattttggcttgggccgactcaattcaccgataaagcgggcaaatgcgaaaacggtgccgacaaaaatggcaatgagccatcgtccggacaaagcacctaatactgcacccatggcggcccagagtatgattcgccaagtgcgaatacgtttgcttgtggccacgagatcacttcctctttcgtttgagtttagtttagcacacccttgtaccttgcctatcagccggaagttggatattcgcaaattttttgttaagaacaagcaccaaattgtctgctggtgtaagctgatgacatggctaaaaaaactgatcgtcaatcggacttaagagcattgacgaatagcgacactattttaacaggaggcgatcatggtggaagaaaaaccaattgcccagcaacgcttgtttaccggtcacttggttgcggttgatgaactgacggttaaattggataaccagcagacggctaaacgtgagattgtacgggcgcacccagcggccggcgtgttggcgctcaaagatcagcgggccttattcgtgagtcaatttcggtcaacggtcgggcagatgaccttggagattcctgctggtaagatagccccaggcgagatgccgttagcagctgcccagcgcgaattaaatgaagaaaccgggatgcaggcgcgcgactggcaaccgttggcaagttattttcagtcactcggtttttccgatgcaaccatggcactttttttagcgcgtcacgtcacaaccgctgaacatcatttggatcaggatgcagatgaatttgtccaacatcgctggttaacgctgagtgaggcgcaacaggcagttgacgatggtcaaatctgtgatagtaaaacgctgctcgccttgttgtattggcagctgcaggagggaaattatggcagaggttaatacacgcaaagcataccgtgaggagcaggaaaaagcgcaacgagcagcgcgtgaacgtgaagccaaacgtattgaggttgaaaaagcctatgcgcggcagagacggggaaaacccgaagtaaccgcagctcgatttgatgacgttacttttcgtaaagtgaatagtctcaagaaacgtttgaattgggcaatcggtattgtcgtcggtttgattgtgatcgtctttttggttttatactttgtctaacttagacgctgataagctcaggaaagtttatgatcagattcacgacattaatttaaagaaagaatgaggcgattttttgattaaggtcggggttatttgtgcgatggaagaagaaattcggacgttactggctaaacagactcatcagcaagaaacggtgattgccagccagcattactttgaaggccaaatagatggtgttgatgttattttggtacaatccggaattggtaaggtacaagcagcgatgacgactgccttgctgttagcgacttttaagccggatgttgttgtcaatactggcagtgccggtggtatcggtagcggtttggcgatcggtgatgttgtgatttcaagcggtgtggcttatcatgatgcggatgcgaccgcgtttggttatttgccggggcaattgccacaacagccgcagatttttgaagccggcatgagttatgtgcgccagattcaagctgctgcgacggcgaccggcttgacgtcaaaagtcggcttgattgtttcgggcgatcagtttattaatggcaaagaggcgatcgcccgaattttgaaaatttatccacaagcgcttgccagtgagatggaaggcgcagcggttggccaggttgccaaggaatttcacaccccgtttgttgttattcgggcaatgagcgatgtggctgatgagcagtctggggttgatttcgacaaatttgtgatcaaagcaggggagcaaagtgctgcgatgttgttacagttctttagtcatttgcagcgatcacagcataattaggagtgattgtaatgcaacacatttatctcgacaatgctgccaccacaccgatggctcctgaagtcattcagaccatgacggatcaaatgcaacatgattttggcaacgccagctcgactcactggtttggccgggaagctcacacggtaatggacaaaagccggaaagttttggcggactcgattcatgcccaacccggcgagattgtgatcaccagtggggcaaccgaaagtaataataccgctatcacccagacggcacatgcgcgtgcgtcattaggtaaacacattattaccacggcgattgagcatccctctgtgttgcagccgttaaaggcccttgaaaaagaaggttatcgcgttacctatttgcctgtggatgagaacgggcgtatccggttagctgattttgatgccgcgctggatgacgacaccattttggtcaccatcatgatgggtaacaatgaggttggcagtcggatgccgattagtgaaattggtgcacggctggttgaccatcaagcctggttccacaccgatgcaacgcaggcgtatggcttgcttgatattgacgtcaacgcacagcacattgatatgcttagtgtttcggcccataagattaatggtccaaaggggattggctttttgtatcgcgatccgaaagttcagttccctgcgcttttaaaaggtggcgaacaggagctcaagcggcgtgcggggaccgaaaatatcgccggaattgccggtttcgcttctgcggtgaagttgattacgcctgaggaaaaggctaagcgccaaagcaaatatctcggctttaagcaacagattatgaccgctctagatgatgcaaaggtgccatatgcggttaatggcgatattcggccggacaatgtcaatcacgtgttcaatttgtggttaaaagggatttcgacttatgcgcttcaaacaaatttggatttagcggggattgcggtatctggcgggtcagcctgcacggcgggatcactggagccatcccatgtcttgacggccatgtttggcggtgatagtccgcgtctgggtgaatcaattcgcgtttcttttggtgggcagacgactgcagatgatattcaggcgtttattgataccttattgccgattatcaaacggttaactgccaaacaaacgagtcggtagctttcggaaaagtaggcagtaccatcttgagactcgttagggcactgtgaagctaagcgatggaaaagaagacacttttcgggcaatcccgtgatgtgctaaacttatgggtagttaagcgtgttcataacgcacgtgtcttgcgttttacgctcatattaacgcgttctccagcgcagaagtctgcgtgtaaggacctcagtcgcaatggccaaagcccggccatcacgcctgaggccgcttacactccgacttctacccgcgctggttcacgctcaggaggtttggtaatcatggctttagcttcaaccggatcggctcaaggggatcctaagacttatcgaattgggtccaacttaaaacgatttacgttaattgatttaggttttgttccaacgaagaatggtaattttcagcttcagcggtcgttggatcctaattcaccgtataccgcggcgaataaactgaagatgacggtggctaagacgctggacaagtttcagctggatgtgaccacaggcaacgggcttaaggcgattaacattttcaagaatgacagcacgaaggaaaatgttgaacaatatgaatattggattaacaatttcattgaacgtggtgtgctcgagcctaaataagtctctttgaaaatcacggtaactttccttttaaacaagcggagattaccgtgtttttttgttgcatgaatcacggattaaagcgttacgactggtaaagcatgagccacatcacggatgcgtggttttagtgaggcgaatgtcgtgaccgccaaatcaagtggccaaaagtggtaagctggaaacattgaaattttgatatgaaggagggcttgtatgtttgaacatgggtttattgaggtacatgatgccaatcagaacaatttacaacatgtgaatgtgaagatacctaaggatgccattacggtttttgtgggtcggtcaggatcaggcaaatcatcgttagtgttcgatacgattgctgcggagtcacggcgggagttgaacgaaacttttccgagctttacccagcaatatttaccaaagtatggccagcctgatgtcggttcgatcgatcacttgccggttgccattgtggtggagcaaaaacgtatcgggaaaaacgctcgctcaactttagcaacttacacgggtatttactcactgttacggctgttgttttcgcgtgccggcaagccattcatcggctattcggacacattttcgtttaatttacctcaggggatgtgccccacctgccaaggcttaggttacgtggatgatattgacgtcagtaagttgattgatcccaataaatcgcttaaccaaggggcgatcacctttgtcagttttggaccggatacttggcgttggcggcgttatgcctacagcgggttgtttgataatgacaaacctttacgtgactacacgcccgaagaaatgaaactgttactttatgcaccgcaacagacactgaagcatgcaccagctaaatggcccagaacagcgctatatgaaggtgtcgtgcctcgcattaaacgatccattattggtaaaaaagaagcagaacatcataaggcggcattggcagaaatcgtaacgcgcaagccttgtccggattgccaagggacacgcctacgtccggaagtgttaacctgtttgattaatcaaaccaatattgcccaagtgttgcagatggacttggtaaacgtacggcattttctgaaagccattcaagtgccgctggttcaggatgtgatccgggaattattacgcaaaattgatgcactgattgatattggcctcggctatctttctttagatcgacccaccgagacgctttccggcggcgaaacccaacggatcaaaatcgccaagtttctaaccagtgctttggtcgatatggtttatattctcgatgaaccaagtgttgggttacatcctcacgatatcgagctgatcaagcgggcactgctccgtctcaaggaaaaaggcaacaccatcttgatcgttgagcataacccagcgctgatcgcattaggcgactatattgttgaggttgggcccggtgctggcacaactggcggccacattacgtttaccggcacttatccgcaactattggcgagtcaaaccttgacggggcgtctgcttaaacagcgactgacatttcggcaaccgcgatcggctaaaacgaccatccatttgccgcatattacccgccacaaccttcaagatgtcgatgctgccatcccactgggcatcgaaacggttatctccggtgtggcaggttccggtaaaagtacgttagttgcggcgttacgtgatcatttaacggtgccgtacattgatctggcccaagcggatattggtgctaatatccgttcgacacccgtgacttatttgaaaatccttgatccaattcggaaagtatttgctcaagccaatcacgttggcagcagttggtttagctacaacggccgtggcgcatgtccgcggtgcaaaggcaaaggggtcaccattactaacatggccttcatggatccggttgtttccgtttgcgaacagtgccatggcaaacgttacaacgatcaggcacttggatatacgtttcaaggcaaaaacatggcagatgttttagccatgccgattgccgcagcgcagacattttttgcgcagaatcacgacattgccaagccgttagaaaatatggcgcgagtcgggctcgattatctcacgctcggtcagccgctgacgacattatctggtggggaaaaacaacgattgaagcttgctgttgaattaaaccgcactggcgaaatttacttattggacgaaccgactgccgggttgcatctacaagacgtcaccaaattgctgcatttgtttgatgatttggtggcagcgggcaactcactcatcattgttgagcataacttgcaagtcatcagtcaggccgattggctcattgacatgggaccggatgctggtatctatggcggtaagattctctatgctggcacgccgcaagctagtatggaggctaagcaatcgcgcaccggacaggctttacggcaatataatgcagcaccggagcgtcagcacgattaatggcagcactttggcgcacttagcagggagctcgcttgctatctgttcttggcctgctataatagcacttactggaattcgaccttcaaatcggatatctccagaatctgatgaaatgatggtgattgttttggacaattccaacacccgtgttgttgttggcatgtccggcggcgttgattcaagcgtcacggcattattgctgaagcaacaaggatatgatgttgtcggtgtcttcatgaaaaactgggatgacactgatgaaaatggtgtttgtacggccaccacggactatgaggacgttgctaaggtggctagtgagataggcattccttattattcgattaatttcgaaaaggaatactgggatcgcgtttttcaatatttccttgacgagtacaaggctgggcgcacaccaaacccggacgtgatgtgcaacaaggaaatcaagttcaaggcatttttggattatgccgagcagctgaatgcggattacattgcaatggggcactatgcgcaggttaaaaccgatgagcagggcgttgttcatatgttgcgaggcgcggacggtaataaggatcaaacgtacttcttaagtcagctttcccaggatcagctcaagaagtcgatgtttccaatcggtcatttgcagaagccggaagtgcgcaagattgccgaggcagctggattggcaactgccaagaagaaggactcaaccgggatttgctttatcggtgagcgtaacttcaagcagttcctcagcacctatcttccggctcaacccggaaagatgatgacagtggatggcgttgagaaaggcacccacgacggcttgatgtattatacaatcggtcaacgtcaaggcttgggcatcggcggtaactcgcaaaactccgagccttggtttgtggttggcaaggatttagacaaaaacatcttgtatgttggtcagggttttgacaacccggcgttgatggccacaagtctcagtgcatcgaaccttaattggaccaccggcgaggctccggctgatggcacgcatatgacagctaagtttcgttaccggcagcgtgataccggcgtgacgattcactatcatgatgacggaacggcgactgtcgactttgatgtaccggttcgagccattacgcccggtcaggcagtggtcttctatgatggcgaggagtgtttaggcggcggtacgattgatgcagcctatgctcatactaatgagttgcagtatgtttagtgcgccagcaagttggcatgatgtgatgtaaggaagatcggtcccggagataaactttatctccggggccgttttactttgtctggctgattggggtggggttgttttgggttttataacgccgctgttggttggtcgggtttattctccgaaacgcgctcacagggccagaaacctgcacataaggaccttggacgcaatggccaaagcccggccatcacgtccaaggccgcttatgctccggtttctaagcggccctgttcgcgctctgtttccgaaacgcgctcacagggccagaaacctgcacataaggaccttggacgcaatggccaaagcccggccatcacgtccaaggccacttatgctccggtttctaagcggccctgttcgcgctcttgatattttgtccgaaaatactgataataaaaaggttaagatgtgaaaaggggagcggcttgtgaccaagttatattttgtgcgccatggcaaaacagaatggaataatcaggggcgttatcaaggtgcaaatggtgattcgccattattgccggagagctttgaacaaatcaaagcattggctgattatttgcgtggcatttcgtttgcgcatgcttatgtcagtccgctcaaacgtgcccgcgtcacggcccagacgcttattaaagacttaaatgaaccgattccgttgacgattatgccggctttgcgggagttcaatttagggaaaatggaagggatgacatttacggatgtcgctaagcattttcctcaggaattacatgcatttcggcatgaaccggcagcgtatgatccgcgtaaaattcacggtgaatcttttccgcagttgattaatcgggccattccggcgattgtggctaccgtcgcgatggatcggaccggtacggctaatttgttatatgtcagtcatggtgcggccttggcagcggttattcagagtctgcttggtacaccattggcagagattcgcaaagatggtgggctgacaaatagcagtgtgacgattctacaagcggatggtccgagtctgccatttaagttgttaaactggaatgaaacgagttttcttcccgagccaccgaagccaaccgacacgatttaatggtcgtgactgcgatcatatcgcacactgaatgaagaggatgctatggattcaaatattttaaccgcatttaatcaaggaaaacacgaagaggcgattcaggcagccgttaaagcgattgatgctgatccgaaaaatcctaagcgttatgcggttttgacaacgatgctgattagtttgaaggccttggatcaagcaggtgagttactagccaaagcgcgggcactcttcccagatgacttggaattacagtacacagctggtctttttgcctatgcgcaggcggattttccggcagcggctgcctggtttactaagtgtcgccaggatgagacgttaaaaaacgatgccacgtacatgttggcattgagctatcagcaagccggtcaacctaaaaaagcactggcctttgcattgacggcacacgaattggcgccgaagcaaacagatgcggcgttgctggcggcagatttgttattaggcgagcaagcttttgacgcggccgcggagattttgaaaccgctgctggaaacccgtcagccgcaagttctatttacttacggcatggcgttgagtgctgcgggtaaagatggcagtgcctatttagatgcagccaaacggcttgatcctaaaggctacgatcaaaaagccggtaccgttgctgacatcaatcgcttcttacggttgcaggaagggggccatgatggacaggcatgaagatagcgtcactggccgggtcaaaagtattttctttcagaatccgactaacttttttaaaatcctgctgattgatatcacggcaaccacgattacctggacggagccggatattgtggtgaccggtacgttcggggatattaaagaagatgagacgtacacgtttaccgggcatgtcgtggaccatccgaaatatggccagcagtttcaagcggataattaccatgtggatcggcctacgaataaaacgggactgatcaattatcttagttccgacaagtttccgggaattggccccaaaacagcggagaaaatcattgacaagctcggggttgatgcgattgatcgtattttggatgaccctgagagcttaaaaggattggggatttcggcggccaagcagaagatgctggtcaccaatctcaagacgaatcagggaatggaacgggtcatcatcggtcttaatgactacggcttcaccagtaacatggctggccgaatttatcagcaatatcaaaatgatgcgctggaagtcattaagcaaaatccgtatcagttaatcaatgatattgacggtatcgggtttacgcgggccgatcagattgccgccaagttagcgattgccgcggattcgcaactgcggctcggtggtgcggtcatggataccttgcagcgcttgacggacggtgaaggcgacacttttgtcgatttgaaaacgttggtcacccagacgcttgatttactggagcgagcgcgtcaggttgcagtgaaccccgaagcagtcggccaggcaatcgtcactttagccaaggacaatgcgctggtagcggaaggtaagcgcatttttcctaaacgactttatgattccgaatggcagattgcccggcagttaaaaggactggcggatgccgggcgcgctgccaagcaacctgcactggccgaaattaaacaaacattggccgccgtacaggaagagactggcattgcctatgatgaggtgcaaaaaaaggcgattatcactgccttgcagtcgccgatttttcttttaaccggcggccccggaaccggaaagacaacggtgacggacgggattgtccgcacctatgcgcaattgcatgatttatccttggatcgccatgaatacacgccggatgatcctttcccgattatgctagcagcaccgactggccgggctgctaaacggatcagtgagacgacacagttaccggcaagcacgattcatcgactattgggattgggcgtggatacgcaggagtttgcgcctaatgatctcccggacggccttttaattattgatgaaatgtcgatggttgatacgtatctttttcgaacgttgttgacggcgctgcacccgggtatgcaaattgtgttggttggcgataaagatcagctgccaagtgtcggaccgggacaggtttttgctgatttgttacgcagccaggctttacctcacgcagcgttaacccacattcaccgccaggacgcggacagttcgattatcccgttggcgcatgcagtcaatgccgggcgcttgccggatgacttcacccgcccgcaagtggatcggagctttttgccgtgttcacccagccaggttccggaagtggtcgggcaggtggttcagcgtgccgcggttaaacagttttcgattgcggacattcaggtgcttgcaccaatgtatcgcggaactgcggggattgatcggttgaatccattgttgcaggatattttgaacccgaaacgcagcgctcggacaaaaaccgttcattttggcgaaaccgagtatcgaattggcgataaaattctgcaattggtcaacgatccgaatcaaaatgtgtttaatggcgaaattggccagattgtcgggatcacacttgccaaagaggcggccagtaaaaccgatgagttgacgattgattttgacggcaatgaaataacgtataaacgcagcgacttcagcaaaatcaccttggcttatgcgacttcgattcacaaagcgcaaggcagcgagtttccaatggtgattttgccattaaccatgcagagtcgccggatgctgcgccggaacctactttatacggccattacccgagcaaaatcgtttttgattctggtgggcgagctggctgcatttgagaccgcagttggcgaaattgcggtaaatcggcatacgggtttggtccagcggctgcaacaagcgtttggcatgaccgtttcccagccggacgtagaaaagccgacgcctgcaactgaagtcagcaagaataacggacaaattgacactaacccgtctgacttggataatggaattagtactgacgaatcgaacaattatcagctaacccctgcattggtggcttcacagcggattgatcctatgattgggatgaatggtgtgacgccacaaatgtttatgacgaaggagaaataacctttatggaggacaacatacgcaagtcactgcaaattaaatcagtgacgcctaaggatcttgaacagttcaacgaccttttgacttatgtatttcaggtcacgcaaaaagatctggaacaatctgggtatgaagaaggggaacttgaacgggccaagcgtccggttttggaaaagtcggacgtattgggatggtttcatcaaaatgagctggtcagttcgctggcaatctatccgtgcaccgtcaatattcacggcaccttatatcagatggctggtttaaccggagtcggcacttatccggagtacgcagggcatggcttaatgcacgatttggtgaagttaggcttagagcacatgcggcaacataagcaatggatttcctatctgtacccgtatagtattccgttttatcggaaaaaaggctgggaaatcatgtctgatcatctgacgtttgatgtgaaggatacccagttgccgaaacaagtcgaggttccgggtcacgttgaacggctggagatagatgatcctgatgtgattgaaacttacaatcgctttgccatgaaaaatcacggtgccatgattcgcaatcagctaaactgggatgaatattggcgttgggaaaatgaagaagagcgaacagccggcgtgtattatgatgccaatgacgaacctcaaggctatgttttatactggattgccgatgaagtttttcacgtcaaagaaatgatttataccaatcaagaggcacgcgtaggcttgtggaattttatcagtgcccacttttcaatggtgacccacgttaagggcaatatctataaaaacgagccgttacattttcttctggacgatggcgatatttatcaaactatcaagccgtattatatggcgcgaattgtggacgttaaagcatttctggcacaatatccgtttgctgccgagacgacagaaccgtttcatttcgttgtaagtgatcccttggcgccgtggaataatgggacatttggcgtttattgggatgagcatcagcaggtaaaaattacgaaccgacctgttggcgaagcgattacgacggacattcaaaccttaaccacgatgttaatgagttaccggcgcccatcctatttagcccaaatcgagcgtttgtctgctagcaaacatgcgatcaagttgttggagaatgcggtaccgatggaagagccttatttttcggactatttctgatcggcatttcgaaagactgcatgctgttgtcaaagcctgcacgtgatgggttttatgtgataaaagcgaaaaagcctcagactgatttttatctgaaggctttttttaattggaaactatttaaaaaggttaaatactacggtcaatccaaaacttttgggaggccaccgaaaagtcgatttcaaacgggcgtgttcccatttcttcgccatccatttggccaaattccagtgaactggtttcaactgtcaactttttggcgtgaaaaagatgcaccgcgcgacttgttggagccttgccgcgcatgagttgaatcatcgcgaatgcccaggacacgatattaaaccattcgacaatgatcaaatcaagatgcccatcagtcgggtcagccggcttatagatttgaataccaccgccaaaatagggaatgtttgtcgttgtgcaaatgtaggcgcgatgaaaaaaatgccggacgcctttttcatagaccgcaaccggaaacgggcggcgggttagcaaactcccaataacgtgaaacaagtaagttaatttaccgagatgaaatttatttagcagctgtttactatcgctgtgattggctgcactgacaaccgccgcatcaaagccaatcccgatattattgacaaaataaccggtttcatcacgagtacgttcatgataacggccaatatcgattgcaaccggtttagtggcttgcagtacctgttctagcgcgtgcattggatcttccgacatcccgataccgcgagcaaaatcattgccggatccggtcggtacataggcgacgggcagatcgtgctgccgggtaccgattaaaccgttgatggcttgatttaatgtgccatcgccgccgatcaccagtaaaatagcatggtcgcgggtattaaaattaccaatttgtttcgcgatgatattggtatgaccgggatagcgggaggttttgattgcataaggcaattggcgttggtctaagacggctttaacctgtttaaaaataggaattgctgctccgccacctgccgccgggttatagatgagataataaaaaacagccgccatcaactttcctcctaattagacacgcaatcaattataccgaaaaagccaagaaaaacaatattaccgtcatatttgaatagcatattcgtcaatagaagtaaacttaacttttcagcaaagccggcgtaacggtcagggggcctttcaaaaagattaacgtttaaatggcaggttaaaaattgcaaaaaaacaccgcacagcttacatggcaggtgcggtgtgagaataaatatttgagattgtgaaggctgctatagcagaatcagcatcggtagaataaccggatgacgttcggttttatcaaaaaggaattcctgcaagctgctggtaatcgcatccttcaaggtagcttcggtgaccttttcattatttgaaaaagttgatttgatagtgcgataaacccgccgctgagcctggttgatcagttccccggattcacgcatgtagataaagccgcgagagagtaaatcaggaccggccagcaccgcttgtttttgcatattgatcgttgcaaccacaacgaccaaaccttcttcggataacatgcggcgatcgcgaatcacggcattaccgatatcaccgacaccgctaccgtcaatgtagacgtcaccagcagggaagtgtccggcaattcgcgcacttttttcggttaacgccagcacgtcgccattttccatgatgaagcagtttttctctggaaccccgcattgttgggcgagttcgcagtgaattttttgcatccggtattcgccgtggcaagccatgaagaatttcggcttaatcagacgaagcattaatttttgatcttcttgaccaccatgtccggacgtgtggacgttgttgaccttgccgtgaatcacttctgcgccggcttcgcttaactggttgatcacgtgattgacgctgaccgtattgccgggaatcgggttgctggagaagatcaccgtatctcctggttgaatactgatctgccggtgagttccgttggcaattcgacttaacgcagccataggttcaccttgcgagccagtacatagaatcattactttatcggctggcaatgaattcagttgatgtgcatccactaagacgtcatcgggaatattaaggtaacctaactcacggccattcaccattgccgtttccatagaccgtccgaaaaccgcaatcttgcggccatgtgccattgctgcatcggccgcttgagcaatccgtgaaatgttggaagcaaaagtggcaaaaatgatgcggccatcaatccggtcgaaaatatgccgaattgacttgccgacgaaacgctctgattttgtaaaagtcggaatttcagcattggtcgagtcagacatcaagaccaaaacgccttcttcggcgaaccggcacattttttggaaattcggtgatggctgatccccaaccggagtcaaatcaaacttgaagtccccggtttggatgacaattccttgtggcgtatgcaccgcaatcccgagcgtatccgggatactgtgggtggtacggaaaaattcgacacttagctttttaaacttcaaaaccgtgtcttcgttgatttcagttaactttgtggtccgtaataacccatgttcttcaagtttgccgcgaatcaacgctgccgctaatgggccggcatagatgggaacgttgggcacttgctggagaaaatagggaatcccgccgatatgatcttcgtggccgtgggtgatgaccaaagctttgatcttatctttgttttgaaccaaataggagtaatcggaaataacataatcaatcccaagtaaatcgtcttcggggaatttaatccctgcatcaatgacgatgatctcatcttggaattgaaccccgtacatgttcttcccgatttcacctaaaccgccgacagcaaagacggcggtttcgttatttttaatatttaatttcatatgattagaaagtggtcagcttgaaattggctgacttttcctcatactccaggaaatttccagaaagttcctgaataaattcaatattgtaaggcgtgttggcttctacaagcgcacgcgcctcaaccgcagatggcgcctcgaggtatagcgtctgagtggtttcccgtcgcggattttggatcttgtctttttgatataagactttgtagatcatgtttggactccttccgtggtacaaaaagaaaggaagtgcaacaaaacagcttccgaaaaaaaggacatgccatcaagatgacgaaccacaaaaagcatgggcgatcttgctggaatggccgatgtttcgtcgcttgaaccgcaaaatggcaacataacaccattgccgtggtccatttcctgccacaactcctaaaacttttatgaccgatcgatttgttgtgaatacaacagctaggcatagtttagcatatttaatggagcgtgaacagcttacgagcatcacagacgtgcctgctggcgaatcagctaattgtggcaagaaaagtttaacgtacttggtcgatacctcgatcatagctggacggccccgactaccagactttttagtaccgaggagctgcccttttaagtagcaatggtgagttaatcgttgaacttaggtataatgaagacaggtacgttcgcagaatcagcgtgaaaggggtggatgccatggtctggcttctgattgttgtactgcttgttgtgcttgccactctctggttattcagaaaacgttggcggcgaaacaaggcgattcagatcctgctctaccacagccaacgattaaccgatcaggcgatgacagaggctctacagcagcttggcatctcaactgacaagccgatgacgtcaaagcccatcgccgatatttgggggcatggggtgatggcattttcatatcaaatttcgtcaagtctggggaaagtcacccagccggcacttgatcaagctttacgccaagcagccagacagttagacattgccagctcagatccggcattgccaccgtttgttttaaccgatttttttgaactcgaaggcgaattacatattgatgttgcctttattactaacgaggcaactattgaatatgttcgcgacgttaatcgtgtgtcgtcataggcagataaggagctcgcgcgatatgaatgatgatcaagacttaatcatgcgtcaaatcaaaagctttgctcagggattaggcgctgctttgggcaaaaatcaacgcaaatcagaccaacccgtgatcgtttttcacgaagcagaagtgagtctggccagttatcaaaaaacgctcatgactgtgattcgtgaaaaagggttaatcgcggcccaagcacaattgaaaaagtggcaacagacaagattgtctgctcaccaatatcagcgtttaaatgcgtggattcaagaacagcagttaataaatcgtaatccggacaagtaaaaaagcagcgagccgttttataaggctcgctgcttcattgtttaatggatcagaaccgcttccggatcaatcgagaagggatgttccttgttaatgtggtcatagaataaaacgccattgaggtggtcgatttcatgttgacaaacaattgccggatagtttttgagtcggacttttttgtgttcgccggcttcgttttggtaagcaatcgtaatgcgatcggcacggacaacgtaacccggaacatctttatcaaccgagagacaaccttcgccttcagccaatgcggcatgttgcacactgttactaataatccgcggattaattaaaacttctttgaagagaatttcatcgttgtcaccaggaaccaagacagcggccattgctttactttgaccaacttgcggcgctgccaaaccaacacccggacgcaaatgatatttctcgttttgctcttcgtcttggctgataaccaagtatgccatcatatcatgcgccaattgcttatcttcatcggaaagcggaaaagtaaccggtttggccctttctcgcaaaaccttagcgccgtcacgggtgatatccttcattaaatacacgatccgtacctccgttcatttcttctattagattagcacaggagcgaaaatgtgaaaagcgcgttattgcagcaggagtcggagtgttgacatctaccacccaatcctctatcatatagaaggttcaacaaatacggtgctttccgttaggtgaggctcctatacgaacaatgctgctgctcagaaacatcgagagatgccaattgagtcaactgcgtctgcccattaaggcttacgctaatgcagctgaagctcgcttctaggcgtatagtgctaaaactaaacgattgggatgctttttctgcacgctctcaatcggcgtgcagtttttttgcttgatgggaagaaaaaaggtggtgagcataatggaacaatcttcaaagagtagtggtagtagtagcgatttagcagatcccggaaggcccattatgctgccactacgatctcttaagtgaaattaatggattcggcagcatcgcggctcttcccgggatacgggaaggagtttgtcgatgttgatgatggtatcaagcggtctgacacgctacgaagcgcagaaggcccaaaaaacaactaccatacgccaagaaacgatcagcaagacgaatctctttttgcccttgctgatgacattggctggtgtgagcagtttaattatggttatgagccacagctggtttttaactgctattgttgcgattttggctagtttgacggtgatggtcattgcttatttggcaaaagcaatcacgcgccatcaaggtcagccgcagcagccagtgttggtcgtgcgtgacggattggttcgtcaagttcgcgcgcaagatctcgttgttggtgatgttttaatgctgacagcaggagaaaagctgccggttgatgttgcattagctcctggtgcatccgtaaccttgccacgtgacctggccgggctgctgattttgttaaatcggcgggtgccaaccggggtgggtattgccggtgctgtgatggcaaccgatacccaggcaacagtgaccgcagttttaaatgacggattgcttgatcatggactcaagcaattggctggacaatctgttacaacaacgccaacttcacttgtaacgagtgcggttgccggcctgaaattggtcttacaacagatttgccgaattttccgtctggctgtatcagttgcgtcacttgaaatgttaaaaaataagcaaatagaccgagacgagcagattcgggtagagatcgcatttgctcatcacgctaccttggttggggccatgaaacatcacagtaaaactagtgattttcggcacaaccaagatccagtctcgtgaagcttggtcattaaattcaattatgaaagcatgcgcttgtgaaggcgcatgctttctttgtgttttagtttaaaaagtattctgttatagtccattaagctttcggataagcggcaatcttatcgcaagtcagttcttgctcaccttgaaataaaacgcttgcaacaagaattttgcaatgttacgctttctttgtaggagttttaattagtacagttttcctgagttaatgactacaggaatggaaagaggttctgattatggcaaaacagcatgctgcagttgattttaagcaactgttggacaatcaagatgccgattttaagcccacgatccaaattctggatgaagttggcaaagtcgtcaatcctgatattatgcccgatttgagtgatgatcagctggtcgatttgatgtcaaaaatggtttggcaacgcgtgctggatcaaagggcgacagcgttgaatcggcagggacgattaggtttttatgccccaagtgcaggcgaagaggccagcatgattggtagtcacgctgctatgaagtcatcagattggctgcttccagcttaccgtgatttaccgcaattgattcaacatgggttaccgcttgacaaagcttttctctggtcgcgcggtcatgttgccggcaatgagtatccggaagattttcacgcattaccgccgcaaatcattattggtgcgcagtatgttcaaactgcgggtgttgcgctcggtttgaagaaaaatggcagtgatgaggtggccttcacctatacgggtgatggcggtacttcacaaggtgacttttatgaaggcgttaactttgctgggcatttcaaagctccggcactgtttattgttcaggataacggctttgctatttccgtgccgcgggcgagtcagacggcagccaaaacgcttgcgcaaaaggcggttgcagccggtgttcccggcgtgcaggttgacgggatggacgctttagcagtctatgaagtcaccaaggaagcccgtgcatgggcggcggctggtaatggtccggttttgattgaaactttgacatatcggtatggcccacacacgctatcaggtgatgacccaactcgttatcgctccaaagaaaccgatgagttatggcaaaaacgggatcctttaattcgaatgcgcaactatttgaccgataaaggcttgtggagcaaagacaaagaagatgccttgattgaaaaggtcaaggatgaaattaaagatgctatcaataaggccgataaagcgccgcagcagacggtatcgcgcttcttgaaagacacctatgaagtcgccccgcaaaatgttgctgaacaactggcagaatttcaaggaaaggagtcgaagtaaccatggcacaaaaaacaatgatccaagccattaccgatgcgcttgatgttgagttggcgaacgaccctaagaccttggtattcggcgaagatgttggtaagaatggcggggttttccgggcaaccgatggcttacaggccaaacacggtgaggatcgtgttttcgatacaccattggcagaatcaggcattagcggtttggcaattggacttgccttgactggttggcggccaattccggaaattcagttctttggtttcgtttttgaaacgatggatagcattggcgggcaaatgtcacgtatgcgctatcggatgggcggaacacggtccatgccgattacgattcgggcaccgtttggcggtggcgtccatacaccggaaatgcatagtgataattttgaaggattgatcgctcaatttcctggtatgcgggttgttattccaagtaatccatatgacgccaaggggttactgatcagttcgattcgcagtaacgatccggttttgttcctggaacacatgaaactttatcgttcattccggcaagatgttccggatggcacttacacggttccactggataaagcagccgttacccgcgaaggcacagatgtttcgattatcacttatggtgcgatggttcgcgaagcacttaaggcagctgataatctggcgaaagacggcatcaacgctgagattgtggatttacggacgattgcaccgcttgacgtcgagacgatcattgcttccgtcaaaaagacacacaaagcggttgtggttcaggaagcgcagcggatggccggcgttgcttctaatgtgatcagtgaaatttctgagcgggccattttatcgcttgaggcaccgattggtcgggtcgcggctccagataccccattcccatttggccaagcggagaatatctggttaccaaatgctaaggatatcgaagctaaagttcgggaaactgtcaatttctagagagaagaggtgccaacatggcttttgaattcaaactgccagaacttggcgaaggtttggcagaaggcgagatcgtcaagtgggacgtgaagccaggcgatgacatcaaggaggatgacaccctgcttgaagttcaaagtgataaaagtgtcgaggaaattccttcaccggtttcaggaaaaattttgaagattttagtaccagaaggtgaaaccgcttcagtcggtgatttactggttgaaattgatgatggctccggtccggccgcacaacctgcagccgcacctgccgcggcaaccgatgcttcagcaggcaatgcgccagttgctaagtcggtctatcaatttaaattgccagaacttggtgaaggtctggcggaaggtgaaattgtcaagtgggcggttaaacccggtgaccagatcaaagaagacgatacactgcttgaggttcaaagcgataaaagcgttgaagagattccatcaccagttgccggaaccgttgttaaaattttagtaccagaaggcgaaaccgcaactgttggcgaagcgctggttgatattgacgcaccggggcataatgatacgccggttgcatcgggtaccgctgcagcgccccaagccaatacggatacggctgcctcggccgcggcaccagctgctgccggatcagtaccggccatcaccgatccaaatcgggaaattctggcgatgccgtctgttcgccaatatgcacgcgaacaaggcattgatatttcacaagtgccagcaactgggaagcatgggcgcattaccaaagccgatatcgatgcctttaaagcaggggcaccagctgcagcacctgcgcagccagcagcaacctccgcgcctaaagcagcgcaaccagctccagcagcaacaccggcagcgccaaaaccgcagccagtcgcgccttacgtttcaaccggcagtgaagccgagctggagactcgcgagaagatgacgccaacgcgcaaggcaattgccaaggcaatgttagcttcgaaacaacgaagcccgcatgtcacgagctttgacgaggttgaagtgtccaagttaatggcgcatcggaagaagtacaagcagtacgcggctgataaaggcattaaattaacgttcttgccatacatcgttaaagctttggtcacggtattgcgtgaatatccagaatttaatgcgtcaattgacgacaccaccgatgagattgtttacaaacattactttaatatcgggattgccacgaacacggatcatgggttatacgtgccggtcatcaagaatgctgatgccaagagcatgttcgaaattgccaaggaaatcagtgacaatgcacaaaaggcatatgacagcaagttgaagccagatgagatgcgcggcggttccatgaccattagtaacgttggttcaattggtggtggctggttcacaccggtgatcaatcagccggaagttgccatccttggtgtcggtaaaattgctaaagagccatatgtcaacgctgataatgaaattgttgtcggtaacctgttgaagttgagcttgagttatgatcatcgcttgattgatggtgctttggcgcaaaccgcattgaatctcatggataaattgttagcagaccctgatctgctgttgatggagggataagcatggttgtaggcgattttgcaatcgatttggacaccgttgtgattggctctggcccaggtggttacgtagctgcgatccgagcagccgaaatgggtcaaaaggtaactgttatcgagaataccttcattggcggggtttgtttgaatgttggctgtattccatcaaaagctttgatcaatgccggtcaccgttatcaagatgccttggaagcaagcacgtttggtattaatgccaagggtgcggatcttgatttcaaaaaaacccaggattggaagcaaaacaaggttgtacacacgttaaccagcggtgttgcgatgcttttaaaaaagcacaaaatcgaaaccattatggggacggctttcttgaaagatgatcatagtctgcgggttatgcaaaaagactcggctcagacatacaccttcaagaatttgatcattgcaaccggaagccggccaattgaaatcaaaggcttcaaatttggcaaacggattttggattcaaccggtggcctaaacttaccggaagtaccaaaagaattcgtggtgattggcggtggctacatcggatccgaactggcgagcgcctatgctaacctaggcgcacatgtcacaattcttgaaggcaccagctcaattttgccaaactttgaaaaggatatggttcaactcgtcttgaactcctttaaaaagcgcggcgttacagtgattaccaacgcgatggcgaaggaagccgaagataccggcaatggcgtcaaggtaacctatacagcggacggtaaagaacaaaccattgccgcagattatgtgatggtcacagtcgggcggcggccaaataccgatgatttgggcttagacattgttggcattgaaacaacggatcgcggcttgatcaaagtcgatgcgcaaggacgaaccaataagcctaatatttatgcaatcggtgacattgttcctggtgctgcattagcgcataaagcaagttatgaaggtaagatagcggcagaggcgatcagtggcaaggcaagcgcggttgactataaagcaatgccggcggtttgtttcacggatccggaactggccacaaccggcatgacgcttgctgaggcaaaggataaaggcatcaaagctaaagcaagcaagtttccatttgcggcgaatggccgtgctttaagtttggcgcaaaccgagggcttcgttcgtctggttacggatgaaaacggaaccgtcatcggtggtcaagttgctggcgccggtgccagtgatttgatctcagaattgacggtcgccgttgaaggtggactcaacgctgaagatttggcgttgaccatccatccacatccgaccttaagtgaaaccattatggatgatgctgaagttgcattagggttgccaattaatatctagcaagtagattcatattgccaacatgatgcactgttaaggtgggtatcgacaactgattgtctgtgcccacttttttgatgggaaagcacaaagtcaaaagccgaaagtgcgagtgtaaggacttcatgaaaaaggactaatatttcagttagttaacaattgcaaaaataaccctgtttaattttgtcttaagattgcgcttccgctaaaatgtagataacgcagctgagaggaagggttttcatgcaaagagtcgtggtacatggtgccagcacggggacacaagggcttttacaaatgctgattatgtcattgcttgatttgcaagtcggctgttatgaacctgatgaaacattggttgacgtagccgggttgacggccttgagtcaaatttgtcacaatacatttgtgaaggtgacgcccaaagttctaaaggcagccgatgttttgattctgactgacacagggacgccagcagatgaggggtttgtagccactaatattacggccattcggaaagtgctaaattcggcaatggcagcagggtttaaggggcggattatcgttgccatgacccatgacgagcttttcacctatttcgctcaacgattttccggcttgaataagcgtcaggttgtcggtttaggtacttttggtgcaacctggcaatttgaacaatttctagcagagcggttggcggttcccgccgctcaagtgactgcctatgtggtcggaaccagtcagacgccggttctggtttggagccgagcctatgtaggcgccacgccggtgttgcgcctactggatgaccagacaattttttccgaggctgtgaaggcggttcagactttcttagccagtacgttgaccgtgatgcttggcaagttggttgaaccgatcctagctgcttttgccggtgatggggtgataggcacttttacccacttacgcgatgccgatgatggtacaggacagattagcagttcgccggttttattggatgaacgcggggtggtgacgttggcgatggtggcaggttccgatgatgaagaagctgccttaagccaagcgattcaagcagcccagacccagattgaagcgatcgaacaaggagcaaataagaatgaaagctaactatcattatcccttagatctcgattggaccacggcagaaaagattaaagtgaccaccttttatgcgttggtcgaggatgcttatgagcatggggttgatcgggataacctacttgctgcctataagggtttcaagcaggtcgtaccggataaaggaaccgagcgtcaactggggcgtgaatttgaaacactctctggttactcgatgtacacggtcgtacaaatggcacgccaaggtgtgagtcaaaagattagggtgagggtgagttaaacatgacacaagatccagaaaagatacgtgagacattgatcggttggtttgctgccagccggaaacgcattttgacagcaatggcacagccacttgatgttgcccaaaaaagcaatcgcaatgacctagtcaccaatgtcgataaagccaatcagcaatttttgattgaacatatcaagaccgattttccaacggcgcgaatcattggcgaggaaggtcacggccatgatgatacggatcttaatgggttggtcttttttgtcgatccaattgatggcaccatgaattttgttaaacagcaggcacattttgcggtgatgatcggtgtctatcgtgacgggcaaccgattgtcggggctattatggatgtgatgcgcaatgaagtgttgagtggcggtccgaatctaccagtcacgtttgccggacgtcagttgaagccattaccggatctgccactgaaggacggtttgttgggagtggcagggcccatggctatcaagaatcgcttgcatttaggtgatgtggccttagctagttccggtgcgcggatgagtggtagtgccgggatggaatttattgaagtcgccttaggaaggcaagtcggctatgtttcctatctgcagccttgggatgttgcagcaggcatggcgattacgcaaggcttgggcgtcgagtttagtcgggaagacggttcggcaatcaacttaagtcagccaggcgttgtcgtggcagcgaccccgcaagcacatcaaacgattctagccatgatggccggtaaaagtgaacaggcgcattaacgccgctcattaacgagcaacctcaaaaactggcggagacgattcccgtcagttttttgaatgtatggcctagatgcacggatttcaaagaaaattccatcaaatcattcgcgtgaatcacttcacttttcagaaaactcacacagattgggtagaatgtgttataattcaaaatcgtataactgtgtcagttgctggcacttttttaatgcggtaagcggccagtagtgccagcagaaaggaagtataaacgtgaaaacacgtgacgatattcgcaacattgcgatcattgcccacgttgaccatggtaagacaactttggttaacgagatgcttaaacaatcggatacacttgatcaacacattcaattacaagaccgggcgatggataccaacgccattgaaaaggaacgcggtattaccatccttagtaaaaatacggcggtgaaatacggcgacaccaccatcaacatcctcgataccccggggcatgctgactttggtggtgaagtagaacgggttatgaagatggttgacggcgttttgctcgttgtcgatgcattcgaaggcccaatgccacaaactcgctttgttttgaagaaggcgcttgaacaacatttaacaccaattgtggttatcaataaagttgaccgtcccggtgcgcgtcctgaagaagtggtcgatgaagtgctcgaattgttcattgaattgggtgccgatgatgcgcaattggaatttccagtagtctatgcttcagcggttaacgggacttccagtatggattccgacttatcaacccaaaagcacacgatgaatccgctttttgagaccatcatcaagacgattccagcgccaatcgataacagtgacgaaccattgcagtttcaggtggccatgttggattacaacgattatgttggccggatcgggattggccggattttccggggcaagatcaagatcggtgacaatgtaacggttatgaaacttgacgggtcacaaaagaacttccgggttaccaagctctttggtttcttcggattaacgcggaccgaaatcaattctgctaaagccggtgacttgattgccgtttcagggatggatgatatctttgtcggcgaaaccgtgaccgctgccgatacgccagaggctttgccgattttacggattgacgaaccgactttgcagatgatgtttgtggctaatgacagcccttttgccggtcgtgaaggtaagaacgtaacggcgcggaaactagaggaacggttgaaggcacagctgcaaaccgatgtctcgttgcgtgttgacgatacggatcaagccggtgcctggatggtatccggtcgtggtgaactccatctttccatcttggttgaagagatgcggcgtgaaggctttgaattacagcttggccggccagaagttatctatcgcgatattgatggcgtgacgatggaaccgtttgaaacggtgcagatcgatactcctgagcaatacaccggtacggttattgacgctatgagccaacgcaaaggcgaaatgcagaatatggaaaatgaaggcaacggtcaaacgcggctcactttccttgccccatcccgtggtttaatcggttattccaccgaattcctttcttctacaggcggttatggcatcatgaaccatacgtttgaaaagtatgcgccagtgatcaagaactgggaaccgggtcgtactcaaggcgcgttggtatctatcaatgccggcactgcgactacctacagtctgcaatccgttgaagatcgcggccaactcttcatcaatgctggcacggaagtttacgaaggcatgattgtcggtcaaaactctcgtgaaaacgacattgctgttaacgttactaagggtaagaacctgacgaacacccgtgctgccgggaaggaccatgcagctgccatcaagacgccaaagaagatgacgcttgaagaatcgatcgagttcttaaacgatgatgaatattgcgaagtaacccctgaaaacattcgcctacgtaaaaagattctaaacaccggcgaacgtcaaaaggctgcaaagcgtaagaagattgctgcttctaaataatttttcagaaaaccgtcaaattctggcggtttttttgatctccaaaaccaatatttcagcatcggcatcttttgaccatcgtgggtagcggctttcatggcaggcaaagggcaggaccaatcacggtgcgtatttctgactaagacaaactaaacttcctgataacgattgcctgtgcggcttggcggtacgagccggtatgctataattaatccaatcattgcttgaaaggccgcgttttcctaatgaaaaaaatacgccatatggattatttcatcttggtgccgtatctgattttgtgtgcgattggaatcgtcatggtttattctgccagcgcctattgggtacaacgtcaatatggcgccgccgaaactaaatacttagttcagcagattctttttgtgattcttggcatcggaacggtattcttcttttataagatgtcactcaagattttacgtaatcgctgggtgctttttattttgatgagtaccttgctggtgttgttggtttatttgatcctgcatggtcgtgcggtcaatggggcatcggcctggattacgattggcggttttcgattacagccatccgagtttgccaaaatgattttgattttttatttagcgcatatgttgtcatcgcgtgaaaacagtttccagcaagaaaatttccggttacaccaaatgtggcagccgctgtttatggccggcgtcatcatgtttttggttttcattgagccggacactggcggatttgcgattctcttcttgattaccttggtcgttgtgatgtccagcgggattcccatgcgctatggactgctctgggtgttggggttgattgcaaccggcgtcttagggtactacattgtgtcgcattaccattttgccggtcttgaaaataactatgcctaccagcgattggtagcggcaattcacccgtttgagaaagccaatgctgcgggtaatcaggtggtcaattctctttacgcgatcaatcatggcggctggttcggagtcggcttgggaatgagcagccaaaagctgggctatctgccggagccatatactgacttcattttggcagtgattgccgaagagctcggattggttggaaccgtggtcatcttaagcttattatttttcttagtgatgcggtttttcttaatcggggttcggtctaaaaatacgtatcacacgctgattgcttatggcattgcgacgatgatgctggtgcaaaccattttcaacgtgggtgcagtggcaggcgttatccccgtgaccggtgtgacattgccatttattagttacggcggatcgagtatgatcgtcttatccatggcagtggggattatgcttaatattagttatcacagcgaacgtacgcaacgaaaggtagagaagacgcatgcataaagttttagtcgcaaatcggggcgaaattgctattcggattttccgtgcctgtgaagaactgggcctaaaaaccgtgggcatttatgccaaagaagatgctttgtcgattcatcgttttaaggcacaggaaagttatcaggtgggagtaggtaaggcgccgatcgctgcgtatttggatatggatgacattatccggatcgctaagcaaagcggggcggatacgatccatcccggttatggtttgctttcggaaaatgctacctttgcgcgtaaagtacgtgcggccgggctgacgtttgttggaccgcgcttggaactattggatgtgtttggcgataaggtagcggctaaggaagctgcccacaaggctggtttaacgaccattccgggaacaccggagccaacgcgtgattttaccgaaattcaggattttacggctaagcacggcttcccggttatgttaaaagcggcaagcggcggcggtggtaaaggcatgcggatcgtgcattccgaagccgaattagaagccgtttaccaaaatgcggtcaatgaagctaaagcgagttttggcgatgatcggatgtatgttgaaaaatatattgcgtccgccaaacacgttgaggtacaagtcctgggcgacgaacatgggcatttgctgcatctttttgaacgtgattgttcggttcagcgccggcagcaaaaagttgttgaaattgctcctgctgtggctttgccgttagcattaagaaaccgtatctgtcaaagcgccgttgatttgatggctagtctgcattatgaaaatgctggcaccgtcgaatttttggtcgatggcgatcagtattactttattgaagtcaacccacgtgttcaggtggaacataccatcacggaactgattaccggggtcgatattgttcagtcccaattgcgcattgctgccggagccgatttatttgcggacttgcacttaccgcagcaagatgcgttacgggaaaatggggcggctattcaatgtcgcattacgactgaagatccagaaaataacttcatgcctgacaccggcacgattaatacttatcggtcaccaggcggctttggcatccggcttgatgttggtaatgcctatgcgggtgccgttgtcagtccatattttgattcgttattggttaaggcaagtgtccacgcacctagttttcctgctgccgtggctaagatgcagcgcgcgttacatgagtttcaaattaccggcgtcaagaccaacgtcgcctttttggaacacttactggcaactcagacattccggaccggtgaggcagaaacggcctttattgatgcgcatccggaattgttgcaagtgcaggcgaaaccagatgttgcttcccggttgctttggtatatcagcgatgtaaccgtcaacggctttaaaggggttgaacggcaaagtcaaaagtactatccggagttgcaatatgcacgccatttttctgctgctaaaccgcagacggatttggtggctctacttaaaaatgaaggtgcccaggcggttacggattgggtaaaggctcatccagcgctgcttttaaccgatacgactttccgcgatgcccatcaaagtctgtttgcaacgcgaatgcggacccgggatatgttaacggtcgccgaggatatgggaaacggcttgcctaatcttttctcaatggaagtttggggcggtgcgacttttgatgtagcttaccgctttttaaatgaggatccgtgggtgcgcttgaagaagttgcgagctgctttaccgcataccttgttacaaatgctttttcggggtagcaacgcggtcggttatcaaaattatcctgacaatgttattaaggccttcattaaccaggcagcaaatgacggtgtggatgtttttcggatctttgatagtttgaattggttgccgcagatgaccttgagtattgatacggttaagcaggctggcaagattgccgaagcgaccatgtgttataccggggatattttaagtgacgcccatccgaaatatcagttggcatactatgtcgacttagctaagcagttagttgatgccggggcggacatgattgccattaaagacatggcgggactgctcaagccacaagctgcgactgaattgatcgcggcacttaaggatgcggtgacggttccgatccatttgcatacgcacgatacaaccggtaatgggattgcaacttatctggctgctaccaatgccggcgtggatattgtggatgtggcgcaaagcagcttttccgggaccaccagtcagccgagtctggaaagcctgtattacgcgttgagtggcaatcaacgtcagccggaagtcgcgatcgaaaaggcgcaatcgttgaatcgatattttcaggcgattcgtccgtattatgcggacttcagtaatggggtgaccggtccgttaaccgatatttacactgtccagatgccaggcggtcaatatagcaatttacaacaacaagcacacagcatgggcattacggattttgaggcagttaaagccatgtatgcgcaagtcaatacgctgtttggtgacattatcaaggtgacgccttcgtcaaaagtcgttggggatatggcattgtttatgttacaaaatcatttgaccccgcaagacgttaaggaacacggagaacaatacgactttcctgcttcagtcgtggcctttttcaagggtgacttagggcagccggtcggtggttttcctaagaccttacagaaaaagattctaaaaggacaaaagccgttaaccgtgcgtcccggacaattagccaagccggttgactttgaggcggtacgacaggatttaatcgcggcaggtgtgccggatccaagtaccgaagatattttaagtgccgttttgtaccccgatgttttcaaggcctatgcgcgcaagcaaaagcaaatcgggccggtgaccaaattggattcaccttcctattttcaaggtatgcgcctaggtgaaacggtggcggtcccaattcgggccggcaagacgttgattattcaactgaatgccattggcaaagcggacgccagcggaatgaagacgttgtactttaccgttgatgggcagaaacaggaaattcagatccgcgacgctcatcaaaagagtgctggcttgcagcatcagttggccgaaccaaccgataagaatcaaattggtgcgccgatggctggaaaaattgtttcggttgccattaagcaaggacagcatgtggccaaaggtgaggctttgtttgttattgaagcgatgaaaatggaaacaacggtacacgcaccattttccggaacagtgacccatctgtatgttgaagcaggtgcattaatcaagagtcaggaactgttggctaaactgcaacccggggccgccaagcagtgagtttagaaggtgagaacatgtttgcaatgaaacagcggcaaggtttagtcgtttgggtctattcacttaagcaattaaagaccttgcgccgttatggcaccattatgtacgtttcgcggcggttaaaatacgtttatttatatctggatcgggatgaaattgcagcaacgagtcacaagcttataaaattgcggttcgttaaacgcgttgaaccgtcacatcggcctgagttgaaaacagagttcggtgatgaaattggcaaattcaagccgactgaggaagatttggaaaccaaggcgaaaccccaacgacacgcccgacttttaaccggcgaggcaaaaggtgatcaacatgcgcgtcattagcggtacatttcgggggttacgtttaaatgcggtaccgggtaatcaaacgcggccaaccgccgataaggtaaaggaatcaatgtttaacatgcttggcccttattttgatggtgggcatgcactggatttgtatgctggcaccggagcgcttggcatcgaggccgtatcacgggggttgacggatgcagttttggtggatcggcaatatgcagcgatcaaaaccattcacaccaatgttgccctgactaaacaggcagagcgctttacggttttgaaaatgtccgtgacgaaagcgattagccattttgcggccaatcaccagcagtttgagcttattttgatggatccgccgtatgcccagcagcatgttttagcacaattagctgcgtttgtcagccaacaattagtggtgccaggcgggcgggtgttagttgaaaccggcttggatgttgattatcctgaggtcatccccggatataccaaaatacggcgtcagacctatggcgttgcgcaggtgcttattttagagcgaaacgaggaagaccatgactaagaaaattgcagtatttcccggcagctttgacccgtttacaaatggccatttagacacggtattacgtgccagtcgcttatttgatgaggtggttgttgcggcgatgacgaacaccagtaaacgcgcgctgttttccagtgatgaaaaactcgcgctgatcgaggccagtactgctgatatagcgaatgttaaggcagttgcggcccctagacggttgacagttgaatttgcccgttcaattggcgcacggtttatcatccgcggcatccgcaatgttgccgattttggttacgaagctgatattgccacggttaatcatgatttggatcaggaaatcgaaaccgtctttttgctagcagacaaacagtacgatgccttgtctagtacgattattaaggaggtcgcggcgtttgggggcgacatccatcgattcgtaccggcaccggttgaaaaggccttatatgcgaaactaggtgagtctcatcaagcaaagtaatcatttgaagtccaaaaaacgttggcggtggctagttggcgcgattattgccatcgtcttgatcgccgcgtttttattctttcccaccaattattatttggaagtacccggttcagccgaatccttaaaaccgtttgtcaaagtcgccggcaccaaagataaagccaagggaagctacatgctgacgacggtcggtgttgtgggtccggcttcccctgcgttattacttttcagcaaaacccaggcgcataccgagattgtgtccaagcaggatttaatgggtagtgacagcagtgccgaatacgatcagttgcagacttactatatgaaaagtgcggccaataacgcggtagcagctgcgtttaaagccgcaaaacaaccggtcaaaaccgagcatcgcggtatctatgtgatgtccgtgttgccacaatcaccatttaaaggcaaactagccctcggagacacgatcacaaaattgaatggtaagtcttatcaaacggcggatgcgtatgtcaatgccatcaagtcaaaaaaagttggtacgaatatcacgttaacctaccaacataagggccaaacgaagcaggcaaccgctaaactaattcgtctaccgcagaccaaacgagcgggtattggcattactttaactgagaatacggcggtgaccagtgatcctaaagtgacgattgatgcgggaaacatcggtggtcctagtgccggcaccatgtttgctttgcagatttatacgcaaatcacccaccaggatttacgtcggggtcgaatcatcgcggggaccggtacgattgatccagatggtcatgtcggtcagattggcgggattgataagaaagttgttgccgcagatgcaaaaggtgccaagattttctttgccccgaatcaaccggccacaaaaaagttgaagcattacgatcctaattatgtcaataactacgccgaggcggtccagaccgcaaagcaaatcaagaccaaaatgaaaatcgtgccagtcaaaacgctcggtgacgtcattcgttatatgaaagcttatgccaaagctgaccagtaagtggttagtggttgtaataagttcaatttaaagaagaactgttgaaaaaacagttctttttgtttgccatgcgtaatgtgttgttgaggtgagaaaaatggcgacactgatttattggctgaaaacatattggtatgcacccttgattattttaatcggcggtttctttttttggcagcaggcgaaggcaggatcggcaaatcagcctttgtcggtgagtgtgaattcccatagtagttcgcacatggcggcgtcacgatctagtaaggcaacaagcatgagtggcagtcatcgtccgagccacggtttcgtgcatttaaaaggcgcaatacaacatcctggcatttatccggtcaaagaaaacacgcgctgggatgaagtggttaaagctgccggcgggttgacggcagcggctgatatgcaacaagtcaatctagccaagatcgccagtgatcaggaaagcctgtatgtcccggaaaaaggcgaaacgtcaactgcaacggcaccaactaccacggcaggtggcacttctgctactgggaagcccacccagactgccagtggtgccgttgttgatcttaataaagcggatgtggcgcaactgacgaccatcagtgggattggccccaaaaaggctgcggatattattagctatcgcgacagtcatggtgggttcaaggatattaacgaactcaaagaagttcatggtatcggggataagacttttgaaaccctggcgccgcagctaaccgtgggcccatgagcgggcggttaatcttacttgcggctgctttacttgccggcatcatgggcggtatcggtttgtggtgggtgctggctatcttgcttatttggcttgtcatgaaaaccaatcgaaccagtttcgtttatgttggcctttttttagtcatcggctgggggtgcggaagggcagatgccaatcaatggcagaatccgccgcaaccccgtggtagtgtgaccatcccggcgtcagccattaagctcaaagacgggtatgtcagctttatcggtcgggctgccaacgggattgccgtcagtggtcgtggttcggtctcaaaggaacttgcggaacggttggctagtaatgatcagccggtacaattggccggtggttatgaagtagcacgtttggcacctgcacgtaatcagtttgaatttgattatgcaacttatgcgtggcaaagccggcagcttgcctatgaattagtcaaaccgactttgaacttttcttttcaaccacgaagacaattttttgatgtcgttgatagttggcgcgtccatctgtttgcttatttcgaacaattaccgaacaaggtacgccaatatgccaaagggttgcttttagggcaattggatgatgattttttaacgcaacgccaagcatttgttgatttaggcgtctttcatctgttttcgatttccggattgcatctgttcgccttggttgcctcgctttattggttggcagcaaggttacggataccgcaaggattagtcgatggcctgctattgggattgttgccactatttttattattgctgccattaggtgcgggcttgtggcgggcggtatggatgcggttagctgatattattaatcggtatcttcggtttggcttaaccgggctggatctgtttagcatggtgttgatggtcaacttgctctggcaaccgcgtgtcttgatgaccatgggcgggcaattgacgtacttgatgactgggttgctcattggtttaccggcgctgcataagtggcaggtgaattggcggttagtattaggcggcatgcctgtcattgcctggcatacgttcagctttaatcttttgacggtattcttcaattggcttctcatgccgatttttgaactgatcatcataccggggttggtatttgccttattgatgccgcatgcagggttaacgtatttgtttaacgatgcattgcaattattagagaccatcctcattcggttgagtcacttgcctgggcagattattattggtgcgtttcccagctggttggctgtgcttggggtttttgctatgatgctggttttgacgtggcaatgttggcccgtagcagttggctggtttgttgtacttgccttgtggagttggtatcagccgaattatcgggtggtgatgtttgatgtggggcaaggcgatgcgattttgatcgaatccccgtttcatcaaggggttatgttgattgacacgggtggccgcatattcggcaaaaccagccatcctcctgttagccgcgcgattgtcccgtatttgcatgcacgcggttatgcccgcttgaatacgctggttttaacccatcctgatatggatcacgttggcgatgcacctaaacttgctgagttgataccgattgagcggctagtaaccaccccaaccgcgcagcatcatcctatgattaaaaaagttagccagcgggttgccgcaacgcaaacagtcacagcggatcaatggctgcaggtcgggccacttcgattacaggtacttgcgccaagtgccacgggccatcacgacccccaggatacaaacgcggattccattgttctctatggtaaaataggtaacagtcgctggttatttactggggatgctgaccaaaccgttgaaaaaacgcaaattctgccgcggcatttgcaagtcgactatttaaaggcaggacaccatggttcaaaaaccgccagtgcaccggcgttaatttcgagtttacagttaaaagccgctttaatttccgctggtgtcgataatcgatatggtcatccgcatccagaaacattggcaacgtttgctaatgcccatgttccgtggtcaagtaccagtgaacaagggatgctttgggtggaaccaaacccgcaacgtcaacaggatcagctatttggctggttgcagaaaaggagcagacaatcgcatgcaggtccgtgattttatcaaacatctgaaaaatggcgaacgaccgccgctgacattaattcttggcgaggagcaggctttacggcaacaggctcaacaagcgctggctaatttgattcctgaagaccaaaaagccatgaattttggccgttatgacatgcatcaaactccagtgggcgttgccttggatgatgcgacttcaattccttttttcggcgaataccgcgaagttgtgattgacgatccttactttttaaccggcgaaaaaagtaccgataagattgaacatgatctcaccggactgcaggcttattttgacaatccggttccgtcaacgatgatggtgttaatcgcaccatataaaaaacttgatgaacgtaaacggctgacgaaagctttgaagaaggcagctttgattgttgatgctgcgccactggatgaacggtcagcgcgaatggcattggcacaaatcttcaagcaacatcaagtcgatattcagccaccagcactcgatgcgcttgttcagcgaacgaacggacagtattcggtcatgatgggcgaagtccggaaacttctgacgtatgcaagtgatggtagtccattaactgttgctgcggtatcggcattggtccccaagcagcttaatgaccgggtttttgatctggtaacggatgtgttgcgtcaaaatgctgcggatgctttggcactttatcgtgatctgcttgcacaacgcgaagaaccgattcggctcaatgcgttaatgctaggccaatttcgacttttaattcaggttaagttattagcgcaaaaaggttacggccaaggtgatattgccgctacgctcaaggcccatccgtaccgagtcaaattagcattacggcaggttggtcgtttgccttatcaccaactggcccaggcttatagtgggctggtggatactgaaaccgcgatgaagacgggaacgattgataaggcactggcctttgaactgttcatgctgaagtacacaggtcaagcgtcagcgcatcggaaggggaagtatacggcttcacgctcctaaaactgagatggtcaatgatgcgcgggtgtgcctaaccgatgacaacaaaaaataacccttgtggacgaaatatcgtcacacaagggttattaaagttggcataacgccttgattacttgttaagtagggctgcaagacggctcttgtcgcgaccggccttgttcttcttgatcaggcctttgctgttagccatgtcgatggcacgaattgccgctttataaagatcctgactgttgtcagcattttgttcgcttgcactcttgaacttcttaacagcggtacgcattgcgttcagctgggcaatgttacgttcacgggcattttcctgcgtcttaacgcgtttgattgcagatttgatttgtggcatgagatgttcacctccaacagtggattatgataaaactgcataagtttcaacagacgctattatacagaagccagagcggcaatgcaataaaaagttgtaaaggaaaattgcttgatagctaaaattacttgcaatcagtggcagacttcggtaaagtatgaaggtacttttgaacctgatacttagtttagcgaaccaccgacgctttactcagtttcaggcaatattctgaaaggtggtacaacacaatggcaattgaccaaacgcaaaagaacgaaattatcaagcaatacgcacgacacgatggtgacactggttcaccggaagttcagatcgcagttttaactgctgaaatcctggctttgaacgaccatttatccgttcacaagaaggatcatcacagttatgtcggtctgatgaagaagatcggccaccgtcgtaatctgcttgcctatctgcgcaataaagacatcattcgctaccgtgacttaatcaagtcattaggtctgcgtcgttaatcacgtttaacaaaggtcgccgcggcggcctttttgcgtgtttttatattaatagcgggcatcagctagtggtaaaaggccaaaaagacagttccaacttacaggagggatcagctaatgtatccggaatatcggcagcgttatcaggatcagctagtacgcgtcaccattttaagcgtaacgacaacgattgcgtgggcgatcggcacgattggctcacagtgggcagttgccggtgtgagccctcgtgatgaaaagcaggccgcttcggaacaagttgatccggtactcgtcgaattggtccgcgttatcgcaggtcgcttagtcgacaaaaatttagcgacgacctcattgccggaatcattgctgccaatggtgacggcactgaccgagcatcactggctgaagccggattcggaatctgcgttaaagttgattccaaagccggcaggggcaccgctgaacttctggtcattgcgcaaggcggttttcttgacggttccccagcaaaaagttcgaccagctgatttgcatgagtggcttcggaatattttgccgaatgtccatgggttaggatacgggccggtgacagatctggctgccttagctgttttagcgctggataccagtcaccaccttgctgctggcagttcacctgaagtagcggtggtgctggataacggaaaagaagttgctgcgtatcatctggatgccgctcaaacaagcgataccgggtatcaaagtgcacttcaggcggctaaacaaaacctgaaaaccgtgcatcgcttttttgcaaacgaggtgtaactgcgcctccgcgttttaaggtgatatggtagttggaattttaattgtctgatagagcatgttgagctaacgttgtcgtttggatattaagtccacgttctccgtccagtgaccattttcaggggcattggatggatttttttatagcattcaacgccaaccatttgccgcctgaaattcggctctataggttttcgccttatcgtgtggtacacttgtatcagaatttattcggcggaggtatgcggcaatcgattgtcggcaaccatacttccataaattaaccacgaggtgaaaccatgacgaagatcaatctggtcgctcttggtggggtacgtgagaatggaaaaaacatgtacgccgtcgaagttgacgaccaaatttttgtatgcgattttgggttgaaataccctgataatgaattacttgggattgatgttgtgatcccggactttagctatttgactgaaaatgccgaccgaattgccggaatctttctaagtcacggccatgcggatgcagtaggagccttgccttattttcttgtggatcatccagttccggtttttggctcggaattgacgattgcaatggccaaggtcttcatgcagcatgacagcaaagccaagaggtttaaagactttcatgttattgatgaaaagtcggtcattgactttggtgatgtgtcagtgtcgttctttaaaacaacgcatagcattccaggctcgttaggtatcgatattgaaaccagcgaaggccagatcgtgtataccggcgactttaagttcgatcctagcgctaccccgatgtatcaaacggattgggcgcgattggcacaaatcggtaataagaaagtgttggcgttgttatctgattcggccaatgcagagtcgccttatccgaatgccaacgaacatgaaatttatgaccatatcaaagaaacttttgaataccaagatggccgaattatcgtggcaggtgttgccagcaacattcagcgcattcaacaggtgattaatgccgctgcatcgcttgggcggcgggttgtcttgaccggccgtgatgtcgaaaaggtcgttaaaaccgccattcgtatgggctacattaaattgccagatgatgacattttagctaaaaccaaagagctaaaaggcttggcaccggaaaagaccgttattcttgaaaccggccggatgggtgagccgatgaagtcattgcaacgaatggcaacatcccgtcatcggctgattcacatccatgaaggggatcttgttttcattaccaccacgattgcccatgcgatggaaaccatggcggctcgaacgaaagacatgatttatcgtgcaggcggggatgtcaaagtcttaggcgacgatattcactcttccggccacgcttataagaatgatttgcaactgatgatcgatttactcaagccagaatacttggtgccggtacaaggcgaatatcgcttacttgcagcccacgcggaaattgcgcatgaagctggcattccgttagctaacatcttcattgtcgggatgggcgatattttgcggtacgaaaaaggccagatgaacgcctctggtcatgttaacgccggcaataccatgatcgatggcattggcgttggcgatatcggcaatattgttttacgtgatcgcaaaatgctggccgaagatggcattttcattgcggttgtcaccattgaccgtaagaaaaagcgcgttgtttccaagcccaaagtcacaagtcgcgggtttgtttatcttaaaaccagtcgtgacttattggccgaaagcggcaccttggtaacggagacggtacaaaagaatctggataacaaagaatttgactggacccatttgaaacaagatgttcgagataaactcagccgcttcttattcgaacagacaaagcggcgtcctgtcattttgccggtcatcatggaagttaatcaaaacagtgcaaaacggcaataaacaacaaaaaattcggatcattttccgaatttttttattttcactgcaatatccgaataaaacaacgacaggaggaaggcatgaccaatatggtatcattacccgacaatgagcaacgtcacctgacaatcggcaaacaggcgctgcaaaagggtaactatgcttcggcggcggcgcatttagaaaaggcgtatgaagccacgcaaacttttgcaatcgcccagccattagcggctagtttaaatgggcttaaacagtttcatgaaagtcttaatgtgatgttggcgcattaccagtcgtttatgcaaacagacggtgatgtccaactggttttggacgcttggcttggtacgcttaactttgtcatggcgcgaacgatgctgcggcaacttgatccgattcggcgccagcgttttcgccagcaaattgaggcggcagaagctttagccttgaatgaacggggcgaacaaattgcggaactggttcgcaaagtcagccatctggggggcttttcccggcaggagcagcaggatctgtttaatcaggtggggttattgccaaaagcacaacttatcaaagcggcggttcccgacttgaccgatgaatcgattccagtggcgatgcgcgtgtcattgttagaccttttaacgaatgttggctatgatcaaccggtgcaatatcaggcttatgatcgagtcgaaaccattattccgagtgagttacccggcatggcggatgagccaaccgggccacagattctggatcgactgcaaaaagcattaggcgatgacgatcaggagctggggcaagcattggtccaaatggcgcgggtacagattgcctttttatatccggatatcagtcggctaattcctgaccaagcggcatttgttcaagcctatcttgatcatcatcaggggaaaaccaccccgtttgacgatctttttgcttggcaagcggctgaaacagcgaaattgtccgaataggcgtgatgacacgttttcactgtaaatgaaagaaacttgacggtagctgtttacaaagtgaaaatgaccatgtatactcattgctggaattcatttccagcgtagatatttgttttggtatttacgctcaaatgtagtacacttaaacgtaaaggattatcagggtacacaaacaaggtatcctgtattcttacgaaaaatacaggaggttcgttttttcatggctgaaaaagaacactatgaacgcacaaagccccacgtaaacattggtacgatcgggcacgttgaccacggtaaaactactttgaccgcggctatcaccaaggtattgtcggagaaaggccttgcccaagcgcaggactatgcttcgattgatgctgctccagaagaaaaagaacgtggtatcaccatcaacaccgcccacgttgaatatgaaacggaaaagcgccactacgcacatattgatgcgccagggcatgctgactacgttaagaacatgatcaccggtgctgcccaaatggacggtgcgattctggtcgttgctgcaactgatggcccaatgccacaaacacgtgaacatattctgttggcgcgtcaggttggtgttgattacatcgttgttttcttgaacaagactgacttggttgatgatccagaattgatcgacttggttgaaatggaagttcgggaattgctcagcgaatacgattatcctggtgatgatattcctgttctccgcggttctgccttgaaagcacttgaaggcgatcctgaacaggaaaaggttatcatggaattgatggataccatcgatgaatatatcccaaccccagttcgtgaaaccgacaagcctttcttgatgcctgttgaagatgtcttcaccattactggtcgtggtaccgttgcttctggtcgtatcgatcgtggtacggttaaggtcggcgatgaagttgaaatcatcggtttgaagccagatgttctcaaatccaccgttaccggtcttgaaatgttccgtaagaccttggatcttggtgaagccggcgataacgttggtgtcctgcttcgtgggattaaccgtgaccaagttgaacgtggccaagttttggcaaagccaggttcaatccagttgcacaacaagttcaagggtgaagtttatatcttgacaaaagaagaaggtggccgtcatacgccattcttctccaactatcgtccgcagttctacttccacaccaccgatgttaccggtgtgattgaattgccagatggcgttgaaatggttatgcctggcgataacgttactttcgaagttgacctgatcgctccggttgctatcgaaaaaggtaccaagttcaccgttcgtgaaggtggccgtactgttggtgccggcgttgtttccgaaattcttgactaatttctgaataaacgtttaaaagcctgcaagcttgcttgcaggctttttttgtgagcgcgagccggcgcggttagaagtcggagtgtaagcggccttagccgtgatggccggtctttggccattgcggctaaggtccttacacgcagacttctgcgccggggagcgcgttatgggagtaagctgaaacatatgaggcgtgatggccggtctttggccattgcgcctcagggtctttacccgcaggcttctgcgctggggaacgcgttatagaaagtgagcgttagccagcgatgattacagggttccgtgtcaggacaataataatggataaggaatgaataatcgcggttattttgcgtttcaagatcttgacgcttgaacagtcttgggaaatcaaagattattttatcgaatcatgacaccaaaaaatctcaagtcgtgtttggcttgagattttttgggctattttcagcagggattaggtaaaccaagtaactgcaaaacattagccgctctgggtgatcaaggaagggatttaaaattaagctgactgtttaatttcgcttggctgtgtcactgtaatcttggttttagctggttcaattttgtccgcttccagaatgatgttaccgatcgattgtgctcggatgttgccgctgcttggattcttgacgctgataatatcggaacaaatgtcggcattgatattggtgctgtattcaaagaccaaatcggaatgaagcagtgcgcagtttttcattgttaaatgatcaacataacataacccctgattgctctcgattgtacaattgataagcgtcagattttttgtattccagcctagataagcaccattaatagtggaatcatagatagtaatgttctcacagttccaaaatgcatctttggttacaagcgtggaatgatgaatttcaacatttttagcaccatcaaaggcgtaatcaccaatcaaatcgaggtggttggcgacaatgtttgtgctattcataccaatatagttaccacttgcttgcacatggtcaaagctaatgtgattgcagttccacaaactttcactggcatcggaaaaatgaacgttttttaagcgaatattctggctacggcgaaaagtttttggtgcttgaattgcactatcggacatagtgatgtcattcgtataccagatgcctgaccgcgccatggtttcgaagatggtgttagccaccgtaatgtgctggctgtaccaaagcggatacttatatagaaaaattgactgatctagtttaatattgcgactttccttcagaggagattcaccttttccaaaagtcgttttgacaatggtggcattttcctgaccaaacagagaacgttcaccatgaaaaaattgattgttgtaactcaccataaaagattcgcttctttctatatgttctcgaaaaatggtcgctacttccaaaactttgattgcagctgttacgctacgatgtcatggagaagttcagcagccttaccggataaataaatggtatttgactcatgcaaactgtctctagcagattgagaggtattgatgacaatttttggacagtttaatcgaaagctggtggcaggacggcgcgtgccaatgattaacaagaggtccgcttgtgcgagcatttgctgaccatattttatttcgtctgggtaggttgccaggcgtcttaaaacgaagtcaggtaaaatcagtccgccacaattggggcaagtcggcacagtgctggttgacggtttttgccagtcataagaatgatgacaaatcgtgcagtgattatgccggacatcgccccagtattcggcaacatgacgggttccggctgtttgatggagatagtcaacattcatcgtcaccacaccaagcagcttgttagcctgttcgagctgcactaacgcttgatgggctctgttgggtaacgcctctggctgacagaacgtctggcggtatagctggtagaaaccagacgggtcggcgctggcttcttctggatcaagaaaacgaaatatgtcaccagcaaatttgtgtgatttttttaagatttgatcaatcccgttcaaatctggaatgccagattctgtggagataccggcaccagtgaaggcaacgatttggtgatgttggcgaataagggctgctgcctgctgtaaacgttgtgcttgtttcaaggggctcatctggtttcgaaaacgtgccgggcaaccgttaagccatttagtacccgaggaaagccaatataaggaatgcagtgaatcatcgtttcgacaacttcggttttagtcagaccgacattgagtgccccattgagatgaacctgtagttggtcggcggtatcgccttggataagcagcgcggtgacggtgatcatttcccgctgttttaggtccaagccaggacggttgtaaatatcgctaaaagcaaattccaaaatatatttaccaacatcaggcgcaatgtcggctaacgaatgcataacgttggccgcagcctcaccgtcaacttgggcaagcgtctcctgaccattttctaatcgtgttttttctgacatgttcatgacctctttcatttaggatagcttcactctaaatgctggagttaactccatgtcaatcacttttttgaattttctgtggttaatttggcttttagctgatgataggtcgtgattttgttttctaaaaatgcaatatgggcatcaatttcccggcgttgtgccgctaaccgggatttttgcgtgaagagtaacttcagacgttcgtcaatggtgctattgccttgataccgtaaacgggcataagttttgatttccttgatgggcatgccagttgcttttagccgcttgatgaatgcaatccagcgctgatcagcatctgagtaggtccgtcgattattttgatcgcggtcgggaataatcaagtgttctttttcgtagtatcgcaacgtatcaattgacagtgaaaccatttttgaaaatttaccaattgggtagcccatcaacgaagccttctttcttaggtcatgttgggttgtatgatgagactttctgtgaaattagtcaatacttatacaagagcctaagcgttttaatcgctaaattaaaactattgttatatgataaagtctcggaaaagggggccattcatttgacgaaatcaacaacttggcgaatgatcgcatttttctggcatcagctggcagatatgaaacgtcaattgttccgtattattgtggcattggtcggggtggcggtggcttcgtatctggtgccgcgactaacgcaatatgtcatcgatcaggtcattccgcaacgtgcgatgggaacactaatgggcgtgattgcgatggcgctcttgctgacggctatggctgggtggttaagcggtcttagtacttattggatcggtcaggtgagtttgcacgcgattgcccgcatgcgcgatgacttgtttcgccatacgctaggattagatatgcggtattttgaaacgagtcaaacgggtgatttgatggtggtgctcacgagtgacgtcaatacgttgcagcgcttaatatcgagcaatacattgggtctatttggcagcttactcagttttgtcgtcgtgctggtgctgatgattgtgcaggactggcaactgaccggtctgattttattaacttttccggttttgtttattctgaataatattttcgttcgcaacattcgtgctgcttatcggcgggtgcgggcaagttctggcatgatgaataatcaaattcaacaggctttgaccagtatcgggctgattaaaagctttacgaccgaagccacaacggcaaggacctttcaacaagccaatgcacgtaaccgcgattatcaacttaaagcaaccaaactcagcgcgactttttcaccgctaaccgatttcgtcaattatttgggtacggcaattattttaggctttggtgcgattcaggtgatgcatggtcagtttacgattggcttgatcgtcgcttatactgcctatcttggcattttgcaggcgcccattcgccaactgaccgggttgattcaacaattacagcaggcaacggtttcgtttgaacggattgaagcgttgcaggcagcgactccgcaaattgtttcgccgccaaatgctgtccacttgccgcgatttcagaaacgaatccagtttgatcacgtagatttcagttacgatgaggctgtgccagtactgcaggatgtcgactttaccatcgaaaaagaagaagtcgtggcactggttgggtcgtccggcgccggaaaaacaacgattacaaatttattagcgcggttttacgatcccaccagtgggcgcattctgatggatggcatcgatttgcgtcaggcggatctgatgagtttacggcaacaaattgccattgtctcgcaagatgtgatcttgcttgatggcaccattcagcagaaccttgaatatggcacatcatctgtcagtgaggcggccatttggcaagcagcggaggccgctaacattgcagcttttatccgcagtttgcctcaaggactggcgacgcaggtaggtgagcgcggaattcggttatcaggcgggcaaaaacagcgcatcgcaatcgcgcgagttttcttgaaaaatgcgccgatcgtcatccttgatgaagcaaccgccgcattggataatgagtcggagcgttttgtgcaaaccagttttgatcggctaatgactgaccggacatcgatcgttatcgcgcaccggctttccaccgtgcggcacgcggataagattcttgtattagaacatgggcgaattgttgaagcggggaatcacgagcagttaatggcccaaaacggacgctacaaggaactctatgatttacagtttacgtgattgctgttgttgcgattgttattcttaggttcatgcgcagtttgtgaaaatcagaaaaaatcaagttgcgacaaggctttttttgtcacaacgtttactttcccaccggtttcgggtatcatacattaagtatgcaatgtgaattgcgagactaattgtcggaggtacagcatgtctgcaaaatgggaaaaaaagggcaccaatgatggtgaactcacctttgaaatcgatttaccaaaaattcaagaaggcttagaccaggcgtttcaacgtgttcgtaagaacctgaccgtccctggatttcggaagggcaaagttagccggaccgttttcaaacggatgtatggtgatgccgcgttatatgaagacgccttgaacatcttattaccagatgcttatgaagcagcggttaaggaatccggtattgacccggttgaccaaccaaaaattgacgttgagtctatggacgaaggcaagccttgggtgatcaaggctaacgtaacggttaagccagaagttaaacttggccaatacaagggcgttgaagtgcctaagcaagacgttgaagtatctgacgacgacgttaacgctgaattggaaaagcgccgtgaacaacaagccgaactcgtggttaaagacgacaaggcagctgaaaatggtgataccgttgtgattgattacgtcggcaccattgatggcaaagaatttgatggcggttcttccaagaactatagtttggaactcggctcaaattcatttatccctggctttgaagaacaattggtcggccataaatctggcgatgaagtaaccgtcaatgttacgttcccagaagactacaaggcaaccgatcttgctggtaaagcagctgaattcaaaaccaccattcatgaagttaaggtcaaggaattgccagaattagacgatgactttgccaaggatcttgatgatgatgtcgatacattggctgagttaaaagacaagatcaagaaagaattgaccgatcagcgtaaagaagcggccaagaatgcagttcaggaagcggccatcaagaaggctaccgagaacgcaacgatcgaagaagtgccaaatgcgatgattgaacaagaagtgcataatcaaatggatcaatacctaggcaatatgcaacgccaaggtatcagtcctaagatgtactatcaattgaccggtacgactgaagaagatctgcataaacagtttgaagccgatgcagaaactcgggttcgtactaacttggttcttgaagccatcgttaaggcagaagatattcagccaactgaagatcaagtgaccgaagaagttaagaatttagcttccgaatacaacatggatgaaaaagccgttcgtcaggcattgagtgaagatatgctcaagcacgatattggggttaaagaagccatcgacatcattactgacaatgccaaagaggtcgaagcggccaaggatgaaacagctgataaggctgattctgacaagaagtcagctaaatagttgtcacaatcgcgtcaaagagacgatccttgatcgtctcttttgtcgtcttaacaggtccaaaaagccgaacagatcccttgacattggcatagcggttagttgctagtcggtacttgacggttctggtagaatgaaggtaacaagaaagggttgaattagatgtttgacaacgttgaaacaacgggtccggtgacttgctctttttgtggcaagtctcaggatcaagtgaagaaaatcgttgctggccctggggtttatatttgtaatgaatgtatcgacctctgcaaagagatcattgacgaagaatttaaagaagaagcctatcagaatctactcgaagtccctaagccaatcgaaatcatgaaatcactcaatgattacgtgattgggcaggatgctgcgaaaaaagcactttcggttgccgtttataatcactacaagcgcgtcaaccagatgcagactgcgacaaaagacgatactgaactccaaaagagtaacattgcactgatcggcccaaccggttcagggaaaacattcttggcgcagacattagccaagatcctgaatgtgccatttgccattgcggacgcgacaacgttaacagaagctggttatgtgggcgaagacgtcgagaacattttgcttaaattgctgcaaaatgctgattacgatgttgagcgcgctgaaaagggtatcgtttacattgacgaaatcgacaagatcgccaagaaagccgagaacgtttcgattacccgtgatgtttccggtgaaggcgttcagcaagctttgttgaagatcttggaaggtacgattgccaatgttccgccacagggtggacgtaagcatccgcagcaggagtttatccaaatcgataccactaatattctcttcattgtcggcggtgcctttgacggtattgaaaatattgtcaaaaaccggattggcgaaaagacgattggctttggtaccgactccaccaatcaagtggatccggataagtcactgatgcagcagattattccggaagacctcatgcaatttgggattattcctgagttcatcggccgaattccgattttggcagcattggagaagctcaacgaaagcgacttggttcggattttaaccgaaccgaagaatgcattggttaagcagtatcagaagttgttaagtctggatgatacggatcttgaattcacacctaacgcactgaaggccattgcccatcaagcgattgtacgtgacactggggcgcgtggcttgcgctctatcatggaagccatcatgcaagacaccatgtttgacttacctagtcgcagcgatgtcgacaaggtagtcgtcacgaagtctgctgttgaaggcaaggctaaaccacaattagtgcttaccaagggccgtgaagcctcctaaagcaagcagggtttcaaagagcaccaggttggataacctggtgctctttgtttgggctcaaccatgaataaagatttgtaaattcccgctagcggcccagtcagcttttaaaatatgctaaactattgaaggcagtggtgcttgagtgccactaaaagagatgaataaaaaaggaggccgtttaagatggacgtccatgatgtcaaactgacaatcagtgcggttgcggctgcgcaatatccagaagatggccgtccggagatcgcctttctcggacgcagtaatgttggcaaatcttcactgatcaataagttaattaagcgtaaggcgatggctagaacatccagcgttccggggaaaacccagacgcttaatttttacgatcttgatagtcgcctgttttttgtcgacgttcccggttatgggtatgccaaggtcagcaaatcagcccgggcaaagtttgcagcgatgatcgagacctatcttacaacgcggcaaccattacgtggggttgtcttgctggtggatagtcgtcatgagccaaccgccgacgatatcagtatgtatcaatatttaaagtattatcagctcaggactttagtggtcgccacgaaaatcgacaaaacgcctaaaagtaaacggctgcacgttgttaagcaaattaatcaacggttggatttaaaccagactgacacggttattccgttttccgcagtcaccggtgaaggctatgatgcgatttggtcttggttgagtcagacttcgggagtgggggaaaatgaataatgaactttaatgaatatcagcagaaggctaaccgcacattggccggcaacgaacatgtgttaaccaacttatcgctaggcttggcaagtgaaagcggcgaagcaattgacttgattaaaaagtacacctttcagggtcaggatttagataaggttaaattacagcacgaattaggggatgtgctgtggtatctttctcaaattgcattgtgggctgacattgactttgatgatgttgccgctggtaatattaaggcattggcaaaacgctatccgcaatccaaaaagtgaacttagcgtcattcagaacatatttaaacgcagctaatgatttagcgtctaaaaaagcgacctccgaaaaattttcggcagtcgcttttctgtttgcttgagtatgaaaatcagcataaatggttactttactttttcggctttttagcgctatctttatcagactttttcgtcatcttttcgtgatgttttggatctggcccggtagcttgttctttatcgctgggaatgcttgcgaatttatcgaacatgtcgtttaggttggtttgagtgttgatcttaagtgccatgcacggccacccctttccttggagaaagtatagcatcaaccagcattagcgtctagactgacaaccggtttttctaatgccgatatttggccaaaggttgatcttgaaaacgatttaaggactaggtcgtgtttttcgatgattttacgagttaaaaaaagagtcaccaaaatatgaatatttgttgcataaaaattgaattacgtgtatagtacattcttgtaatcaaggagggtattatgacgcatttgaaacgttggttaatcgctttggtcgcagtttttgccgcaattgtgaccttaaatatgcaaactgtccaggcagatgacagcctggcaaagattcaacaaaaaggcacgattgtgatgggcactagccctgattatgcaccatacgagtttttggtgaataaaaatggcaagaatcaggttgtcggcatggatgtcgaagttgcccgcaaaattgccaaggatcttggggtcaagttagtcatcaagcagatgaatttcagctcgttgctagtggcgctgcaatccggcaaggttgatatggtgctggctgccatgtcaccgactaatgctcgccgcaagtcaattgatttctccaagacgtattataaatcgggtcaggatattctgattaataagacggatgctaagatttacaaagaccacaagagttttgccaataagaaagtcggcgttcaaaacggtagtctgcaggagaccttagcaaaaacccaaatgaagtccagtacgactttaggactgacaaaagtaaccgatttgattctggcgctaaaaacccacaaagtcgccggggttgtcgcggaaggtgcggttgctcaagcctatacgtctaacgatgataaattggttgaaattcccggtcattttaatctgtcaagtgacacgatggggactgctatcgggtttgccaaaggatctgattctttagtcgcagcggccaataagagtttagcagatattaaacaaaagaatttgatcccgcaatatctgaaaaccgctggcagttacatgaagacgaataccgaagataccagtatgctgcactattggacttatttccttaaaggggttgagtataccttactcatcagtgcgattggggcgttcttcggggtcttacttggtacgatctttgctttattgcggttgagtaagcatcgattgccacatctcattggggttgcctacatcgagttcgtccgtggtacgccgttgatgattcaggtcatgtttgtctacttcggtattggcattttcattgacattccagcgctagtagcagggttgatcgcggtatcgcttaattcagctgcatacgttgccgagattatccgtagtgggattgatagcatcccgattggccagactgaagcggcccgttcgctgggcttatccgagcgccaaacgatgaccagcgttgtgttaccgcaagccatcaagaacatttggccagcgctaggaaacgagtttatctcactgattaaggaaagttctattgtttcgatcattggggttacggacttgatctatcaattaacggtggttcaaaccgcaacttataaaggtgttcagccgattttggtcgcaatggtcttatactttgttttgacattcgggctatccaagctcctgagtcactttgaaaggaagatgaatcatgcagcataaacctttgatccaaatcaaccacttgaccaagaagtttggcgataatgtggtcttgaatgatattagcgaaacgattgaccaaggcgatgtgattgtcgtgatcggtgcgtcaggtggcgggaaaagtaccttcctgcgcagtttaaatctgttgaaccgtccaactgcaggcgaaatcctttttgaaggaacaaacctggttgatcttagcgaaaagcagttggataatgtccgggagaaaatggggatggtgttccagagcttcaatctttttccgaatatgacggttctagaaaacatcaaactggcgccgttaaaagtcaaaacggtgacggatgaagaagcaaccaaaacagccaaggaactgttggaacaagttggcttggcggaaaaagccgatgcctatcctgctagcctctccggtggtcaacaacagcgggtggcgattgcccgcgcgctggcgatgcaccctgatgtgatgctttttgacgaaccaacgagtgcattggatccggaaatggttggtgaagttttgaaggtcatgcaggatcttgccaaaaccggaatgacgatggtcgtggtgacgcacgaaatgggatttgcccgcagtgtggccgaccaagtctggtttatggatggcgggaagattcttgaaaaaggcacgcctgaacagcttttcgaacatcctcaagaagagcggacacaagactttctttctaagatcctcgcacaataattttcatcaaagtactttgtctggcgcatactgggcaaggtactttttttgtgaaaacgagctggtggggtatcatgaggtttgaaccagaagtacaagcttggtatgacaagcatgctggcaggtgtataggctatctgcttgcaatcgcattttagaatctttataatgttaggcgaacatttgttttataaggagcttacaatggcatctgcacacattgaacataagttatcgttactgccggatcttcccggtagctaccaaatgagagacatcaacgggaagattatttatgtcggcaaagccaaaaatctcaagaatcgggttcgatcctactttaagagttcgcatgacggaaaagtagcggcaatggtggcacaagtggcggattttgactacattgtgacctctacgaataaagaggcgttcttgcttgagattacgttaattcaaaagtaccaaccttattacaatatcaagctgaaaaagggcaccggttacccttatatcaagatcactaatgaacgcgaccccaagattgaaattaccgggacgattcgcaaagacggcggctattattttggcccttatcccaatgtttacgctgcccaggaaaccatgcactttattcagaaagtgtatccactacgccgctgtaacggctatcagggtcgcccgtgtctttattaccatatggggcagtgtctcggcgcttgttttcgcaccgtcccggagaaggaatataccgatcagattgcgcggattaaacgctttttgaacggtaatgtcagcaaagccaaggccagtttgactgccaaaatggagcgcgcggcaaagaatctgcaatttgaacgggcagccgagattcgggatcaactttattacattgagcaaacggttgagaagcaaaagattatttcgacggataataccacgcgcgacttgtttaatttttatatggataaaggctggatcagcattcaggtcttctttattcgccaggcgcgattgatgaagcgtgagtcgcgcttgtttccggtggtcaatacggctaaagaagagtttgaatcttttatcttacaattctacagccggaaaaataacgttaaaccgcgtgaagtattggtgcctgcagggctagataataaggtgctggctgatatccttgaagtaccggtacgcacaccccaacgaggcgaaaaacgcgagctgatggcgctagcagccaagaacagcaagattaaactggaagataagtttcggttaatggaattagataatcggacaacggtaggggcgatgaaagagctgatggcagccttaaagttaccgatgggccatgtggtagaagcatttgaccatagtcatatccaaggtgccgatccggtgtctgccatggttcaatttgtcgatggccaacctgccaaaaacaattatcgcaaatacaagttggatgcggacaaaacccataatggtgctgacgaagctgccaatacgcgcgaagtcattcgccgacgatatacgcggctgctaaaggaacatgcggcattgccggacttgattctgatggacggtggtgagattgaaatgaacgcggctaaagatgtcctggaaaatgaattgaatctcgatattccggttgccggaatggtcaagaacaataagcataagacggctgccttgctattcggtcacgccgacgagatgatcaatttggatccgaagtcgcagggcttctacctgttggaacgtattcaggatgaagtgcaccggtttgccatcacgttccatcgccagcttcacgccaaaaactcgttggcatcgctccttgagggaattaagggcgtcggacccaagacacgcttaaagttgctgcgtaaattcaagaccatcacaaagatcaaagaagcaccattggaagatattcaggagctaggcatttcaaaacgcgtcgcccaggcactgaagctttcgttaacggcagatcccacgccggcacgtcgggtataaatgatgcggataacgtggtaattttttagagccgttttcaagacaatggaaaaagcaggttccaaaagacaaacgttgccttttgatgcctgcttttttgcaagatgattgaaagccacaaaccgaatttaaaaagcgtcattcaaacggacaaaaaaactcgcagcgcatttcaaagctgcgagtttttaatttaagccatgaccgctattaagtgacgcttacaagcttatcttgacttagcgattctctttagcaactggacgccagaagccaagaatcagtgcggcgatgatggttccgataatcaatgacatgataaagccaaatttctgatcggttagtaagagtgcaacgacaccgccatgaggagccggaacgttaacgtgccagagctgagttaaaccaccggcaatcgcagaacctattacggagctaccgatgatgtgcaatggatcggttgctgcaaacggaatcgcaccttctgtaatgaacgttaaaccaagcgcatagttagataagccggcattgcgttcctgtagggtgaatttcttcgggaagaaagtggaagcaaccgcgatagccaatggtggaatcataccgccgatcataacggcagccatccagcgaccatctttaaagccagatgcttgataaacgccaattgcaaacgtataggccgctttgttgaaaggaccacccatatcgatactcatcattgcggctaggatgaccccaatgatgatggcattaccagtacctaaaccttcaaggaagttaatgagtgcaccgttaatcgctgcaaaaatcgggttgatgatgaagaacattaacagccccataatcgcaagaccgatgactggataaaggagaatggtccgcataccgtctaatgagcgcggcatcttggccaatgctttcttaagacccacgatcatccagccggcagcaaacccggcaaccagaccgccaaggaagccggccgggttttgcgctttcacaaccgatgccgaagcaacggttgccatataaccaccgacaaacccaggcatcaaagcagggcggtcaccgatagattcggcaatataagcagctaataccgggaccaagaaactaaaagcaaaagaacccagattattcgtgaacgtgaaccacatagaggtcttacccagccattgttccaggatgaatgagatcgccatgataatcccgccgccaacaacgaatggtaacatgttggagacaccattcatgaggtctttataaatgcgattccaaacggtgccgccggaagtctcctcactttcactggcttcggtgttggcttcaccagcagcgtgaaagacttggccttgacctttaagggtttcttcgatcagttcttgcggtttcttaatgccgtcaatgacagggcggttcaataatttcttgccattaaaccggtccatcgcaacttttttgtctgcggcaacgatgacaccggccgcacggttgatgtcagcatcggttagcttgtgcttgatgccttcagagccgttggtttcgaccttaatatcaacgcccattttctcggcagtttctttcaaggctgcttcggccatgtacgtatgggcaatcccggttgggcaagcagtaacggcaacgataaatggccgttctttgcgcttttcgtctttaaattcagcttgcttagcggctttgtccttggcttcttgggctttttccgcttcttcttcagctttatccttggctgctttttccgcttgtgcttttccaaaaagatcaatgacttcatcaggggttttagcctgctttaagtcagcgaccagttttggattgatcaaaagtgaagacaaggcagctagagcagctaagtgttcgttgttggcgccttcgggagcagcaatcatgaagaacaagtgcacgggctggccgtctaatgcattaaagtcaacgcctttagtgcttttggcaaatagaaccgtagcccgggtaaccgcgctgtctttggcatgtggcatcgcaataccttcaccaatgccggtagttgattctgattcacgctttaaaatgtcattgcgatattcgtcagcgtcagtcacaatgccttccgcgtggtatttggcaaccatttcatcgatcacagcctctttagtggtgcctttgagatccatgatcatgacattttttaatagtaagtcacgaatgtccattttgtcctcctaaacttcattaatcgtaatcgtctgcttaacggcagcaattttgtcggcagtggcaagatcctcagaaaaagcggttgcagaaccgcatgcgattccaaccttaaagctttccagaacatcatgtgtttgcgcaaaagttccggtgaaacccgctaacatactgtcgcctgcaccgaccgagttcacagcaggttgctttggtacgttaccgaaccaggcatgatcttgctcaatcatgagggcaccaccgcctgccatcgagatcaaaacatgttgtgcgcctaaatcaagtatgcggcgaccggctttgataattgcctcatgactggtatatggtgcgtcattgaacagagcagctaattcatggtgatttggtttcacaactaggggatgatcggaaagggtatccagtagtgcctggccggtggtgtcaatcacgaagtctgcgtcatgcgcatgaattaaggggatgaggtcccgataaaatgtgcttggtaatcctttaggcaaacttccggacataataacgacatcgcctgattttaggttggtcagcttagctttaaagtcggcaatttcggtctcgctaatagcagggccgctggcgttgagttcggtttccgattctgctttgagcttgacgtttatccgggtatcacctttgatttttgtaaaatcgcaaggcatggcaagctcgtctaacttatcttgaataaacgtcccggtgaatccgccaagaaatccccaggcagttgtgggcaagccgagtgtttgtaatatacgactcacattgatgccttttccacctggcaatttaacgtcgtgggccaaacgattgacagcgccaaggttaagccgaggcaactcaatgacataatcaatcgaagggttgagcgtaactgagtagatcaagaatgaacctccttaatattttgatacctttgatagctcgctggaagcccttgtagtgaactggtcaggatggttgcatcgccaatatcggcgaatttgacgaaactgacctgttcgaacttactgggatctgcgagaatgatcggttgacgcgcttggtgaatggccaagcgcttgatcacggcttcttccggatctggtgtggtgttcccaaattcagggtgaataccatttgtaccgataaaggcgatatcgaaacgataatgatgaagtgcttccgcagtcgttgcgccaatcagcgccttggttgctgacttgaccataccgccaagcattaaggtcggaatttgataatcggctaacaatgaggcattatcaaccccggtcgtaataaccgtgaccccaagatcggccaaaaaaggaatcaactgggccgtggtggtcccggcatccaaaaagaccagatcgtcttgttcaacttggcgagcagcggcatgagcaatggtttgttttgcccgtaaattttgcgttgacttacttgccacgtccggttcatcgccaagaccgttgacacgcttggccccgccatggatccgtttaagttcgccggctgcttcaagttcatccagatcgcgacgaatggttgattccgatgcatccaacgcggccattaacgctttagacttaatgacggtatgttgttgcaattgagcaaggatgtattgtcgccgttcttctgtaagcactttcgtttcacctcgtccttcattatactgatgaaacgttcaaaatcaacctaaaaccgttaaaaacattcactgctgtcacaattcgaaccttttcattttgccttacatttttacgatattgttgcgcttgaagtgtgagtccttgtcttggacgtgttaaaatgaaaaaggcatctgatttactatgcgaacagcgcgataacgcgtataattaaaaattatgttttttcagaaaggggatcgccaatgtttgtcgatcaggtacaagtagaagttcaggcgggcaaaggcggtgacggcatggtcgcgtttcggcgcgagaagttcgtgccgtttggcggaccagccggtggtgacggcggccgcggtggcagcattattttatatgttgatgaaggcttacgaaccttaatggattttcgctatcaacggcactttaaagcgccagccgggggtaacggccaaggtaagtcgatgtatggtcgcgctgctgaagatcgccgaattgccgtaccagctgggacaacggtcacggacgctgatactggtgaagtcctcggcgatcttactgcaccgggacaagagttggtcgtggcaaaaggcggtcgcggtggacgcggcaacattcactttgtctcgcctaaaaataccgctccggaaattgcggaaaacggtgagcccggccagcaccggtttattaagctggaattgaaagtgttggctgacgtcggtttggttggctttccgtctgtcggtaagtccaccttgttgtcagtggtgacccaggctaagcctaaaattgctgcctatcagtttacgacgctcgttcccaatttggggatggtgcagttggatgatggcaccgattttgtaatggctgatttgccgggtttgattgagggcgcttcacagggtgttggcttaggcatccaatttttgcgccatgttgaacggactagggtcttattgcacctagttgagatggatccggaaaatggccgtgagccgctggaagattatgatcaaatccgtaaagaattaggcgcttatgacgaaaatatcttaaagcgtccagaactgattgttgccaccaagatggatttgccgggtgcagcggaacggtttgccagctttaaggcagctttagttgaccgcggtattgatccggctaatatttttgaaatttcaagcctgacccaccgcggcgtcatgcctttgatgcataaaaccgcaacagtcttgaagacggcaccgcaattcgagccaaaacaggaaccggttcaatcgaccgagtacaagtacacgccggaaccagcattgaaagtgacgcgtgatagtgacggtacctttgttctaaccggcgagaaggtggagcgggcatttaaaatggccaatcttgatcatgaagacggagtcatgcggtttgcacgccaattacggagcatgggcgttgacgatgccttgcgtgaggccggtgcacaaagcggcgatttagtcgctattgatgattttacttttgagtttgttgaataatcttcgagcagcatgttgtaaagaattaattttataaagaatggtggggcctcaagtgaaacagacgcgcaaacgaaagcgtcggtatatccatggattcgacgggttacggacaattggtgttattggtgttattttatatcatttacgtcctgaactttttaggggcggatatctgggcgtcccaattttcatggtagtttccggttatttaattacggatggcctcctgatagaatttgaccgctatcggcacattgactttaaaagtttttttattcgccgatttaagcgactttatccggcgcttatcaccgttttgtttggtacggcggcctatattacgcttttctcgcagaatctattgcataacctgcatatgatggttttgacaaacctgttatatgtttataactggtggcagattttaaatgggcaatcctatttcgcccgctatgcgaatggagaatcgccgtttacgcacttgtggacgctgtcaattgaaggtcagtattatcttatttggccgtttttggttctgggcttactattgttggttaaaaatcggcatcaaattgccaatattgttctgatcctggcagctgttagcggcgcgtggatggcgatcttatacatgatgacggttgcccacacgtcgccagcggcctttgacccaagtcggctttactacgggacggatacccgtgcgttttccattctgttcggtgcggcactggcttttatttggccgagcagtcggttatcgacgcatttaccgcgcaaatgggttttcagcctcgatctaatcggaacggtgagccttgttgggttactgacgatggttttcacggtcgatgcccagagtagttttctttatgaagggggcatggtccttttctccattttgacaacgattttggttgcagtggttgcgcatccggccgcgcattttgatcgcttgttgacgaacccgctgtttagctatatcggcagtcgcagttatggcctttatctctatcaatttccggtcatgatcttctgggagaatcgtttccgcaacattgccgatcatccggttttatatcctgtgattgaagtgattttgattgttctgattacagagatttcttatcggttgattgagcagccggccgcgcattttgattatcataaaacctgggactttcttaaggcactggttgaccccaaaaaacgaatgggtatggcccgttggatcagttatgccgctgttattattttggcaattgggagcgttggcctcgctaaggcaccttcagccaaggcggtgggtgataattcacctctggcaaagcagttgaagcgacacagtgagtcggctaaagaaaaggctaaacgtctggaagcaatgcgctccagtctgtcagagcagaaaaaagcggataaaaataaggccgatgagtcgtcaagttcgcgcgcgcaacaatccagatacgcttcgcaggccaaaacaaagccggtgaatcaggactatgaacgttatgggctaacccaaattcaacttcagcaagctcaggatgttaccttcacggcagtcggtgactcagttatgcttgacggtgagccgggacttcaacagcttttcccaaaagcggtgattgatgccgcggtttcccgacaaatgattaatagcattgacttggtgcgcagttatgctgaaaaaggtgtgttggcgaatattgttgtgatcggtcttggtaccaatggaccgttttcggacgatcaattagcccaaatgatgcaagccatcggacctgatcgtcaggttttctggattaatgttcgcgtaccgacccgcgcatggcaaaatgatgtcaatagcaaattagatgctgcccaaaagcagtacaaaaatctgacggttattgactggttccataaatccgatggtcatcctgactggttctacaatgatatggtgcatatgaatccaaccggcaatcctgagtatgcggcgtttgttgccaaaactattttggaaaagattgatgaatagccgtttttatgacgttctttagtgaacggtcattgttcagttaaatcgagcctagaggtcatgccattctctaagctcgattttttataatattggcgactcggtttagaaaaaatagacggcgtgaaagtctatgacagcaatgattccgggataatcgcagagaacttgtggtagactacaaagtgaagtttgacagaataggaagtatggtatggaaattcaatttttggggacaggcgcaggttcaccttccaaagtccgcaatgttagcagtttggcgctcaagctgcttgatgagcgcaatgaggtttggttgtttgatgtgggcgaaggaactcagcatcaaatcttacagaccacgatcaaaccgaggaaaattgccaaagtatttattacccatttgcatggtgatcatatttttggcttaccgggctttttagctagtcgggcaaatcaaggcggcactgaaccgttaacgatttatggacctccggggattgaggactttgttaagacaagtttgaaggtttctcagagtcatttgagttatgcaattaaatttgtgttgttacgacatccaggcgtgatttttgacgatcagacctttaaagtcagttttgatcgacttgatcatcggattaccagttttggatttcgggttgaagaaaaaccacacccgggcgagttactgattgataaggtccgtgccgccaagattccggctggaccggtttatgcttcgttgaaagcaggcaaaaccgtcacattgccggatggtcggacttttgatggtcatgacttcatcggatcagcacaaccgggtcggacagtggccatttttggcgatacgcgtatgtgtcgtcgggccttaccattagcagccggggcagatgtcttggttcatgaaagtacgtttggtccggatgaaagtcaactggccaagcagtattatcacagtacgaatcttcaggcagccgagttggcgaaacgagctggcgttggtcggctgttgttaaatcatatttcagcacgctatcttggccctagtgtggcaatgttagaaaaaagtgcacggcatattttcccgcaaacgcatgttgtcagagatttggaggaaattaacattccatttgcaagtccgcaactgcaaccgactgtttccgctaaatgacgattccggtttgatgagacatcaggcaagcgttgttgaagattacgggaaatttaggcaatacaccgagttgaaatgcgaaaactggcgcagaagtatagggacgcgtcacgactccttactttttgacgattatcggtaccagttcacactcacacgtgctcaggagggaactttatggtgaaaaaacatctgaccgttgtcatttctggcggatcggctggcttgggaaaggcgatcggactcgaggcggcgaaaaatggtgcgacggttgtatttttggcgcggcgccgggataaattacgtcaggctcaggctgaagcaacggcgctttccggacatccggcttatgcttttccagtagatgtgggtgatccggtggcaattgaagcggcggttgatcaaattcacgaaacggttggaccggttgatgttttggttaatgcagccggttttggtcactttgaaaatgcctttgacacggatatgcggttagtcgaacggatgtttcgggttaatgttttaggtgttatgtatctgaccaaactgttgggtcgtgatatggcaatacgcggtcagggacagattattaatgttgcctcaatggctggtaaaatggctaccccaaaatcagccatttattcagcaacaaaatttgcagtgatcggctatagcaacggattgcggctcgaacttaaaccatttggcgttcatgtcacgacggttaatcccggtccgattgcgacggattttttcaaggcagccggtgctttggattatctcgcaaccgtttcctggctggcattggatccggatcaacttgcgcgccgaatcgttgggacatttgaccatccggtgcgggaaatcaatgcaccgcgcgtgatgagtcttggggctaaactatatacattatttccaggtatcggtgattggctagccggtggtatgcttaataaaaagtaaaggggtggctcacatgaaaagtcagcaacgttttattatcggactggttcttgccttaatcttgattatttttgctttactgaacggccaaggggtgtccgttaacttcttcggcattcagttagagtggccgctgattgtgattatcgcagtatccgtactgatcggcgcggtggtaacctggttaatctccaccagtgccgttgcgagcgctaagaagcagatcaaagaacttcaacagcgcgtaacggaattgaccaagacaaacaaaaacgaaaaaccggcgccgaaaccggttcaggcaccaaaagaaacgccttctgatacatccaaaaactaaacgaaacgacgcggatattttgttcgcgttttttatttaaaatagtttgaccttaactgaccaatatcgtaaagtgaatttgaaaacaatgaacagttatggaggcatgatggatgaatccagataattttacgcaagcggtggctgaagccttgggtgctgcccaacaaattgcccaagtccgccaccatcaagaaatcgatattccccacgtcatgaaaagtctggtgcagcccaatcaattagctgagcagatttatcgtgaagccggcgtcaacattcacgggttaaatgccgcgattgacgctgcgattgacgcagagccggtaattgaaggcgcaagcgcatacggccaaaacatgtcgcagaatctggcgcagatgttaagtgatgccgatacgatcaaagatgagtttggtgacacgtatgtttctaccgaggcactgttactggcactctatgagcagcgttacaacacgattacccgctatttattggatgatgccaaagttgacgccaaaaagctgcgggcagtcattaccaagattcgcggcggcgagaaagttaccagtaaaaacgctgaggctaattataagagtcttgaaaaatacgggactgatctggttaaagaagcacgcagcggcaagatggatcccattatcggtcgcgatgaagaaatccgcgatgtgattcggattttaagtcgcaaaaccaagaataacccagttctgatcggagaaccgggtgttggtaaaacagcgattgtggagggcttggcgcagcgtatcgttaaaaatgacgtgccagacaatctaaagaataaaacgattatttccctcgacatgggcagtttggttgccggtgccaagtatcgcggtgaatttgaagagcgtctgaaagccgttttgaaagaagtcaaaaagagtgaaggtcaaatcattctgttcattgacgaaattcataacattgtcggtgctggcaaagctgagggatcaatggatgccggcaatttgcttaaaccgatgctggcacgtggcgagttacatttaatcggtgcgacgacgctggacgaatatcgcgaaaatattgaaaaagataaagcattagagcgccgattccaacgggtgctggtacaagagccaactgtggaagatacgatcagtattttacggggtttgaaggaacggtttgaaatttttcacaaagtgcgcattcatgattcggctttggtagcagccgcgacattatccaatcgttatattacggatcggtttttaccggataaggcgattgatttagtcgatgaagcctgtgccacgattaatgttgaaatgaactcgcgcccaactgaactggacgtggcggagcgtaagcagatgcagcttgaaatcgagcagcaggcgttaaagaatgaaagtgatcccgcaagtaaaaagcgcctggaaaatgcaaacgccgaattagccaatttaaaagaaaaaaccaataaactcaaagcacagtgggaagccgagaagaaggatattcgccaacttaacgaaaagaagtcggcgattgacaaagctaagcatgaactggaagatgcccaaagtcggtatgatttggaaacggctgcgcgcttgcaacacggaacgattccacaacttgaaaaagaattgcaggcaatggagcacagtgatcggccgcagtcttggctcgttcaagaaagtgtcacggctaatgagattgctgctgttatttcacgagaaaccggtattcccgtggcaaaactggttgaaggcgatcgtcaaaaattgctgcatcttgccgataatctgcatcagcgtgtcattggtcaggatgaagccgtcacggcagtttcagatgcggtattgcgttcgcgcgccggactgcaagacccaagccgaccattagggagttttcttttccttggtccgaccggggtggggaagaccgaactcgcaaaagcgctggccaaggatctgtttgattctgaaaaacacatggttcgaattgatatgtccgaatatatggagaaggcgagtgtttcacggttggtcggtgcggctccgggttatgtcggttatgaacaaggcggtcaattaaccgaagcagttcgccgcaatccgtatacgattgtcctattagacgaaatcgaaaaagccaatccggatgtcttcaacattcttttgcaagtgttagacgatgggcggttaacggacgggcaaggacgcaccgttgactttaagaacacgatcatcattatgacctctaacctcggctctgaatatttgctggatggcgtgcaaaaagacggaactgtcagtcagcaagctaaggatcaggttcgtcagttgatcggtaaagcttttaaaccggaatttctcaatcgcattgacgatatcatcatgttccatccactttcactagatgatgttaagaagattgccgttaaggacctgcatgagctgggaacacgcttggcagaccagcaaattagtttggacatcacgccagaagctcagacctggttggcggataagggctatgacccggcatttggtgcgcgtccgttgcagcgtctaattaccagtgccgttgaaacgccgttagccaaagagctcattcgcggaacgattcagcccggtcaggaagtggtcataaccgttgcggatgatcagctgcaattcaaagcaaaacaagtagcagcgaagtcataagcctgtaatagctgaattattctgtaaagacccttgccttgacgccgcttttcatgtatgattagcgttgctgtgacagaacatgtttctgtccacgcgtgacgatgattggacttgcattttgatcatcgaccgtataaagtagtttagaaatcttactaaaaaaggggttttccgctcatggcagttccagcacgcagaacgtcaaagaccaagaagcgtatgcgccgcggtcacattaagttgaatgtgcctaacttgcaattcgatgcagcaaccggcgaataccgtgtttcccaccatgtttcacctaagggttattacaagggtgcacaagtggttaagaagtctgacgacaacgcaaatgcataacaaaaagccaacatctcgggtgttggcttttttgttggcgccaaatgatggcggcactagacgtcagcagtacgtggcgttcaacatttctttcatgacgaaactgagggttatctagttttcaaaaccacatctcatgatataatacgactaaaagaggtgcgatcaatggctgataacaaacaattttcggattacttagcccagcttcaaaaagcccaatttccgcggtgggctgacttaccgcaatttgatctttacatggatcaggtcattcagtatgtcaatgatattgtgacgccacttggttttggcgaaattacatcgactatggtcaataattacgtcaaaaaaggcgtcatccaagcacccgtcaagaaaaagtatcgccccgaacaattagccaacatactggtcattgccatgttaaaaccggtttttgctttggatgccattgccaaggggattcagtttgctaaagaaggccgcccggtagctcaagcttacgatacattcattttgacttttatcagtgccattgagcaggcaaactccgacttcaacgacaccgttgccattaatcgaaccgttcagccaagcaccgctgccacgcaacatgccgtggtttcgttagccatcaatgcggttttgcaaaaactgatggttgaaaagctgctgacgctcacccaagtccctgctaatgagaaaggaaaaaaggcatgaagctgaccattttatcgacgagtgatacccatggctttgttttgccaacgaattatgttaaacgcgaccagaatctgccgttttcattggccaaggccaaaacggttttggatgcccaaaaagcgatggcagaagggcctgtgctgaccatcgaaaacggtgactggttgcaaggctcgccgttagcctattatgccgccaagatgaatcggaagcctgaacagttgacacaaatctacaatgcggttgggtatgatgcgggaattatcggtaatcatgaatttaactatggttccgattatttacgtcaagcgttggcgacactcaattacccaacgttaaatgccaatatcacgaaagccggtcaaccggcatttggcgagccatataagatttttgaacggtcagggatcaaaatagctgttctcggcttaaccaccgcgtatattccgcattgggaggcacccaaacatattgccgacctccaatttgaggatgtcattgccactgcgaacgattacgtgccgcggttgcgcaaagaagcagatgtggtgatcgttgcttaccatggcgggtttgaacgcaatttaaaaaccggcgaaccgactgaacgcttgacaggagagaatgttggctacgcattgacgcaaataccgggaatcgatgcactgatcaccggtcatcagcatcgacagttggcggcgatcgtcaatggtgtgccggtgacgcaaccgggttatcgtggtgaagcagttggaaagataacgctgacgcttgcgcagacaacgaccggttatcaagtgacagatcagcaggcagttttggttaaagccggcacggttaatcccagcgcagttattgagcaagtagcagaaccgttaaatcaagtcgttgaaacgtggctcgatcaaccattagcacgggttgaaggcgatatgcggattcacgatccatttgcggcgcgggttaaagaagtaccttatattgaattcattcagcgggtgcaaatggcaagtaccggtgcggatatttccgggaccgccttgttcaacaatgaagggtgtggctttggctcaaccatcacgatgcgcgatgttgtcactaattatatttatcccaacactttggcggtgctgcggctgactggtgctgaactgaaggccgcgttagagcagtgtgctacttatttttccctaaatgctcagggtcaattgatggtcacgccgcgatttgaacggcctaaaccgcaacactacaattacgatatgtaccaaggcattgattatactttggatatttccaaaccggttaaacagcgcgtcacgaaactaacttatcatggcaagcccgtggtcagcacgcaaacttatgacgtggtgatgaaccaatatcgagctgcaggcggaggcaattttgccatgttcggcccggaaaaggttatccgcgaaaaccaaaaggacatgactgaactgattgctgattatttgaaagctcatccggttttaaaagccgaggccgaccataactttaccgtggtatcgtcaatgtgacactgagtcatattctgcttgtcaagtggcgggtgaacgcttatgctgatgagcgtcatcattaggttaagtgaaaggaatgttccgcatgaagttttggaaatatggtttgattggtttattagcactgctgctagtaggctgcggccaacaattaagtacgacaaaggcaacttacggacgcaatggtttggttgcgacgatcaaaggcagtgcaagcggggttgatcgggttaaatatacaagccaagccggtaatggcagcgtgccggtgaaaagcggaacgtttgtggtcaatgtaccggtgacggatacaacccaacagatcaaactaacagcgggatcgcttaaacgtgaagtcaacgttaaggccggtacatcactggggcagtacactgctattgcgaccaaatttaatcaaatgttggccgtttcgagtctctccaaagcagatcaggcaaaactaaaacaaggacaggcagcagcggctgagcttcagaaaagtgcggcaacgatgacgcctgcagaaaaattgacggcggcacaacaggcacagacgctaaaaacattgatggcacaagcaactgccaatacccggggcaagcagttgccaaccaccgctaaaaccggcatccagtcgattttaaaaacggctggcgtcaattatcgtgccagtattgtcaatggtaaggcgatgggctttgctgtcattgtgcctttgtccgtgcttaaagacagcaaaaagatgcaacaattcgcgactggttttggcttgttgagtacagcagtcggagctaatgctaagactgtcttctcgcacttcaagaaactgacaaaagatgccaaatcgaagaacaactcgacaacgatcaagacaattaagagtaacaatgttaagtttgatgtgggttattcaaccaccgacttgtatctttatgtaaccaagtagccaagtttaagcggttgacgataccattaaaaaagcactcgagaaatgtctgccatctcttgagtgcttttttggcgccgcttcgcttgattcacatgttcggcgcactttgcttaatgttctggtttttccgctgacttagcaaaatgttgcataatcggtgggaagaaaaataaaatgacaacaaagatcacactgacaatggcacttgtctttggatcgtaactgctgccgctcaaggcgccaatcaggaagccaacaacttggccgaggatcacgccccagacgatggtaggtaaataccgcatgaaatccctcttttctgtcgtcatcttaccacgactatcgaggaattcaactgaaattaaattattttccagtataatggaaatgaggtggcaagatgacgtttacccaattacaggttcacagcaattataccttattacacagccctttggcactgcctgatttgattcaggccgcaaaaaatcggggttattcggccgtggcattaactgacaccaatgttgtttatggcctggtagagttttatcggcaggcaaaagcggcggggttaaagccgttattagggatgcaaatcgaaattgccgatgccaagttgcttgtgattgccgaaaataataccggttatcatcaattgttgaaactctcaacccaaattatgcttgcccaacagccgcttgcatttgctgatttgctgccgctgaatgggctggcagccgtaacattgcccgattcaccttttggcgtggcagtttctgagcgtcacgaagatcaggcacagacttttctgacaacgttaaaagctaagcaaccaagctccttgtacattggtgtggatgaggaacatcttgaaggaacattgcctgcgtttgcggacaccgtaaagttaccgttacttgctttggggaatgttttgtaccgcgaccccaccgacgcctttacgcaaaaggtgatggtggcgattgaaacaggaagtcagttaaactttcgcgatccggttctaacggatgccgggccagcgtggttaaaaccgccaaccgatgcggccaagccgtttgtgcaagccggcttgcaagcggcggtgacacagactgaagcaattgctgcgcgtgccgatgtgacgattgactttaaacagccccagttaccgcactatcagacgcctgatcaaacgccttcaaaagattatttgaccaagttggctgaatcgggtttggccaagcgctttcatgggcagtcgattccgccggcttatcaagatcggttgcagtatgagctgcgggtcattattgaaatgggtttcgcggactattttttggttgtctgggacgtgatgaattatgcgcacaaggtcaacattatgccaggcgccggccgtggttctgcagcaggttctctggtgagctatgcattggccattactgaagtcgatccaattgaatataatctgttatttgaacgatttctcaatcctgcccgagcgcaaatgccggatattgacttggatattcctgacaatcggcgcggtgagttgattcagtatgttcacgacaaatatggcaagaatcatatggctcagatcattacattcgggacttttggggccaagcaggcaattcgcgatgtcgcccgggtttttggcctgagtcaatttgaaagcaatacctggagtaaagctattcctaacttatttcatattgatttgaaaaccgcgtacgaacaaagtcagccattgaaaaatctggttgccgattcgccaaaaaatcggatgctttttcaaacagctttggctttggaagggttgccgcggcattattcaacccatgcggctggcattgttttgtcagaagaaccattgactgataccgtcgcgctccagcctagtggcgatggactcgaacagactcaggttcccaaagacgatgtagaagcactcggattgttgaagatggactttttaggtttaaaaaacctcaacatcttggcagcagcaagtcatttcgtcacccgcgatacaggcaagccgtttgaccccaaagcaatcccgcttgatgatcaacccacgctggcgttatttgcgcgtggcgacacaaatggggtcttccaatttgagtcatccggcatcaaaaacgttttacgcaaactacgaccaactgcttttgaagatgttgtagcggtcaatgccttgtatcgtcccgggccgatggagaacattgataccttcattgcgcgcaaaaacggtcaggagccaattgcctatccggacccagcgctggccaaaatcctaaggccgacttatggcgtcttggtttatcaggaacaagtcatgcaggttgccaacgtcatgggtggtttcagtcttggtgaagcggatttgcttcggcgggcgatgagtaagaagaaatcttccgttctagctgcggaacaggataaatttattgaaggtgcccttaagcaaggcttcccggaagcaaccgcgaaaaccgtgtatgcttacattgatcggtttgctaattacgggttcaatcggtcacacgcggtggcttacagtaaagtggcgttttggctggcttatctcaaagttcactatcctgccgcctttttcgcggcattgatgaacgccagcatgaacaacctgccaaagctacggacgtatgtacaggaagctaaagcgcgcaaagtggggttacttggtccggatatcaatcaaagcaatggcggctttaaattgagccaaggaaagatccgctttgggttactatcaattaaaggcatgcggcgggattttgtcgaagccatttttgccgcccgcaaaaatggaccgttcaaggaccttcgtgatttattacaacggcttgatcctaagtggttgaaaaccgactactacaaagcaccaacgcttgccggcgcttttgaccaattcagcaataaccgtgcgcagacgctggctaatttggatgagctgattaattccgttaagttagccggtaatgatgtcgggttattttcaatgttagcgccaaagaccattgaggttcccgagatgccggcgagcgagcgcttagaggcagaagcagaagtgctcggggtttatctctccgggcatccggttgataagtatgccccgctaaagacccagtatcgccttattaatgttagcgatcttgaagaaggacgagccgttgacatcttgctattagtacggcatatcaagcggattcgaaccaaaaccggtaaacccatggcatttatcgatggtcaggatgcgaccggtaacgtgtcattaacaatctttcccaatttgtatccaacgatcgagaatctttcggaagacatggttgtattagtcaatggccgggtcgagaagcgcaatgatgatttgcaattggtggtcaatcggattcaggatgcccagccattgttagccaacttgccgaccgcggaattgttcattcgcatggatgccaaggatacggcgatgcgaaccgatttactgaaaaaactgcaagctgctcacgggacaacccccgtcattacggttgatactgccacccgcgaaagcattttgctggataaacgttactgggtcaaggcgcagacggaactgatcgatgcgttaaagacacagtttggcgcgaacaatgttgtgttaagaaaacggcaggaaacctagagaaaattgtaaaatgttctcattttcagggactttgtttcagaaaagtggtaaactcaatgagtatttgtggtaggacatatcgcaaaagaatatgcatgaggtgaaataatgaaacgcattggtattttgaccagtggcggtgatgctccgggcatgaacgccgcggttcgagccgttgctcgcaaggcgatgcatgaaggccttgaagtatacggcatcaattatggctttgccggtttagtggccggtgacatttttaaaatgagcgagtcaacggttggtgacaagatccaacgtggcggtaccatgctgtactccgcccgttatccgcagtttgctcaagaagaaggccaattgcgcggggttgaacagcttaacaagttcggcattgaagcactggttgttattggcggcgatggttcataccacggtgcattggcactaacccgtcacggtttcaatacaatcggcttacccggcacgattgataatgatattccgtacactgatttcacgatcggatttgatacggcggttaataccgtggttgaagcggtggatcggttgcgggatacggctgcatcccatgaacggacctttgtcattgaggttatgggacgtgaagcaggtgacatcgcattgtggtctggcgttgccggcggggccgaagatgtcattatccccgaacacgacttcgatgttaaaaagattgcttcgaagttacaaagttcccgtgaacgtggtcaaaagcatgcggttatcttgctggctgaaggcgtgatgcacgccgatcagtttgccaaggaacttgctgcctatggtgatttccaattacgtgctaccgttttaggtcatatcgttcgtggtggtgcgccatcagcacgtgaccgcgtattggcttcccaaatgggtgcttacgccgttgaactcttgctgcaaggcaagggtgcgttggcagtcggcattgaaaataacaaaattacggcgcatgacgtccggactttgtttgatgccaagcaccacgccgaactttcgctctacaccttggcggaagagttaacattttaatttttgtaaacaaacgacattaacgtctgtttaaataattgcaaggagcgatttcatttatgaaaaaaaccaagatcgtcagcacacttggacctgcaagtaacaccactgatatcatcgttaagttgattgaagcgggtgccaacgttttccgtttcaacttctcacatggtgatcatgaagagcatttggcacggatgaacatggttcacgaagctgaaaagatcacgggcaaaaccgttggtatcatgcttgatacaaagggtgccgaaattcggacgactgttgaggatacccctaatggcaagattgaattccatacgggcgataaggttcgtatctccatggatgcaagcctgaagggtactaaggaaaaggttgccgttacttatcctggtctttatgatgatacccatgttggtggccacgttttgttcgatgatggcttgatcgacatgaagatcaccgaaaaagatgagaagaaccgcgaacttgtcaccgttgttcaaaatgacggtgttcttggtggcaagaaaggggtcaacgcacctggtgttgcgatcaacttgccaggtatcacagagaaggattccaacgatattcgttttggtctggacaatggcattaactttattgctgcatccttcgttcgtaagcctcaagatgttttggacattcgtgaactccttgaagaaaagaacgcacttaatgtccaaatcttccctaagatcgaatctcaagaaggtatcgacaatatcgatgacatcttgaaagtgtctgacggtttgatggttgctcgtggcgacatgggtgttgaaattccatttgaacatgttccgatcgttcaaaagcgcttgatcaagaagtgcaacgctttgggcaaaccggttattaccgctactcagatgttggattccatgcaggaaaacccacgtcctacccgtgccgaagttaatgacgttgctaacgctgtctttgatggcaccgatgcaaccatgctttccggtgaatctgctaatggtgaatatccagttgaatctgttgctgcaatggcacggattgatgaatacaccgaagcagccatgcaggatcaggatgcttttgcattgaaggaatacagtaacaagaacattaccgaagcagtgggtcagagtgttgcacacacggctcgtaaccttggtgttaagaccattgttgctgctactgaatctggctacaccgcacggatgatctccaagtatcgtcctaaggctgatattcttgcgattaccttcagtgaaaagactcagcgtggtttgatggtcaactggggtgtttatcctattgttgccgacaagccggccaacactgatgcaatgtttgacttggctaccaagaaggctcaagatcttggctttgctaaggaaggcgacttgattctgattacagccggtgttccagttggtgaatcaggtacgactaatgtcatgaaggttcaactgatcggttccaagctggttcaaggctctggtgtcggtgatgaatctacaatcggtaaagctgtcattgcaagcaacgctcaggaagccgctgccaagatgcaaaaaggcgacattctggttgttaagacaactgacaaagattacctgccagcaatcgaaaaggccgctgccttggttgttgaaacaggcggcttgaccagtcacgctgctgttgtcggcatcgcgatgggtattccggttgtcgttggtgctgaaaatgctaccagcgttatctctgatggtcagattatcaccgttgattcacgtcgcgggattgtctacaagggtgctactaacgcactttaatcatcatcagtttaacaacgatttttctgaaactcctgaggaaactcgggagttttttattatatcggctagataacccgctaacctgagtgcgagtggttaaaatcgcttaacaggctcgtcagtgtggttgggatagcatataataagacccagcgtgcttgatcggataaaaatataatttcagccgatgaaggaagtcggtaaacgattggaggaagatagccatggaaagttggctgtttttactagcgattcttgctattgcactcattggtaaaaataaaagcctcgttatcggtgtggccgttgtcatggtgttaaaattaattccgcaaacgcaacatttactcaagttattgcaaagtcaggggatcaattggggcgtgacggttatttcggccgcaatcatggtacccatcgcaaccggtgaaattgactttaaggaactactgcatgtcattaaaagtcctgcagggtggattgcaattggctgtggggtattggtggcggtattgtctgccaaaggtgtcggcttgttggcggtaagtccggagatgacggttgctttggtttttggtacgattctgggagttgttttcttaaaagggattgccgccggtccggtgattgcaagtggtatgacctatgtaattttaaccgtttttaatctcttaccgggtcgttaagacggtgttgttgacatgtgaaggagcaataagatgaaatttaatggtcaagtcgtcaccgcacaagtgatggatcacaatgaaaaagaagtgtttgcccaatatgagggtgtaactttagcaatcgaccggcttgaactgccgacgctaccagaaatcggtagtcaacttaaaggccttgcgtatgaaaataaacatggtcaggcacgattgacgaccaagctgcctaaggtgggtcgcgatcactacgcttttgctccggttgttgaagttcgccgagatttaggcgtctttgtcgatatcgggttaccggataaggatatcgtggttagtgaagatcagctgccggaattaagtcgtttatggcctcagcgcggcgatcgtctcatgatcgcgctgacaattgataagaaggatcggttgtgggggaacctagctgatgaaacgattattcgtgccgttgccaatcgtgcgaaaccggaccaaatgaatgctgatgtcacggcaactgcctatcgtttgaaaatggcaggaacccgggtattgacagatgacttttatcttggttttattcatccaagtgagcgcgatgttgaaccacggctaggacaggtcctgcatgcccgcgtcattggcgtgagtgaccaaggcgaattgaacctgtcattaaagccgcgtgcttatcaagcgattggtgacgatgctgctatgattctagccgttttgcaacatgatccggcaggcaagattgcctataccgataaaagtgatccagctgtcatcaagcaggttttcggcatcagcaaaggcgcatttaagcgagcactaggtcatttactgaaggcgggcttgatcaaagaagaagccggttacacggttttattagattcgaatagtcaaccatctcaggaggcatagtatgcatgggttgattgctgattttattcattatctggatgttgagcgcgggctggcccgaacaacgcaggtcagctatcagcaggatttaaccacctttatggcttggttaagcgaccaaaagcaaacaacttttcccgaagattttggggttattcaggcgttcttaaagcatcaaaatgataccaaagcgcctgcatcagtcagtcgaatgatttcggcgttacgcaagttttaccggttcttgttacgcgaaggcgccattaagtctgacccgatgaccaaaatcgatacccctaaaaaagcacaacatttaccggccacattatcagggacggaaattgatgctttgatggcaaagccggataccactaagccgttgggattgcgtgatcgcgctatttttgagctgatgtatgcgactggcttgcgggtatcggaagttgtcggattgcgattggatcagttacatttagcaatgaacttgcttcaggttaccggaaaaggcgataaggagcgactggttccaatcagtccccaagcagccgattgggttaaccggtatttgcaggaatcccgtccgcgtttgatcaaacaccagcaacccaaggcagtgttcgtcaactttcatggtcatgcgctcacccgtcaagcaatttggaagaatctgaaagcctatattgcaagtgttggcattgaaaaggatgtaacaccgcatacgttacggcacagttttgccacgcgtctgttggaaaatggcgccgatttacgggtggttcaggagttactggggcatagtgatattagtaccacccaaatctatacacatctgagtaatcagcatctagtggcggtttatcataaaacccatcctcgtggctaaccgtaaccgacagccgttgagacgttacgggccagaccttttgttgctttgcggaaggtgactaaagtttaaatctaagcacaacggcagatagccaaccgctattcccatggcatagtccaatttagttcacattgccccggtctcgtttctatgatagagtgtctggagagtatcttttggaggcaaatatgctggttaaatataaaaacgactatgagaaaatcgcgatgggacttttatcctttatcccggatctcaaagatgtcgggcatctgaagactgaacttaagatgtacactgaagatgattcccatgcgttgtatttgtataaacatcatcatgattttgtcggtgtggtcggtgttgaattaagtgccgattttgttttggtgcggcacttgagcttctcgccaaacttccgtgatgaggccaccgcatttgccgcattggcagaattaacaaagctttttccagataagaaactgatgggtgcattggaacacgcatcgttgatagctgcttttaacaagtttcgaaaagaggatgaccatggcactgacactcgtgctgaatgatttctccgggccgttggacttgctttggcatttgattcggactaacgaagtcgatatttatgatattccaatcgccgagatcaccacccagtaccttgactacctgcaccaaatgcaggatttagcactggacgtggccggcgattattttgtcatggccgctaatttgatggtcttaaaaagccggctattgttgccacaaccggaaccggaaacaaccgcgccggatgagccgactgatccgcgagctgacttagtggcgcagttgttgacttatcaggtgtatcaggaagcggcaaaggatttaaagcaacgtgaagccaagcgtgcccaggcttttgccaagccaacaactttgccggatgaaaagatggcggttccgcttgctccaggaacggtcaaactaattgatcttcaagcggcgatggcgcgggtcatgaaggcccaacaggcggcgcggcaaacgattgcccacatcgaaacggaaccggtctcggtagaaaaacgcatcggcgaagttttgcgtgccttgcaacaagatggtcaatgtttatttgcggatttattagcagtcaactcggtggaacaggtcgtgacgacttttttggccttgttggaactgatgaagaatgatcaggtgatttgtgaacaagatgcgccatttgatccgatcacggtgacattgaaggaggctgcttgatggagccggtattagaggcaatcttatatacggctggtgaaagcggtgtgacgcttggtgaacttgccagtatcttggaaatcagtgaaagtgccatgcgccaacaactggaggcatatcaacaacgattggccgcagacgaccagcgcggattacaagtacaacagtttgccgatcggtattacctactgaccaaaccggcctttgtatccgcgattaaaaaatattttgcggggccacccgctgccggtctatcccaggcagcattggaggtgttggccattattgcgtatcagcaaccgattacccggatagaaatcgatgaaattcgcggcgttcagagctccggtgcgcttacaaccttagcatcgcgacaactgattaaagaagcagggcgcaaagaagcaccggggcgtccgattctatatgccaccacccagtttttcctggattattttggcctcaatcaattggccgacttgccgccactagccgatgcacctgaggatacaggagaagtcgatctctttacggcatttcgcgatgatgatcagtcacaaacggctgaagatgataagaaaatggagcaaaaccaacaacatgacaaccaaaaatgaacgactgcaaaaagtcattgccaacgccggtattgcatcacggcgacatgcagaaacactcatcgcatctggccacgttaaagttaacggtcacgttacgacagaaatgggcatcaagatcggaccgcatgataccgttgaagtagatggggtgccaatcgggaaggaagccaagcgctatttcctgttctataaaccacgtggcgttattagtgctgtcgaagataataaagggcgcaaagttgtgactgattatttcgaggacgttcaggaacgtctttatccagtaggccgactggattacgatacgagcggtttgctagtcatgaccaatgatggcgaattggccaaccatctcatgcatccgcgctatgccctggaaaagaaatatgttgccaaggttgaaggaatccctaaccgaccggcgctagcaccacttaagaccggtgtttcaattgatggtaaaatgacggcaccggcaaaggtcgaaattttatcaactgataaggctaagaaaaccgcaattgtggccttaaccattcaccaaggtatgaatcatcaggtaaaaaagatgtttaaagcagttggttttccagtgatcaaactttctcgtgaagcgtatggtaatctgaccttggccggattgcagccaggggaacaccggccaatcaaacctcaggagcttcatgatctccgccaattaaccggtgagcaagaagaagcacattaattgttaacgcattcaaggtaaatgcttgaatttgtgagggttgtttgctacagtgtgattgtaattaaataatttggttcgtcttcagggcagggtgcaattcccgaccggcggtataaagtccgcgacccgctttttgcggtggaaccggtgtgattccggtaccgatagtgatagtctagatggaagaagatggggcttttttgaatctgtattcaatcaaagacctattcccccctgaaggaggaataggtctttttaagttccggaagacggcctcacggaggtaatgttttatggcaagtcgttctaaggttcatcgtttggtgggcattgcgcttttggcggcaatcgggtatgtgctgatgatgttttcattcccgattattccggcctttccctttttaaagttggatttgtctgacttggttgttcttttagggggattgctttatggtcctgttggcgggattgctgttgcgtttgttcggagcttggttcacttcgctttaactggcggtggtgttgttaacctgattggtgatttggccgcctttattgccagtgtcggcttcttgttaccggtcgtttatacgattcgcggtaagcatcggatttggcggcagattgaagggctggttttagggaccttgagtttgacagttgtgatgagcgtgctgaactggctggtgatcaccccgatgtatatggctgtcttcaatttcaatttagggatgtctttgactaaatatgttctaattggggttgtgccatttaacttaatcaaaggcgtcgtcatttcagttgccttctttgcaattgcaaaggcactggctccatggttagcacgtcaggaaatgcaaatgagccattaaaagctgttccggttttcatttgactgatcggttcacttagacaagcaaaaagcatccaacttgcgcggatgctttttgtttgcctgaaaatgttagcgacataaacgttaacaggaatcaatgcgtaatttatcgatagcggtctaatttggctgtccggttacgcttgattattccgcttttgttggcgtaaacggagccgtgttaaacgggtggtcactgcgtttgatggcatgtgtcgggcaacgctgatacgcaagccgaaaatcaatttttgcatgatcatccaggggttttgtgcctgtgttgcgatcaggcttataataagcaataccggcttcgtcatagtcaaacaaggctggtgccaacatttgacacaatccacaagcaatgcattcgggacgttccactctgccatataatgccatgttgatagaggactcctttataattttcagtttaaccacacccaagtatacaataatcaatgaaaaagaggtgattggcttgttgacagacttggccattcaattttttgatacccagccacggcgagagcgagctgtattcggcctgttagccggtaagaaaaccatttcaaatctctatgccgctttaacccaccagcaattgcaatggctgcagctttatccaagcctgtctaaagagttgtttttacagacagtggcgcagttaaaaatgcatggtcagttaacaacgacagaaaccgggttggtgttaaccgcaaagggccaacagtttcagcgtcaagcggcaaagcgggtgccattaccgacctactatcagccgtggatgcacctgtcaaaatttgcgccgcggttctttttggccattcaggttttgtcagaagccagttaccactcacaggcatatcgtccgattagtaccgattgggcgaatcagcaagcggttaaacgctggtatcgccaactgaatatcgagtctgcgattgctgatctgattgcgctttttgaacggttgccgccgcagttagccgacatacttgcggctaatctaattggtcacgagtacgctggtcaagcgcagccgcctactttaagcgcgcgtttccgccgcattaatgctttggcagccttagttaacgagattgcgggaattaaggatgaaggcaatccgtggtacgagttatggggcggcccgcaagatctggtgacgcgtccggcacgttatagtttacagcaagtccaagccggtgttggcttaaaggcaattgcaagtaaaagtcaccgtaaactgagtaccgtgaaagagcatttgctgctggcggctatcatgggagagtcgcttccggtcgaacaattgattccgcaaccgatccatcaagcattggatcagatcgatcattggcaggatcatcaagtcttattggatgctgttccagctagtgacttctttcaggtacgcttgtttcaaatcttgaaattgcaagggagatggtcgcgtgtcgcaacttgaaacggccttggcgcagcattttggctttaaacagtttcgtcccgggcaaaaagccattatcgaatccgttcttagtggacgtgacaccttaggcattttacccaccggcagcggcaaatcactttgctatcaattgccgaccttaattaaccataaaccgactttaattgtcgaaccactgattgcattgatgcatgaccaagtgggacggctgcaggcagcgggcgaaaaacgcgttttggcattatccgggcaaattgcgccgcctcagtttgctcagattttagcgtatttgaacgtttatcgctatctgtttatttcgcctgaaatgctacagcgaaccgatgttatgtctgcgttgaagcagctggaccttgggctgctggtaattgatgaggcacattgtatttcacagtggggaccggattttcgtcctgcctatttacaactggggcgagttagggcgcagttgcacgtggatgccgttttagcgttaacagcaactgcaccgaatcaagtccgcagcgatattttaaagcaactggcaatgcaaaatccgaatacaattgcggattcagttgatcggcctaatatttttctgggcgttgagatgtgtcaaaatgaacaggagaagcatcagcgcctagatcaactcttgcaagccaatgtcggaccaacgattatttattgtgccactagggcagcagcggaaaacttggcaacggtgttaaagaacgcgggattgaaagccgctttttaccatgccgggttggattcacatcaacgtgatttgattcaacgtcaatttcaatttgatcaactgcaagtcatctgtgctacgagcgcatttggtatggggatagataaggctaatgtgcgcttagtggttcatttatatgtacccgagtcgcttgaggcctattatcaggcaatcggtcgggcagggcgagacggcgccgcgagtctggctgcaatgattgtgacgcaagacgacttgaaccgaagccggggacttgcggggatgctgccggatcaaacgatgatccagacagtttttgcccatcctgatatttatcgcgatttcgacgatcctcaaataaatctgatcgaagcctatattgcagccggtttttcgctggcacaaacgcaacaacaattgcagcatcggctagcagaaaagcaaacaagttttatggccatggccgcatttgtcaatgaatccggttgtcgccgggcatggttactcaagcactttgattcaccgtccatttcacatcatgccttttgttgcgggccggtgacggcggaagtgctagagaagttagagacagcgaatgtatcggcacagcttccgcctaagcactggcaggcagtttttaggcaaatctttagataagcggcgtcttgatccggttcaatatgatacaataaatccatgtagtgaggaggatcgtgatggcggaaaaagataaaaaccaacatgataacgcggatcaagaacaacatcagggtgaggatgccaataagccttgggaaacccttttcgatgacgaccgtgacgatcagggcaatttaagccgagtcgccacccgtaagaagcggcaaggtagttcgaagctgacttggatattggctattttgctgatactggcagttttagcaccgattatttattataaagtcatggataatcaaggaagcagcggtggcaacctgtcaaatgacaaggttgtgattcaaagcgccaaaaagaccagtcattcatccaagaccaagaaatccgccaagtcttccaaaacgtctaagacttctaagacttctgcaaaggaagcctcaagtagccaacaggcaacatctgcgcaagcgagctcacaggttagtcaagcacccagcgcctcccaaaaccaggagcaggcaagcgcgtcagcagcaccaagtcaggccagtacggctggcaactcctatacggtcaagtcaggcgacaatctttatcggattgcggttaaccacaacatgacgttggacgagttgttacagttaaacggtcttagtgccaactccggaatcacaccgggaaccgttttaaaagtgaaataatagtgacacggccctgttcggatggttaaatcgatgaacggggttgtgtgttgtggaggaagttcatgcagattgcgattgacggccctgcaagtgccggcaaaagtacgatcgcgaaacttgtggcaaaaaaattaggttatatttattgcgatactggtgcgatgtatcggactgttacttatatggcgcttaaagatcagttgccattggatgatgaaacgaccattttacagcatttgagtcagctgcagatccggtttgcgcctggcgatccagaacaacgtgtttttatgaatgatgaagatgtgacgttggcaattcgtgaaccggacgtgacaaataatgtttctcaagttgctgctttgccaggtgtccgaactgaattggttgagcggcagcgggatattgctgcaaaacatgatattgtgatggatggccgcgatattggaacaaccgtcttaccgcatgcggcactgaaaatctttatggtagcttcggtgtcggaacgcgcaaaccgccgctacaaggaaaacgttcaaaagggaattaaaacgccacttgccacgctggaagcggaaattgctgagcgtgaccgcaaagattcccagcggaaggtttcaccgttacgtcaagctgccgatgccattcgtatcgacacaacgagtatgacaattgaagaagttgtcgcgaagatattagcattggttgcagaaaagaagcaggcagattgaccagagcaaaataagcgctggtaatttgattcgttttcaagtacaatagatccagtatacagctgcataggaggattttttggcatgagtgataataacgttaatgagaacaccgaaacaatggcggacgcccttaagagtgtcaccacagtaaagattggtgacactgttaaagcagatgtccttgctgttgaagataaacaattgatcgttgggatcgaaggaacaggcgttgaaggcgtggtcccgatcaaggagttatcaactcagccaatcgatgacattcacgatgttgccaaagttggcgacaaacttgatttagttgtgctttcaacggttggcaaagataaagaaaatggtcagttcctactgtccaagcgccgtctggaagcacagaaggtttggaaagaaatccaagctaaatacgaagccggcgaaaccattaccgcaccggttaccagtgtggttaaaggtggtttggttgttaacgcaggtgtccgtggattcgttccggcatccatggttgaagatcacttcgttgaagatctcaatcaatacaagggcaaagagctcgaatttaagattattgaaattgaacctagtgagaaccgtttgattctttctcatcgggcaattgttgaagcaagcaaagccgaagcacgcaaagaaatctttgcaaaaattcagcctggtgatgttgttgaaggcaaggttgctcgtttgaccaactttggtgcctttgttgatcttggcggtgttgatggtttggttcatgtttctgaaatttcatttgaccatgttgataagccaagtgatgttttgaaagtgggacaagagattaaggttaaggttttgaatgttgatcctgaccgtaaccgtatttccctttcgatcaaggcaaccttgccacaaccatgggatgacatcgaagaaaaagcgcctgctggctcggttttgaccggtaccgttaagcgtttgacaacttttggtgcttttgtcgaagtattccctggggttgaaggactcgttcatatttcccagatttcccatgaacatgttgcgaccccggcagatgttttgaaagaaggccaagaagttaaggtcaaggtgctttcggttgatccggatgctcatcgtctggcattgtccatcaaagccttgcaggatcgtccagctggttccagcgatgcgtccgagggtcacgaaggcggcaataacggcaatcaggaacgtcggcgttcatcacgtcctcgtcgtggtaacgatcgccatcagtcaagctcgatccctgctgaatatcagcaagatgattctggcttctcactcggcgatatccttggcgatgcgttgaaagatgccgctaaaggtaacgatgatcaggatgataacaagtaattttaccatccgttaaaaagttgagccttggctcaactttttttatgctaacgctgctgtttataatttatatactggcagtgagtgaactagatcatgttaagctactaaaaacaaacttggttaaagaaaggaggccgtgatatatggtcttaccaacacttgccattgtcggacgtcccaatgtcggtaaatcgacaatttttaatcgaattcttggtgaacgggtctcaattgttgaagatactcccggcgtcacgcgtgaccgaatttatggcaaaagcgaatggctaggaaaggaatttgcggtgattgatactggtggtattgatctcggtgatgaaccttttttagcgcaaatcaaagatcaagcagaaattgcgattgacgaagccgatgtcattttatttttgaccagtattgaagcaggcgtgactgacgcagatgaacgggttgcccagattctttatcgggccaataagccggtcgttttagccgtgaacaaggttgataaccctgaacgccgccaagacatttatgatttttattccttgggttttggcgagccgctaccgctttcaggtacgcatggtattggcttaggtgatgttttggatgccgtgctagctgcatttcctaatgaagccagtgcggacgaggatgattcaatcaaattcagtttgattggccggcccaacgtcggaaagtcctcgttggtaaatgcgattctgggagaaaatcgggttattgtcagcccgatcgaaggaacgacacgagatgccattgatactaaattcgaagctgacggtgaaacttttacgatgattgatactgccggcattcgtaagcgtggcaaggtgtacgaaaataccgaaaaatacgcggtgatgcgcgcgttacgggccattgatcgttcggatgtggtgttattcgtgatcaatgcagaagaaggcattcgggaacaggataaaaaagtggccggttatgcccatgaagccgggcgcggcattattattgtcgtcaataagtgggacacacttgaaaaagataatcgcaccatgaaagactttgagaacttaattcgtcaggagttccaatatctagactacgccccgattatttttgtttctgcgaagacacatcagcgtttacagagtcttccggccatgattgtcgaggtttcagaaaatcaaacccggcgaattcaaagcagtgtcttaaatgatgtcttaatggatgccattactgttaccccaacaccgacagtcaatgggaagcgtttgcgtatttattatatgacgcaagtggctgtcaaaccgcctacattcgtggtttttgtgaatgatcccgatttattgcatttttcttatgagcgtttcctcataaaccagttacggcaggcatttgacttttccggcacgccgattcatgttattgcgcgtaaacgtaaataaatttgacaatttctgacaatgacttttcatttaataaatcgtgattttcgataaaggtttcaaggatctcagccaaaaagtttggcaaaaaccttgtcacaacgggcttgctatgctatgtttaaacctgaaatgatgatacataattatcattgtttcttcattcctgagcggtcaggaatgagcatgtttagatgttcacgcatctaatcaattatggaggtgaaatattcatggcaaacaaagcagaattgatcgaaagtgttgcaagtgcaaccggtttgaccaagaaggatgcaaccgcagctgttgatgcagttttcggctctatccaggattccctttcaaagggtgacaaggttcaattaatcggctttggtaacttcgaagttcgtgagcgcgctgctcgtaagggtcgcaacccacaaactggtgcagagatcaagatcccagcatccaaggtaccagcattcaagcctggtaaagcacttaaggatgccgttaaataaacggttttctgaggcaacaatgaagtaacaccaaaaaccgagtcttaacggactcggtttttgcgcgttttggcgaaagccgtgtccggtgatggtcatcaggagcattcaaaatcgtcagacgcgtgttagacttacactagatagcgtttatatttaattattaagtcacggaggcagctatgagttacgcaaaaaagatgctggatgcacttgaggcgggacaaatggaaacagcgcgccaactgtttacgcaggttctggcgcatgacgatgacgaaacccaatacaatctggccgaagaactttacgcactgggattcaacggtcaggctaagcgtttgtaccaaggcttgctgggtcgttatccggagcaaggggatttagcgaccgccttggctgatatcgcggtttctgacggtgatgccgatgcggctttaaattatctcagtcggattcagccggatgatcctgcctacgttcaaagcctcatcagtgcggctgatgtttatcagtcgttgggattgtatgaggttagtgagcaaaaactactgaaagcgaaacaattagccccaaaagagccagttgtgacgtttgcacttggcgaattttattttgactgggggcactttggtcaggcaattgcggcatataatgagctgcttgctgctggcacgacggaactggccggtgtgaatattgaagctcggctcgccgctagcttggctcaaaccgggcaatatgaagatgcggttgctgcgtatgaagacgttggcgttgacgcattggatctgaatggccggtttgaactaggtggtttgtacctgcagctgcacgatccggctaaggctattgcgaatttgcaggcagtgattgataccgatccgagttttgccaacgcctatttacccttagcaactgcctatgaggcacagaaccagcctgagaaggccctggatacggttcaagccggggttatggttgatgatacgaatccggatttgtacgcgttaggcggcaaactagcgcttagtgaggacaatcctgatttagcggaaacatatttacaaaaagctttgaagatcgatcctgaagatcaaggcaatatgttggcatggagtaattttctggtgcaagaagaacgtgatcaggagaacattgattttcttagtcgcattgatcaatccggtgatgttgatccgcaaatctactggaatatggccaaaagctacgatcggcttgataatgtacaaaaagcccgggaaaattacctgttagcgtttaaccgtttccaggattcgccggactttctacatgatttaattgatttcttccagtcaaccggtgctcgcaccgagctaaaggcagcgctggttcgttatcttaaactggtaccgactgatgatgagatgcaaatgcggttggacgatcttaatgatgagacgtgatccggtctcggtcttaggctaatggccgaataaaaggcgtcggcgcttcttttgataagtgaacccttcacccagtgcttcatggacatccagaatgctaataaaagcacgcggatcaatggcttcaatcagccgttttgtgtgggcaatttcgctggaagccaccacggcgtaaacgacttgcttgcggtcatgggcaaagccgccttctgcatgcaaaaaggttgttccgcgttcaagctcgtccataatcgccgtggcaattgcctggctgtggtccgatacgactaagacacccttggcagcataggcaccatcaagcgtaaagttgacgatgcgcgagaaaacgtaggcgccaagcagcgtgtacatcatgagctcaatgtttaagtatgtcagggaaacggtcaagacaatggcatcgaatatgagcagcgttcgccccattggcacgccggtttgctgctcaaggatgcgggcaacgacatcggtacctccagtggttccgccatgtcgataaataatcccactaccaaagccgccaaaaagcccggctaaaacgccggatataaacaagtcatggtgaatatcaatgcttaagggcacccgttgccaaatccacaaccaagcagataacatcaaagttccatagatggtataggctaaagcacgcttgcccaaaaatttgtagcccacaatcagcaaaggaatattcaacaaaaccgtgctataagccggatccagaccccaccagtaacgaatcagcagagtgatcccggtgacgccaccttctgctaggtgattggcaatattgatatacacgagtccaaagccgtaaagcgcacagcccaaagtgatcactaaaagatccagtccgattcgcgtgttacgtgacatgagatgcctccctgaaaagattttaagctcattttaacagagattttatttttcggtatgattaaggggaggtgccggacgaaagtaagaggagaatttgatgcaattagatttaaaccagccagattttaaagcagcgatcccgatcttgaaaaaaatcgaagcagccggatataaagcctattttgtgggtggcagtgtccgcgatgccttactgggactgcccattcatgatgtcgatattgccagttccgcatatcctgaagaaatcaagcggatttttaagcgtaccgtggatactggcattgaacatggcacggtgatggttctggatcatggcactggctacgaggtgacaacgtttcgaaccgaatcggcttaccaagattttcgccggccggatcatgtgacatttgtacgctcgttagctgaggatttgaagcgccgcgactttaccattaatgccttagcagtgcgccatgatgggacgattattgacttatttgacgggttaacggatttaaaaaatcgccaattgcgcgctgttggcgacccgcatgaacggtttcatgaggatgccttgcgaatgatgcgtgccgtccggtttgaaagtcaactcgggtttcatattgaagcgacgactaaagccgcgattgccgctaatgcaccattattgaagcatatttcagtcgaacggattgctgcagaattcaaccggcttttggttggcattgaccggcgtgccgggatgcaagactttcttgatacgcacctgtttgcctatgcacccaagctagcgcctcatcaagcagcattgcagcaatttagtgaattgccaaatcaagcgttcacaagtattgccagtggctggacggcgttgatcttcatgcttaaagtcgcgccggaatcgtttttgcctgcgtggaagcaatccaatgacttgatgggtttagttgaccaagccgtgaccttgttgcggaaaatgccgacaccgactgcttgggatctctacagcgccggatcagcagctgtggccgtggtcagtgaagtcgccgcattgatggatcaccagtttgtcccggcatcgctgacgactgcttacgaagcgttgccgatccattccaaaaaaaccttagcactgactgggcgtgatttaattcaagctggcgtgcgcccggggccggcgatgggcaagattttgcatcaaattgagtaccgcgtggttgatggcagcttgccgaatgattcaaaaaagttgttagctgcagctattgaaatgtctcgagaaccgtcgtaagtgtgttatgataggcatgtaagcacattcaacaacatcatgaggggcggaacagattagctgtgatgcgcgcgaaagtatccggttaattgttgctctgacttgatggcgaagggggatttccaatggcagaacatgtttttgaacagttagtttttcattttcgtaatggtgacgaatggacggtgcaacatgatgaattggcagatgtctggatcagtcgggtgacgaccagttacggccggattcacggtggccagattcaagaaattcatccatgcaagagctttaaggtcgagatcttgcctgaagccgaccacgttaagtccagtgatattaacaccggctcactggaaatggggatgtttgggcgcgcaacaaagtatcaggacattgaaaagatggatctggtttttgatgatcagaccaaaaagcaggttcagatttattttccgttcaagcaaaaagatccaagcgggctcgataatgaatatcaaacgagcaagcttgccaaaaatggccacctttacattgtgattgatgctcagcataccgtggatgatgaatatccgcgaatttaaagcggcctgctaaactttaattatttcatcaatatcaggggcgtctgattccagtacgagcggttgaccgcttacgactgatcacgcgccccttttcttgtgccttgcttcttgctaagatggacaacgacaggaaatgagggacgacatgcagacgctaacagcacagggcctgagcaaggcttatggtgataagcaattattcaatcaaatcgactttttgattaacgaaggcgagcgaatcggtttgattggggtgaatggtaccgggaaaacgacgctcatccggtctttagccgggatggaatcggttgatgccgggacgattaagaccccaaagcagtatcgcatcagctatctcgcacagataccggagcttgatcccgacttaccgattatggatgcaatctatcatggtgattcaccggtttttcaagcaattcgccaatatgaacgcgctttggcagcctatacaaaggatccgttaaatcaggcaaaaaccgatgcctataccaaagccgatgctaaaatgacgcaagaggatgcgtggtcggcggaaaccgatattaaaacgatcctcacgcaattgcacatcggcgacttaacggcacgggtcggcagtttatctggcggccaacaaaagcgggtcggtcttgcccaggtattaatcgagtcgccagatttgttattgttagacgagcccacgaaccaccttgattttgactctattgcctggctggaaaattatttgagtcattaccgcggcgccttggtcgttgtgactcacgaccgttattttctggatcgtgtaaccaatcgtattttcgaattagaccgcggtcggcttttccagtatcaaggcaattaccaagcgtatgtcgccaaaaaagcagaacaactggaagccgaaaagtcggctgggcataagcaggcacaactttatcgccaggaactggcatggatgcatgctggtgcccaggcacgatcaacgaaacaacaggcccgtattaatcggttcaaggcgctacaaaaagcaaaagacgaagcaccggcacctgaccagcagctggatccgattcaaatcgcaagtaccagactaggcaagaaggttattgaaatacatgatgccagcttgcgatttgatcagcaggtcatcttaaatcattttgattggctggtgcagccgaatacccgcatcggcattaccggtcaaaatggtgctggtaagtcaaccttgctcaatattattgcaggtaaacaagcgcttgatagcggcaccattgaattgggggagacagttcggttaggttactatacgcagcttaatacgaatctggatccaaaaaagcggatcatcacctacttgcaagaagtaggcgaagaagtcgtgcaggcagatgggcagcgcgtttcggtgactcagatgctggagcaatttctatttccacgcagtatgcacggcactttgattggccgcttatcaggaggcgaaaaacggcgcctatatttactacaggtattgatgcgccaacccaacgtgttactgttggatgagccgaccaacgacttggacatcgccaccttgaccgttttggaagattatcttgatcattttcccggcaccgtgatcaccgtgtcacacgatcgttactttcttgataaagttgcggatcagctgcttatttttgatggtaatggccgaattgaacgcgccgtgggtgaattttccgattatctggcaaaacaaaaaccgcagtccgctgcatcaaaaacaaactcagccgcggccaagccaaaagcaccggcaaaaaaagcggcgccaaaacagaagtcaaagctgacatatgctgagcagatagagtatgataagctccaacaagaacttgatgaattagacgagcagttggccaaggttaaagcagaaatggcgcaggtcaatggtgaggattacgtgaagctgggcgatctgcaggcacagcttgatgcgatcaataaggatattgaccagaagttcgatcgattcgccgagttggatcaatatgtgtcgagtagtgaacggtaaaggagcagagcagacaatgttagaacagccatatcttgatcttgcaaaaaaagttctggatgaaggccatttcaagcctgatcggacccatacaggaacttacagtattttcggccaccaaatgcgtttcgaccttagcaagggctttccattactgacgaccaaaaaagtaccattcggccttattaagagtgagttgttgtggtttttacacggtgataccaacattcggttcttactccaacacaggaatcacatttgggatgagtgggcgtttgaaaaatgggtgaagagtgatgaatatcacggcccggacatgactgattttgggcatcgcagccaaaaggatccggaattcgcggcagtttatcatgaagaaatggctaaattcgatgaccgggtgcttcatgatgatgcttttgcagccaaatatggtgatcttggcttggtttatggatcccaatggcgggcctggcatacgagcaagggtgacacgatcgaccagttgggggacgttattgagcaaatcaaaacgcatccctattcacgacggctcatcgtgtcggcgtggaatccggaagatgtcccgacaatggcgctaccgccttgtcacacgctctatcagttttatgtcaatgatggcaagctgtctttgcagttgtaccaacgttcggctgacatttttcttggcgtcccgtttaatatcgcgtcctatgcgttgttaacgcatctggtcgcgcatgaatgtggccttgaagttggcgaattcattcatacattcggcgatgcgcatctttacgtcaatcatcttgaccaaattaaagagcagctcagtcgcacgccgcggccggcaccgactttacagttgaatccggataaacatgatattttcgactttgacatgaaggatattaagttgcttaattacgatccttatccggccattaaggcaccggttgccgtttaatcgctagaagacggcaagtcataacaagtgtctgattgctttgtcaggtttaccaatgacacaaaaggcgccattttgttcggctttggattgcatactcaaaggaggggtctcgaatgaccgcatttttatgggcacaggatcgcgatggcttaattggcaaagatggtcatttgccatggcatttaccggatgatttacattatttccgggcgcagacagttggtaagatcatggtcgttggtcggcgcacctatgaaagttttcctaaacgtcctttacctgagcgaaccaatgttgttttgacccatcaggaagactatcaagcgcaaggtgccgtggtcgtgcatgatgttgcggcggtttttgcttatgctaagcagcatcccgatcaggaactggtcattgctggcggtgcacagatctttacggcgtttaaagatgatgtcgatacgttactggtaacacgtttggctggcagttttgaaggcgatacgaaaatgattccattaaactgggatgattttaccaaagtctccagccgcaccgttgaagataccaatccggcgctgacgcacacttatgaggtttggcaaaagaaggcttaagcagaagccgatgaccggaattggtggttgccagctggtgcgggtgtgagtttagacgcatatttgcgtgcatttaaaaaatcgtctctcgtacagaagaggcgattttttgtcgtttattttaatcaattattttacagatagaaataaatagataagtacatgcacaggctgccgagaatcacaaagaggtgccagataacgtggatgtaggggatgcctttttgcagataaagcatcgccccgcctgtataagccacaccaccggcgactagcaaccaaaaaccgactgggcccaaatgatgccacaatggaaccatgccgactaagcaaagccagccgaggacaacgtagatcatcgtttccagatgcttgaagcgattcagaaagaaaagtttgtaggcaatgccgccgagacacaatgcccagatggcgattagcagaccaatgccaagtttcccgccaatagcgaccaaacaatatggcaggtaagaaccggcaatcagaatgaagacacctgaatgatcaagtacctgcaaaacatggcgcgccttgctaaaataaaaaccatgaaaagcagtcgaggcggtgtaaagcaacatgagcgaaacgccaaaaccgagaagactgaaaagttcaacttgactgccgctattgacgcctttaatgcctaacgcaatggtgccggttacggctaagccaagtgcaaacgcatgggtgatggcgctaaacatttcattgttaaattcataatgacttgattttgacacgcgcattgtttacctcctgatgaacatttgtaatgggtggggaagatggcaggcttgcaaccacagcatggcttaaatcaggaactcgatcgtttggctgctacctgtttattaaaagtttagcatgttacgttttacaatacaactaaatctagttatgacaactaggtgatgtgtactgacattgtttaagtagtttgctataataatcacgatagacgaacctaacagaaagcgtggctcagacatggcaaatatcaagatcgtcacggattcttccgttcagctgactccagaagaaatcagccaacacaatattacggttgttccgttgaccattatgattgacaatacggtttatattgatggtgaaaccattacgcgggaagactttatggacgagatggcagcagcgcaaaatctgccgaagacctcgcaaccggcgatcggtacgtttaccgatgtttttgataaactaacggcagacggcagccaagtattgtccattcacatgacagaaaccatcagtggcacggtaaattcggcgcgacaggcggctcagctggcaaaaggcgatgtgaccgtcattgattcgcaatttaccgatcgctcaatggcatttcaggtgttggcagccgcagaaatagccgaggcaggtaaagacatgccaacgattcttgataagctcaagcaaattcgtgaccatactatcttagtgttgggcgtgactaacttagataatttagtcaaaggcggccggctcagtcgcgtttctggcttaatttcgtcattcttgaatattaaagttgttttgcaaatggaacatggcgaactgaaggccttgcgtaaaggacgcggcatgaagacgattaataatttcgtgaccgaaactatcagcaaaatggccaagctgaccgatattcaaagtattggcgtatcaacggcaggtgctaaagaaatcggtgaagatatcgggcggcgcttagcagaagtcttgcccaacgtcccgattctggttcgcccaaccgatccggtcatcgcaacacataccggacccggtgcctttgccatcacttattacactgattaattttaaaataaatttaaccggccggcgtcagcgtcggctttttttaatgacaatggtatttgggtgacgattgcctgaagtcatgcctcaccgatgagtcgggaaccggtgatagggttgcgattgttcgctcgaaaaatacagctgctgaacctgatgcgagtaccggagaaagactaaagcagcaacctttgtttattcacgagacctcaagtaaaataatatattataacttgttattcatgtatttatgggaggcaacatgcgtacattaaaaaatttctttatttcctgcggtgtcttgctgctcgcttgtctgctcgcgtttggtggatggcaattattcggaccggtcagttcaccaagtgaagtgaaagtcgttgccaacacccccaaacatttgcagttgacggcactcggcgattcattgacttatggcgttggagatgcgactaataatggtggttttgtcggactgactaaaggtgagctggaggcaaccgggcaatatcaagtcaccacgaagaactatggcgtcagtggcaataccagtgggcagattctcactcgcgtcaataagcagcctaaaatccgggcagacttaaaacgggccaatattattacggtgacagccgggggcaatgatttaatgcacgtcttgcaaaagcattttttgacgttgtcggaaaagcaggtgacggctggtagtgttgcatttcaaaaacggctggcaacattactgacaacgattcgcaaagaaaatccaactgcacccatttatgtttttggcatctataacccattttatgtttatttcccgaagatgacggcgatgacgaatagtgtgaaggcctggaaccaagcaacgcaaaagaccttgcagcaatttgatcgcacgtattatgtggatatcgacagtgtgttatctaatggcgaaacagcagcaaataaggcttccgctaaagaagcgcttaaagaagcgacttccggtgatggcaatccgctgattttttcacaggatcattttcaccctaataatgccggttatgggcagatgacaaaacagctcatgaagcaaatgaaagcaaccaagaaagcgtgggagtaagaagatgcaggcaaagaaacgatcgcttcaaagaaatgcggctaaacaaaaggcggtgagaaccggaattaattggtggaaatggttattccttattttggtcgggctattgcttggaaccgggatctggtttacgaagaccgcactgatgccagtcaagatcaactcggctccccaaacggccatgacatccaacgacccggtatttaccgtcaaagtcaccaaaaatagcgccaatcgaattatggcgcattatctgaaatcatatctgaaggacagcaagatcaaatatgccgtcactttgggaaccaatgaagcagcgttaagcggatcgttcaaatttctagggaatgccgttaagttccagttaacatttgatccgcttgtgttgaaaaatggtgacgttttgcttaaagccaagaatctgaatatcggcgcattgccagtaccaatcagttttgtcatgagctatattggcaacagttataaaattccaaagtgggtcagtctagatagtaaggctggtacggttgtgctaaaattgagccaatttaaactccaaaatggcatgacccttaaggcaaacaagttggatctgaccaatgatgatcttgaatttgcggtttacttgcctgatgaagagtgaccattagaaagaagttgaaacaacaatgaaaaaagaaacggctatttttgcaggcggctgcttttggtgcatggttgagcctttcgaggagcaacccgggattttgaatgtggtttccggttataccggtggccatgttgccaatcctacctatgaacaggtttcttcgcataccacgggtcacacggaagccgtggaaatcacgtttgatgcggatgtgattgattatccgtcacttttgaatatttactggcaacaaaccgatccaaccgatgcaatggggcaatttcaggatcgcggcgataactatcgaccggttattttcgtcaaggatgaggcacaacgacaggctgctgaagcttcaaaagcggcgttggaagctagtggtcggttttctgatccgattgtgactaaaatcgagtcagcgaagccattttatcctgccgaaccggagcaccagcaattttatgccaagaatccgcggcgttatgcaatggagcatgcgcagcggcaggcgtttatcgacaaaaactggaaggactaatcatgcatcggactttttacgagtatcttatgacgctgcgtaaccccaatgaccacagcgaggtagcggaatttgccaaaaatgctttcctggatcaaagctttccgaaacatgaaaaagattatcatcggttaagtgattatttagaactcaacggtaattatttaccgacgatggccatttttgacgaaacgtaccgtgattacgaagccagtgaaagcacaggaggcgattcatatcaataaacacaaggtgccattgtgggcggtcattgttttattcctagttgcgcttggtggcggtgcggcaggtggttatgccctgtcatatcagcaagcacaacagtctgtccttaaaaccggagttcccaaagccttagcaccggtgatttcggcttatgaaacggttacgaataattattataaacaggtcagcacaaccaaactgactgatggcgcgatcaagggcatgttaagttcccttgatgacccatattcggtttatttgcaaaacaatgacaaaaccaatttagacgacaccatttctgcttcatttggcgggattggtgcaaccattcagcaggatcacaacaacctttctattgccagcattctaccgggaacaccggcgaaaaaagcaggtatgaaggtcggcgatgtgctgcttaaagtgaatggtaaggatgtgtctaaagagactgttacccaagcagttgccaaaatccgtggcaaaatcggcaccacagtagcagtgaccgttaaacgcggcagcaagcaggccaccttctccatgaaacggaaaaagattaccgttgacacggtgactgggaaacttgcgcctgcgaataaacaggttggggtcattacgatttcgaccttcagcgaaccgactgttaagcaattcaaagcgactgttaagaaattacgcaaagaaggcgctaaatcctttatcctggacttacggcaaaatccgggtgggatgatgacggctgctttgtcaatcagctcgatgttctccaaaaacggtcagaccgtcatgcagattgaagatcgcaatggtgcaaaggaagtctataaagcaggcaaaaagcttgatggcggcttcaaagtgactgaaaaaaccgcggtgcttattgatggtaattccgcctctgccagtgaaatcaccgcagcagcattgcaccagaacagtcaaattccgctagttggcgaaaagagttttggtaaaggaaccgttcaaaatgtcggcgagatgagcagcaacaaagaactcaagctgaccgttgccaaatggttaacgccagatggcacctggatcaaccacaaaggcctaacgcctgatgtgaaagttgcttaccccgcagcagccaaaataacgttaatcaatgcaacccaactcaaacccggtgacaagggcagtgatgtgaaatcgctgcaacagatgctaaaagccttaaagatcggctcagctacggtcaacggtcaatacgatgatgcgacccaggccgctgttaaatccttccaggaggccaacaagctggacgcaagcggtactgccgatcaggacaccttagccgcactggcacaaaagctcagtgatcagttaacgaaggatgatccgatggtagcggctgctatcaaggaagttacgaaatagctcgtttgaatcaatatcaatgcgcgcgcatgcctttgagggtgtgggcgcgttttttaatctgagattttggacttgttaaggagcaaccccgtacttatccctgaaaatttattgacatcataaattatagaaactatgattaaagcacttaatgaaaccgctaacattgcttgaatcgacttttaatcggtgcggtaggaaaagtatttaggtgttactggttaatagattttaaatagaaaagcaggattaaatatgcaaactttagattttaaggaaatgattactgagctacaatccaaaataccattgtataggctgatgttgttgaatgcccccacaggtattggaaagagttattccgtgatccaagcattatgccaatacgcggtagaacaagaaaactttagggccttttttgtaaccgatcagaaaaagaatctgaaattacaggactttgaagctgcttggaatcaagtcgcggatgaacataaaggaacattcagtgaacgcattggggttgtgcgttctttggaagatacggtagaacgcttgattcacgactgggatcacaaaaagattcctggaatgtatcgagagacgcctatatttaaaaagaatattgaaaaactaagaaagacctttcagtgttataagatgcttcagaacgatgctattgactcaaagacatcttggaatttattgaataatgctgagtaccaggttcgttgtgcagttatagcggttttgggagaaaaatcccatgccaatataaaaccaatattagatacaaaatcggacaacttacagattaaacttaatccgactcagaaaaatacaattcgagattatgtcctgaagcaagcaaaagcagattctgaatggctaaataacacatttcccacaattgacttagataaaagaaaaataatcattttaacaacatcaaagttcataaaaggttatacgcccttctttgaaaaaagttcgaaatcttttcagttctcaccaattctatcaaattctttggttgttcttgacgagtttgatagcacaaagaagcagattttagataattcaattgaggacgcattaaaagttcaagttgatttattgccattgtttgatgctctatatgaaggccttagtaaaattaacaataaaaaattgccggatcaactaattaaaagtttcacggtccgggatacattccgaaaaattatgaaagacgctaatgcactacgctcggagttcaaattggattttttatacaaaacacaaaagaaacaagggaactctgggtttgtcatccattttgcccagacagatttgatcagcaaaggcgagaaattgcatgcctattttgacgagaacttgaggcaagtggttgtcggtgaaaaaatccgtgatgatctgcattttcatcggatgttgccgagaatttctgcatttcttcggggtgtaagtggctttattttacagcgggctagggaataccaacagttgaggaacagaaagctatcgccaattgatgaagctatgacgattgaagacgcttgttatactgtctacaacgctttaggtttgtcacaagtgcaagctagagtcttactttcgctcagctacactttttcaaatcaaggtgggattaagctttcatactatccacatagtagtcgccggtttcagcagcgggggcttagcttatttcaatttacaaatgatgctcaacatgaattacggaccgagatcaacgcttcctttttttctgtgactccggaacgttttttgctgaatatactgagtaaggctaatgttttagggctctcagcgacggctactttacccactgttcttgataattatgacttggaataccttcgagatatgcttggcccgcgtttattgaatggtgccgattacctgagcaaaactacgcgtgaagaattcgatttcaaagcgagatatatcaaaggtaacgttcacatcaaaccggaaataagcggcatcaaccggtctttctcagagatcttagaaacagatcgttctagcgttgataaaaccgatattagaacattagatgctattttagaacagaaaataagtatggtttgcgctggtggtcggaaaggcggtaaggattattatcgccaacgatatttaaatctatttaatagctttaaaatctttctgaatgacccactgatgacttcgtttctaggcttgcagtcgttactcccgagtggtggaagcgaaatgaatgaacagtatatcattgatacttttgagaaacttaaacagcggatagggtcatcgacagcaataaatacagaactaaggattgtttcatcacgcaaaagtggcagcattgaagaacagctagaaaatgccttaagtcttcctagcaatcaaaataagcgtgtctatattctaagtgcttatcagacaattggaatcggacaaaatctgcaacatcaaatgaacgaattcgaacgaaaaaacgttataaatatcgcccccaaaaatgccgctaaagatgatccaaggcaaaaaaccgttgatttagcaggtgtttatctagcagatgtcacgcatattcttggcagcaatttgccttttaaaatggatgcgtctggacttcgcactgttatagagcgccagtacctccttgataataatgagataagcgttgatgacttgatgacgtttttgaattatctgcaaaagcaaattccccaaccccaccctaaaaatgcccgcagtctctatgtcagttattcacgaacgatcattcaagcattggggagaatgaaccgatcttttaataaaatgccaaccttacgaataattgtagatcctcaggtgatttcaaacatcaccggtagcggaatcgatctgagtgggacaagtcttgaatatcgcacgttgcttgaattctcaggaaggcaaaatccaaactatgaaagatcgcgcgtagaacatgcgaaggcaaatgcaacattttacacctatcgggacctttttttgatggcattatatttacagaaggatcccgaaacagcgcaattttatcgaaggttacgactattttatgcacagcatccaacttgttcaaataaagaattaatcgagagtaagattattagagaatatcaagatgaacgtgggttgcaatacttgtgtaatgagaggtcatgtaactcttacgaggttaaggcgccaaaacgtgatagtggtcactttgattttggtggcagtggcatggaaatttctgccgaagcgtcggggttgcttgcaatgtgtcattttcccggtctaaaagaagcatttgaagcagaaggtatcgcaacggaatggaagcctaatgagcgaattctgaatccaatccagttttataactattgtggttttatcggcgagtttagcggtaaatttatgatacagaagatttttaacattgaatcagatgtatttcatgacttagaaaataatgagttatttgattttcaatggcaaggagaagtggctattgatttcaaaaactggcatgcgatgccacgtgtgaatgctgataaggaacgagaaaaggttgaagacaagttaaaccgactggaacttaatactaagaaaaaatggcgagcgattattattaatgtcgtagcgattaatcagggaaaactgattatgacagttgatggcaaaattcttgaagtctccgggttgattacccatgacggccagattgctttaaccactgagcagcaattccaaatagggaggtttttcaataacaatgcagacaatggtacagacaactaaacttgattatgggattaacatgttgcagttgcaggctgactttcattttctgctagtcaaagttgctaataatgcttatgctagttataaccgtctaattggctcatgcatgccccaagcgctcacagctataggaaaaggtaaatatctgctcatgttcaaagaattacctatgttgtcacatgacgataatctgaatgttcgcgagattttgctggaaaataaaagtcaattcaggattttccccaaccacttacttcagctgctagttaatgaacagactgccaacagtcctggtttgtcagaagcaagcaaaacacctgagcttctcgttgtaaaagagaattggtgtcagcaatgttcagatatgcggctacaatgttttgcaataaacgtgaaggttaactgggaacaggatctggaactcagagttcaaacatacacggagacagcagaatttaagtgggataaaccaatctataaaattgatgctgaacatgagcggttagtccgttgttatcaaccaacaaatgggccttactttgttcgcgggaaccggaaacggaatcgcaattctgttgagtttttgtctctacaagatgagtcatcgtttttgcaaagtaaggtagggattgcccagacagttttgaacaatcttaatcgaaatgagaaagcgtatttgactcgtccagttacttttcataaaagtttggtagaacaatattcacgtacgaaacttaacgaaacccaagctatttggaagcagattgctggcagtcaacttaccatatatgcgcaacctgacgataaattaagtacaggtttagctgatcgcatggcaatcgagctgatgaaaagttacattgtaaaagaaagcaagattcaaattaaacgtatgtcgaaagcccaatctggactcaatatacaagttattcgtgatgaacgtgaaggaacagcaaaggactattatgaaatcagcgcaaaagatcaaattattcaacatgtaaccgttgaaaagtttggcaattatcgcaatggtgacgaagaggttaggtggaaaccaagcgttaccgggaaagataaggacccgggtcgtgatgtctcgatcattaaacttatccaagaactatgcattaagcgtgacttggcacgaaagcgcttggagttcgtggaagaagcattagcaattaagacgctagcatttagtttttattatttttactttctgcatgagtcacctgatcccgaggtaatggtgattaagctaagttttacatccaagaaggagatggtattttctaaaaaaaaggtatctttaaattggttggaacaggatgatgagtttacccgagtttgtcaactagttttctttagtattttttctgcaaaaaagcaattcgcttgggatagcgttgaatgtattgttgagtttgaaggtaatcaagtcctgattcaacaactcaatcgtactgtgatgcctgatggggatcgaattaggaaacaactaagcctgaataacccaaaaagaatcctctcacgagaaaagattctgaacgagctgaataaactgcgatctctaatttccgacaatgaacagttggctgcggcgtataaaatattacaacaagttatagtcggtatgcctgtttcctttactctaaaagaattggacactgcagcacgtgcccaagacctaacaccacgtaaaaatggcatgaaacaagttaatcggtttttagaggccaatgcttcatttacactgaagacaacgctgcaacgagaaatgcctaattcgccacttaccggaatgaagtggattggacttacacgaattgaggacagtaatttgggatttaatgcgttttattttgttggcagcagccgatcgctacagacaagaattcctcgggcagtaacattacgccgcctgttacctttaactggcgatgatgaaatgattgataatttatttcctaaacttgcagcaatgatgagtgttgagtttgtgcgcagtggtcagtacaccgttgttccttatccagtgaagtatcttagggagttttggctcagtgagcaaaggaagtatcctgaatatcgcaggtccaagaataggcagtaaagaaaattatgaaggaaaaatctatgtttggctaaattcaatgaccaaccatagattttttacatggttgtgcttgtcgtaatatctgacggtggttatagtggttttaaaagttcacgccgttgtttgaccgtggcaatatttaaaatatagtcatcgtgctaatgcaataacgcactaattgagacctatttgcaaacgaggagtctaaatgaatgaacaagcgaatttcgccaccaaagttctaacccttcatcaacgactggcaagcgtcaaaatgacgttacctggtagctatcagttggtgaatccatatagcggagagcagaagcatgcagttgaccagatcacggcagctttttatcataaatattttaatgataatcacaagcgccgattaattttggggagctcgccagcgcgaaaaggcactgccataacgggggttccctttgaagatgcagccgagttacaagcagagacaggtatcgctgtggcgaagttccagattaagccatcgtcaacaaacttcttatatgatgtaatgcagcaatatggtggcaagagaaaattttatagtgacttctacatgagctttgcttgtcctttggggttaagtaaaataagtgctaaaggaaacgtgataaatagtaattattatgaaactaacgtgattaaggatagactaatgccattcatagttgcttcattgcaggagcaaatcaaattaggcgtagacacctcagtttgttactgtattggtagtggcgagaattttaaggtgctaacaagtatcaatcagacgtatcatttctttggtagcattgtcccattagagcacccacgctatgtcatgcagtatcgctttaaggacagagcccgctatattcaaaaatacgttgctgccttaaattgtaaataaaaggagtttgaaatattttggcaattcaatggttccccggtcatatggccaaggcccgtaagcaagtacaggaaaaaattaaacaagttgatctgattcttgaagtcgttgatgctcgaacgcctgaatcgtcacgtaatccgatgttagatgaattggtgggtgataaaccgcggattatcattttaaacaagcaggacttggctgatcctgtactgacgaatgaatgggttcggtattatcaaacacaaggctttgctgcgattgcgattgatgcacaacatgctaagcggctacagcagatcccccaagcggccgcgaagttaatggcggaaaagattgcgcggaaaaaagcccgcggaattcgcaatcccatgattaaggcaatgtgtattggtattcctaacgttgggaaatcaacggttttgaatcggttggttcgaaaaaatatcgcggtgaccggcaacaagcccggggtaaccaagaatcaacaatggctaaaagcgagcgacaactttcaattacttgatacgcccggaattctttggccaaagtttgcctcccagacaatcgggatgcgcttggcattcacgggagcaattgccgatgctgttttccaggaggatgtggttggtttgtatggactgacctattttatggcgcactatccggaggcgttgaaaaaagcatatcatctgactgacacggatctgcaggctgcaccgcatgaagtactggtaaaactaacgaaaacgcaaggatttggtgaggaatttaatcggatggcggaacggctgattttcgatgcgcgccaagggaagttaggtcgatttacgttagagaaaccgggtgaattagatgccgacgctgagtgaatataaagctcttttacaagctgatcatgttgatcccgcggttttaatggcactggagcaggatagtcggattggggcggggaaactcttggcggcttatcaacgccgacaggaccatcaagcagcagaagcggttgccttacgatatcgtagtagatatgagcgtaagttatggacaatgtattcccatgttgctgggttagacgaagtagggcgcggaccgcttgctggcccagttgtcaccgccgccgttatcttgccgcatcagtttaaatggccggtgaacgattctaagcagctgacagcgcatgaacgagatgtcttgtatccgcatattttgacggaagccattgcggttggcatcggggtggcagataatcacgaaattgatcgggaaaatatttaccatgcgacggagctagcgatggcacaagcagtttcgcatttgcgggttgccccagagtttttactggttgacgccatgcatgtccccgttaatttgccgcaagaacggctcatcaaaggggatgccaatagtatcagcattgcggcggcaagtattgtcgccaaagtcattcgggatcgcttaatggtgatgtacgatcaggtttacccgggctatgattttaaagacaacatgggttatggtacgaaagcacacttagccggattagctgcacatggggtgacgccgattcaccggcgcagttttggccccgtaagacattgtctgaaatcctagatatttcttaaaatattcgcgtaatgttcaagtaggaggaagacagcatgacattacgtgattttttattagcatggcacttggctacccatcagaatccgcgcttggcggtcagtttgcagcaagctattttggaaaaagctgatttgagtacctatcaaaatgacctcaagcagaaattaacgccagcagttgcacgaattttaagtgcagcacgcgagaccccgtatctgacgtttgttgatactgcctatcctccgcggctgcgcgaaatcccgcagccaccgtctgtcctcttttatcaaggcaatctcggcttaatcaatcaattaactttaggtgtcgtcggttcgcggaaggcaaccaactattcagctgaagcactgacgcgactgtttccgcaattaccgcccatgacaattgttagtgggttagccgctggtgctgacagtatggcgcatgaagcggcacttgcagccggactaccgacgattgccgtgattgctaacggcatcgatcaagtgtatccggctaagaatcgcagcttacagcgacaaattagtcgggtgggattggttgtaagcgaatatcctccgggaacagcaccgcaacgctttcaatttgtggcgcgtaatcgcatcattgccggtttagcgcatggcgtcatggtgaccgaagccgaaattaaaagcggcagtctgattacggctaactatgccttgcaacataatcgcgaagtttttgcgctgcccaatcggtttggcgatgtgctaggtgcaggcaccaacgcattaattcaagcaggggccgccattgtcaccggtccggaaaccttagtagaaaatctgcatttttacccgtaaagtgtcaaaatctgcttactttatagtagaaaaattttcgtttgatttgacaagagcaaaatgactagcttatgatagcaactgttttgagccagcaggcaagatggcccagttttgagcatcgggacgcaccgtaaattttttgcctagctgaaactcatgaagcgttgacggtgaatcgtcagcccgcacaaattaaacagggcttgcttattgtagcaatgccaccggaaggagcgcgttcatggccgacaagaagttagtcattgttgaatcgccagccaaagccaagaccattgagaagtatcttggccgcacctataaagttgttgccagtttaggccatatccgtgatttacctaagagtcagatgggcgtcgatgttgaaaataactacgaacccaagtacatctcgattcggggtaaaggcgatgtgattaaatctttaaaaaaggacgcaaaaaaagccagccgcgtttatctcgccgccgatccggatcgtgaaggagaagcaatcgcctggcatgtcagtcatatcttaggactggatccgaatgccaagaatcgggttgtttttaacgaaatcaccaaagatgccgttaaaaatgcatttaaaacccctcgtggtatcgatatggatcttgtcgatgcgcaacaagcacgccgaattctcgatcggctcgtggggtactcgatcagcccgctgttgtggaagaaggtcaaaaagggcctgagtgccggtcgggttcaaagcgttgcgttaaagctcatcattgaccgtgaaaatgaaatcaagaactttattcctgaagaatattggtccttggatgccgaattccaaaaaggccgcagtaagaaattctccgccagtttttatggcatcaaaaacaagaaaatggcgctgaagaacaatgaggcggttcaaaaagtcttaagtcagattgacaaggcaaagccattttccgtcaccaatgtggttaaaaaagaacgcaaacgtttccctgcaccgccatttaccaccagtaccttgcaacaggaagccaaccgtaagctaggattccgcactcgtaagaccatgatgttagcccagcagctctatgaagggattaacttaggcggtaagttgggtacggttgggctcattacgtatatgcgtactgattcaacccgggtttccaacgttgccaaaaccgaaacgagtcattatttgcatgaaaagtatggcgaggcttatgctgctgtcaaaattcgccaaggtaagcttcaagaaggggctcaggatgcccatgaagccatccggccaacgagtacgctacgaacaccggaaagcttggcgtcggttttagataaagatcagatgaaactgtaccgtttgatctggagtcgctttgttgctagcgaaatgacgccggcgattattgacacagtcgccgtcacgctcaatcaaaatgacgtgacgttccgggcaaatggcagccagatgaagtttgaaggttttaccaagctatacgtttcctcgcgagatagcggtgaaaaggataacgttttaccaccgcttgcagtcggagatgctgtgaagatgctgaaaaccgatccggcgcaacatttcacccaaccaccggcacgttattctgaagccaacttggttaaggctctggaagaaaacggggttggccgcccatcgacgtatgcaccgaccatcgaaaccattcagaagcgttattacgtcaaactcaacgcccgccgctttgagcccacggaattaggcgaaatcgtcaatagtctgatcgttgaatttttcccggacatcgtcaatatcaagttcacggcgaatgtcgaatccgaacttgacagtatcgaaaccggcgaggccaattgggtcaaagtcatcgaccagttctataagccatttgaaaaagaggttgcgcacgccgagaccgggattgaaaaaatccaaatcaaggatgaaccggccggctttaactgcgatatctgtggcgcgccaatggtgatcaaaatggggcgttatggcaaattctacgcctgctctcgattccctgactgccgcaacaccaaggcgatcgtcaaagaaatcggcgttatttgtcctaagtgtcacaaagggcaggttgtggaacgcaagagcaagcgtaaccgtgtcttttatggctgctcccgttaccctgactgtgactttgtttcctgggataaaccagtcggccgcgactgcccggtttgcggacatttcttagtcgaaaagaaatccaaagccggcacccaagtcgtctgtcctaacaacgattacaaagaagccttacaaaaagcataaatcacctgacagcaagtacggatcctttgtacctgctgtttttttcgggtacactaaggcaaagtacgagcagaatcgcttaaaaataaccaaacacaaccaagatgaacgtcttaagatcagtgatccattcaatcaaattaataacctcaccaaggaggaattcatgatgcctactgttaacgttattggagccgggcttgccggttcagaagctgcctggcaaattgcccaagccggcgtcgatgttaatctctacgaaatgcgccccgtgaagatgacgccggcacatcacaccggtaattttgccgaactcgtctgtacgaactcactgcgcgctaatcaaattactaatgcggtcggacttttaaaagaagaaatgtggcggctgcattccattatcatgcaaagtgccgatgcaaccgcggttcctgccggtggtgcgctagccgtggatcgcgagcctttttccgagctggtgacccggcagctgacaaaccatccccgtattcatgtcattcatgacgtattaaccgattttccggctggcataaccgttgtggcgaccggaccattgacagcaccggggcttgccgatgcgattgttgcgttgaatggcgaagcaggcttgtccttctttgatgctgcggcgccgattatcgacgccagcacgattgataacgacatcgtttataaaaaatcgcgttatgaccggggtgaggctgcttatttgaattgcccgatgaataaggaagaatttcaggcattttacaaggcgctggtgacagctgaggttgctgaaggtcacgattttgaaaagatgacggtgtttgaaggttgcatgccaattgaggtaatggccaagcgcgggatcaaaaccatgctatttggtccgctgaaaccggttggcctggaagatcccaaaaccggcaagacgccatatgcagtggtgcagttgcgtcaggataatgccgcagccagtctttataacattgttggttttcaaacgcaccttaaatggggtgagcaaaagcgggttttccgcatgattccgggtctggaacatgctcagatcgtccgttatggcgtgatgcatcgcaatacatttatgaaatcgccagtggttcttgagccgacttatgcgtccaaacgccgggctgatctcttctttgccgggcagatgaccggggttgaaggttacgttgaaagcgcggctagtggcctgattgccggtaccaatgcggcgcgtctggctttggggcaaacgcccatcgcttttccgcaaacaactgcgatgggggctatggcacactatattacccacacctcgccgagccactttcagccgatgaatgctaattttggtattatgccgccgttagcaatcaaggttcggaataaaaaagaacggaatcaacaactggcagagcgcgcattgaatgatctggcaacttttcaaactgaattacaaagcgtacatcagtcctaaaattggaaaatgatctcgggtaaccgggattttttcatgatcacgggtcgtcatgttcaccaagcagtcaatgagcgaataatggtggcggattgcaatttttttgcctgtcttcgcctacatttacggcaggtttagtggctgaaaacgtcaacaatcgttctttttatgttaatctattaagcggagggatgtcgtgatgaagccacttgcagcgtttcaggaatacttaaccgttgagcgccagtattcgccggaaacggttacggcctatttaaacgacattcaggaatttcaggcttttcttaaggcgaatggtgggtttaccgactttagcaaagtggacgacttggacgttcaaacctatttaacggacttgaacaagcaggcgttggcgcgaacttccattgcccgtaaaatcagtagtttacggagtttttatcggtatcttgttcggattgatgttgtgaaacgcaacccgtttgaattggttgagttaaaaaagcagcatcatcatttgccgcagtttttctatgaggcggaaatacaggaactctttaaaacggtagaaggggaaaccccgttggatcaacgtaatcgggcattactcgaggttttgtacggtaccggcattcgtgtctccgagtgtgctaacttgacgttgaatcaagtggattttaataccggcttattgctgattcacgggaaaggcaacaaggatcgctatgtgccgtttggccgctatgcccagcgtgcgttgcagacctatctcaaagacggtcgccagacactgatgaacaagcacgatgcccagcaccgatttgtgttcgtcaaccagtatggccgaccgattactgcacgtggtattgaatatattttggatcaattaatcaagcaaacgagtctgaccgcgaatattcatccccacatgctccgccatagctttgccacgcatatgctggatcacggggctgacttgcgcacggttcaggagttactggggcacgcaagtttgtcgacgacgcagatttatactcacgtgacgatggcgcatttgaaaaacgaatatatgaaatattatccgaagcataattaagactaaagcacgatgtaattgcacgacgaattttttaaagtatgaacattggcagatttaacaacactgccagttctgattgattatccgatatcaagaaacaaaaaaggagcataccatgacaacaattgcagcagtgagaaaagatggcgtgaccgctttagccggcgatggccaagttactttgggcgaaaaagtgatcatgaaaggcaatgcccaaaaggtacgccgaatctatcatgatcaggtcgttatcggttttgccggcggggtcgccgatgcgtttacgcttcaagactggtttgaaaagaaactagagcattattccggtaacttacgacgttcggttgtcgccttggctcaagactggcgtaaagatccaaccttgcaaaaacttgaggccatgatgatcgtcatggatgagcatgatttgctgcttgtttcagggtctggagaagtcattgacccagacgaggacgtggttgcgattgggtcgggcggtaattttgcccaagcggccgcaattgcaatgttgcggcattcaccagacatgacgccggctgatattgctaaagaagcggttaatatcgctggtaatattgacatctttacaaatcataatattatcgttgagagtttctagggcgtgtgtgtttgcgttatagggcgttcgttggtgcagaggtctggatgtaaaggcttattgcgtgctggctcacgctccataacgcgttcgccagcgcagaagtctgcgtgtaaggaccttaagcgcaatggccaagaccgggccatcacgcccaaggccgcttacactccgatccctaaccgcgctggctcacgctccataacgcgttcgccagcgcagggatctgcgtgtaaggaccttgggcgcaatggccaaagaccggccatcacgcccaaggccgcttacactccgatccctaaccgcgctggctcacgctcactttcttttaggaggttcccatggtagaagtacaaacaccgaagcaaattgtagaaaagcttgatcagtatgtgattggtcaggatgaggcgaaacgggccgtggcggtggctttgtataatcgctatcggcggatgcagttgtcgccgaagatgcaagaagaaatcacgcctaagaacttgcttatgatcgggccaaccggggtcgggaagactgaaattgcccgccgcttagccaagatcgtggaagcaccgtttgttaaagttgaagcgactaaattcactgaagtcggctatgttggccgcgacgttgaatcgatggtgcgggatcttgccgaaacggcggttgccatggaggaagaaaagcagtttaaaaaagtccgggttcgcgcggaaaaagaagctaacaagcggctggttaaaattttggtaccggctattcgcaaagaaaaaaatagcaatcccatggcggaaatgatgagcatgttgcaaggcatgcaaaatggcaagatgcccgcgggtgacgatgctgatgctggcggtgaagtgacggatgatattcgcaatcgccgtttaagcgtggcggagcaattggaaaaaggcttattagaggatcgtgaaattaccgttgccgtcaatgacgagaaaaaaggcggcggcatgagtgatatgtacggccaaatgggtattgaccttagtgacacgattggcgctttgatgccgaagaaaaaagttgaacgcacgatgaccgtcaaggaagcacgcgaaatcttcatcaaagaagagtctgataaactggtcaatcatgccgatatttatcatgatgcgattcaaagcgcggaaaataacggcatcattttcatcgacgaaattgataaaattgcagccggtgataaacacacgagcggtgaagtttcccgtgaaggcgtgcagcgcgatattttgccgattgttgaaggctcacagattaacaccaaatacggaccgattaatacggatcacattctgtttattggctcgggcgcgtttgcagaagccaagccaagcgatttgattgctgagttgcaaggacgttttccaattcgcgttgagttaaaagatctaacggaacaagatttcgtgcggatcttgaccgagccggacaatgcgttgattaaacaatacattgccttaattggcgcagacggggtcaaaatcacgtttacgaaagaggccgttgaacgtatcgcagaaatcgccactcaggtcaaccatgataccgataatatcggtgcccggcgactggcaacgattctcgagaaactgttggaagatgtgctttatgaaggtccggatatggcgatgggcagcgtcacggttacccagcagtatgttgacgacaagattgggcatatcgccgcggatagcaacatgacgcgctatattttgtaaggtaactttgaagaactgttaggtaaaggatgagaatgtatggtaacgattgcaaatgactttttaacggttaacatcagtcggcatggtgctgaattgaccagtattaaggataatctgactggccgtgagcgactatggcaggctgatcctgaagtttggccacgccatgcaccggttttatttccaattgtcggtgcgttggctgatcagcaatatcaatacgctggcaagacttaccatatggggcaacacggatttgcgcgtgatcgtgactttacggttgtgtccgcaacgccttttaaagccagtctcgtgctcaaagacgatgacaaaacgcgggcgatgtttccgtttgcttttcggctcatcattacctatgcgctagaaaataataacctgcacgtcacctaccacgtcgataaccccgctaaaacggaaccgttatacttcagcatcggtggacacccgggttttaacgttcccatgacgccggataccgagtttgcggactattacatgaacttcaagccgcgtaagtccctggtgcagattccgcttgttgctgggcaaggtattgattacagtcatcgaactttggctgcgaccgatgccaacctggcgctcacacacgaaacgtttaaaaatgatgcgcttatttttgcgccgcttggtaaaaccaccttcaatttactttctgatgaaaccaagcacggtgtcagtgtgaccatggaagacgccccttaccttggtgtttggagtccttaccctaagaccggtgattttgtctgcatcgaaccgtggtggggcattgcggatacgatcggcaccaccggagatttgaccaagaaactcggcatcaaccgtttggaaccgggaacggcttttgagaaaggctacacgattagcattttctaaccgattaacgaagcttgttaacgaagattgttgtgccattacaaaaagacatccgccaagggatgtctttttgattgtcaggtatttgggtgattagtcatgatgatgttggttgcgcaggtataggccgagcccaaacggtaccatattttcgtcaccggccttgatgcgtttgaaattggcgcgatgtttgatgaaaaagacaaccagtaagccgcaagcaactgtcgtcagtagccaatcgtgatacaccaatgaccagcacgtgataatcaccatccccagcgtactggccacactcaccatggacgttaataagatcaggctaaaccagatggcaaaggcgatgaagaaaaatggcgggttatacgctaacaaaataccggcactggttgcgacagcctttccgcctttgaaaccaatgtagatcgaaaaagtatgccccaataccgctgccaacccgacaaccaagattagccagtggtggtcaatcccaaataaaatcggtaaactggcagacagtgttccttttagaatatccaatagcaagactagggtaccgccgaccggtcctaacatccggtaagcattggtggttccgatattatggctgccaccttggcgaatatccgtatgataaaatagtttgccaacgaccaccccaaacggaatggcgccgatgaaataggcaagtataaaacaaagcacaagtaccaaatgtgcccctcctctcagactaaaaactattttagcatttttgacttttgagggatacgccggtaaaataatacgaacacacattcgatctgtgaactatattgcatcttgacagtttcatacaggcgtttttgactgtgatattttgccggtgatcacagaaattgggttttcttaaacgttcctgcgctcgccctccgcttctgcgtggtgtattctataaattagttgtttcaaaaagggagtttattatggacaaagcaacgcaagcatataatgattcatccattcaggtgctacacggattagaagccgttcgtaagcgtcccgggatgtatattggttccaccgatagccgcgggttacatcatttggtttatgaaatcgtggataactcagtcgatgaagcgctcgcggggtttggggatgaaattaatgtcacgattcacgccgataattctgtgaccgtgcaagatcatggtcgggggatgccaacaggaatgcatcctagtggtaagccgaccatcgaagtcatcttaacggtgttgcacgctgggggtaagtttaaccagaatagttataaaacatcaggaggccttcacggtgtcggctcaagtgtcgtcaatgcgctgtctgagtcattgacagttcgggttgtccgggacaaacacgcctttgaagagcattttattaatggcggacatcctgatggcgggttgcagaagttgggcaaggttaacgaacccaatggcactaccattacgttcaagccggatccgactgttttccagaccacggttttcaattacgataccttagccgaacgactgcgcgaatccgcgtttttattaaaggcgatcaccattaatttaaccgatgaacggaccggtaagcatgatcagtatcattatccggatggtttggttagtttcgtgaagtaccttaatgaaggtaaggacgccttatcgcaagtcattaattttgaaggcaagaaagacggcattgtcgttgattttgccggtcaatataatgatggctactctgaaaacattatttcatttgtcaacaatgttcggactggtgatggcggcacgcatgaaatcggattgcgcagtgggatgacgcgtgcttttaatgaattcgcccggaaagtcgggttattgaaagaccgcgataagaaccttgaaggcagcgatgtccgcgaaggttttgcgggtattttgagtgtccgcatcccggaagagatcttacaatttgaaggccagaccaaaggcaagttggggacgcctcaggcacggaccgttgtcgatgggattgtgtacgaccaccttgccaccttcttgatggaaaacggcgaagaatcgcaagaactcgtgcgcaaagccatcaaagcccgcgatgctcgtgaagccgcccgcaaagcccgtgatgacagtcggaccgggcgcaaacgcaaaaaggatcaggggctgctttccggtaaactgaccccggcacagaccaaaaaccctaagcgcaacgaactgtatcttgtcgaaggggattccgccggtggttctgccaagcagggacgcgatcgtaagttccaggcaattttgccattacgcgggaaagttttgaatacgcaaaaagccaagctgcaggatatcgtcaaaaacgaagaaatcaataccatgatttataccattggcgccggtgtcggtgccgattttgacatccagcaggctaactacaataagatcattattatgaccgatgccgatactgatggtgcgcacattcagatcctgctgttgaccttcttttaccgatacatgcggccgttaatcgatgccgggcgtgtgtatatcgcactgccgccgttgtaccgcttgcaaaaaggtgctggcgctaaaacgaagatcagctatgcgtggacggatgaagagctagctaaggaaaccaaggcgatgggcaaaggctataccttgacccgctttaaggggcttggcgaaatgaacgccgatcaactatgggagaccacgatgaatcccgaaacgcggacactgattcgggttcggattgacgatgcgcagctggcagaacgccgggttacgactttgatgggcgatcgcgttgaaccgcggcgtgaatggattgaacatcacgtgaagtttgatctggatgatgaaggcagtattctggaaactccaacggcaaaccatgaaaagttgcaattcggagctaagcaaatcgtcaagcaattagataagaaaaggaagtaaaagccattggccaatcagattcaagagttgaccttagaagaggtcatgggcgaccggtttggccggtactcgaaatatattattcaagaacgcgcactgccagatgttcgtgacgggttaaaaccggtccaacgacgcattttatttgcgatgaaccaagacggcaacacttatgacaaaggatttcgcaagtcagctaagagtgtcggtaatgttatgggtaattatcatcctcatggcgatagctcgatttacgaagcgatggtgcggctcagccaagactggaaactacgcgcaccgttaattcagatgcacggtaacaatgggtcaatggatggggatccgccagcagcgatgcgttatacagaagcgcggctaagcaagatcagtaaggaaatgctggcggatattgataaagaaaccgttgatatggttttaaactttgatgacactgcccaggaaccgactgtactgccagcgggttttcctaatctcctcgtcaacggtgctaccgggatctctgcagggtatgcgaccgaaatcccgccgcataatttgcgggaagtcgtcaatgctatcttgtatttgctaaaacatccgcaagctgacttagccgacttgatgcagtatgttaagggacccgattttccaaccggcggcatcatccaagggcttgacgggatcaagcaggcatacgaaaccggccggggaaagattgtcgttcgctcacgcacccacatcgaaaccattcgcggcggccgcgagaagattgtggtcactgaaattccgtatgatgtcaacaaggcccaaatgattaaaaaaatcgatgaactacgacttaacaaaaaagtcgacggtatcgctgaagttcgcgatgaaagtgatcgattcggcttaagtgttgtcattgagctgaaaaaagaagcggatgcccatggaattttgaattacctcttcaaaaataccgatctgcaaatcacatataactttaatatggttgcgattgccgatatgcaaccgaaattgcttgggctcaaggcgatgttggaagcttatgtggcgcatcgccgtgatgtggtcacacgccggacacgttatgagttaaacaaagcgcaggcacggcagcacattgttgaaggcttgattaaaatgttgtccattttggatcaagtcattgcggcgattcgtgcatcctcagataaaggggatgccaaacgcaatttggtcaaacaatttgatttttccgaagcgcaggctgaagccattgtctccttgcagttatatcggttgacgaataccgacattaccgctttgcaggacgaggcggcacaactggccaaggcgattgccgaatatcaagacattctagcgcagccggcttcgcgtgatcgggtgattgaaaaagaacttaaacggattgctaaagagtacggggatgatcggcgcagcagtattcaagccgagattgaaacgctcgaagtggcaacgacggtcacagtggctgatgaaaccgtgatggtccaggtgtcacgcgacggctatgtcaaacgcagctccttgcgtagttaccaagctgttgatcctgaagataacggtttaaaacccaatgatttggcgatttttaccggagagttaagcaccctgcaacatctttacattgtcacgaatgccggtaatatcatttatcggcccgtttacgaaattagcgatgcgcggtggaaggacactggggaacatttaagccagacagttggcttgggaaccgatgaaaaggttttggcagtctttgcttttgatcagctagatcttgctggtacctttgtccttggctccagtgacggctacattaagcagacggcattgagtgatttgcagccgcagcgcacgtataaacgcaaaccaatgatggcaatgaaattgaaaacaccgggtgccgtggttaccaatgcttacttcacgaccgatcaagcccaggatgtttttgttgtcagccgacatgcgtatggactcgacttcccactggctgaagtttccacggtcggtgctcgggctactggggtcaaaagtatggatctcaaaccggaagatgaggtagttaactttattttagttaagcaaccagaaaaagcagtggtgggcattttgactcagcgtggtgcgtttaaacgtatggcgttaagcgaagtcggtcaaatgagccgtgctcgccgcggattgcttgttttacgcgaattaaagcgtgatccgcaccgcattgtcgccatgatgcaagtcgatgacaacacgcgtctggatgtgttaaccgatgccgataaagtgatcacgttaacgcctgtgaaccacccgacaggtgatcgctactctaatggttcctttgtgattgatactgatgtccaaggaaaaccggttttcgtacgcacacgtgaagaaacaccggttgaaccgtaacgcaaaaaagtcctcatctgtattaatacagatgaggactttttgatttattatatgacagtacggttgtgcacaacttatcaagctaatgattaagctttttttatgaaacaggaaagtacaccgaaaaaacagcaaaacgcctgttatatcagcgataaaacgcttgcatagatttgccttcgtgttatactgagtttgtaagaactgtcacatctgtaattcactttaggaggcaatacctatgaaacagcttgacgaaaccaaagttcctaattattgggaaggctttaacggcggcgactggcaagaagaaattaacgtgcgcgattttatcgagcataacctgaaccaatatgatggggacgagagtttccttgctggccccactgaagcaacgaccgttttaaataatcaggttttgaatctgaaaaagcaagaacgtgccaatggcggcgtgctggatgcagataacaatattccatcgaccattacttctcatggcccaggttatctgaataaggacctcgaaaagattgtcggtgtccaaaccgataagccgtttaagcgggcattcatgccatttggcggtatccggatggctgaggatgctttgaaatcctatggcttcgaaaccgacgctaatgagcacaagatctttaccgaatatcgtaagacgcataaccaaggtgtttttgatgcttatacgccggaaatgcgcaaagcccgccactataagattgtgaccggcttaccggatgcttatggtcgtggtcggatcgtttcggacttccctcgaattgctatttatgggattgaccggctgatggctgagaagttcaacgattacaacctgaccggcgatggcgagatgacagatgatgttatcaaactgcgcgaagaaattaacgaacagtatcgtgccttgaatgacatgaagaagatggccaaagaatacggctatgacatttcccgcccagctgctaatgctcaagaagctgttcagtggatctacttcggttacctggcagccgttaagacccaaaatggtgcggcaatgtctgtcggccgtatcgatacagtgattgatgcctatattcaacgggatatgcgtttgggcaagctgaatgaagagcaggcacaagaactcatcgatcatttggttatgaagttacggatggtacgtttcattcggactgaagaatacaactcactgttctccggcgatccgatctgggcaacactgtccttggcagggatgggtaatgatggccgtcatcatgttaccaagaccgcgttccgcttcctgaagaccttggacaacatgggcgcggcaccggaaccaaacatcaccttgttgtggagcgaacgtcttcctgaagggttcaaacgttatgccactgaagtgtccatccaaagttcaaccattcaatacgaaaacgatgatctgatgcgtaacgaatggggaaccgactattacggcattgcttgctgtgtttccgcgcagccaattgcagatggtgttcagtacttcggggcgcgagcaaacctagccaagaccgtgctgtatgcgatcaacggtggtaaagacgaaattcaggaagcacaggtgggacctgaatacgagccgatcaccagcgactatatcgactatgacgagttcatgaagaagttcgacaagatgatggactggttagcagatgtctatgtcaatgcactgaatgttattcactacatgcatgacaagtactactatgaagctgcgcagttggcattgaaggatacacgtctgaatcggacgtttgctaccgggatttccggtttgtcacatgcggttgattccatcagtgccatcaagtatggccacgtgaaggcaattcgggatgaaaatggcgttgcaatcgactttgttgctgacaatgatgactatccgcgttatggtaacaatgatgaccgggcagacaacattgctaagtggttggttaagaccttctacaacaagatgaatacacatcatctgtatcgcggtgctaagctcagtaccagtgttctgaccattacatctaatgtggtttatggtaagaataccgggacaacaccaaacggccgtcagaagggcgaaccattctcacctggtgccaacccggcgtatggtgctgaaaagaacggtgctttggcttccttgatgtcaaccgccaagatcccatatcactatgcaacagacgggatcagcaatacctttggggtaacaccgaacaccttaggccatgacgatgaaacccgtaaggacaccttggttcacatggttgacggctacatggaaaatagcggcatgcaccttaacatcaacgtcttcaataaagaaacgttgattgatgcccagaagcacccagaagaatatccaaccttgactgttcgagtttccggttactgcgtctactttgcagacctgaccaaagaacagcaagacgatgttatcgctcggaccttcttcgacgaaatgtaatcaagtcaatctattcgcaaaacaggagatcattcctgttttgtcaaaagacggcaacgatgctgttgccgttttttgacaaactgaaatgaaaatcgttgaaaattaggtatttatttgcactggaggcggcatagatgaaactcatcgatcaatcacaaagcccgttaaatattttggaacaagtgggacaggatcatgaaggcccaataaaaggatacgttcattcagtcgaaagctttggttcggttgatggtcccgggattcggtttgtcgtctttatgcaaggatgcaggatgcggtgccagtactgtcacaaccctgacacttggaatatcggtgtgggcgaggaaatgaccgctgatcagatcctggcagatgcacagcgatataaagccttctggggcgaacaaggggggattacttgtagcggtggcgaaagtctcgtccaaattgattttatcctggaactttttaccaaagctaaggaactgggtatctcaacttgtttggatacttcgggtggtccattcacccgtgatcagccgtggtttggtcaatttgagaaactgatggccgtcacggatatttcgttggttgacatcaagcacattgattccgcggaacacaaaaagctaaccggtttcccaaacgaaaacattttggatatggttcagtatatgtcggatcatggcgatgatatgtggattcgccacgtacttgtgccagaacgaaccgactttgatccttatctcaaacgcttgggagattatattgccactttggataaacgcgtggtccagaaagtggaaattcttccgtaccatacgttaggggttaagaagtaccatgaactaggtattacgtatccgctggaaggtatcgagccgccttcagctgatcgggtcaagaatgcagagaacttgctacacgttgaggactatactggatggcaaagttggcgaccacagccagctaacaagcagtgatttagttgaaacttaacgtaacgattaaaaacgcagcaaatccgttgcgttttttttaaatgccacttatgatgatggttgagtaacgttatcaaattataaacgaaagggaagccgccctatgaagacgaaacaagagcgcattttttcctccaaaactctcacgtattttttgcaattagcagaaaccatgaactacacccagtcagcccagttgttggggattacccagccggcactgacgcagcaaatcaagaaattggaacgaacagtgggggcaccattgttttattctgttggtaagaagttgcatttatccgatgccggtcgcacgatgttgaaggcgacacacgagatttatgaaattttgaaccagacgactgacgagattcagcaaagcaccagtgccacagtcggcaagattaatattggcttgttaagttcaattgaagacagtgcgtttaatgcttttatcgcgcattattacgaccttaatcctgaagtcgaaatcacgctacgaatgatgacacgtcatgagatctgggaagcgttggagaacaatcagattgatttggccatcatgaatctgcctgatgagacgattaagaactggaagccgtatgcaagcaagaagattcttgatgaacagttattgttcctgcatcatgataattccttggctaatcgcaaacgcctgcattttaaagatacgctggctgagccgtgggtaacttatccagacgactatttcctgggtcagttgttgcatgaggcgtataagaatcagatggttgattttccgcatgttgtggcgcattttaccacgccatatcagttaactcagtttgtcaaccataccggtgttaacaccgcgttaccaaccagttttgttgccgctcatgctgatcaaatcaaggcgcatgccgttgcctttgaaccagcgattcgctttgagacctcgtttgtgtatcgcaaggaaaaagccgatattccgcggattgccaacttctttaagacgtttgacgcacatttatccgagaaagattatctatcgcgggtcagcgaaaacagtggtaaaattgaacggtaaactattcagctgaggagcgatcagataacatgacgactttgatttttggacatcaaaaccctgatacagacgcgattacaagcgccatgagttgggctgaatttcagaagcaagcaggtaataccgatgttgaagcagtagcactcggtgaaccaaacgatgaaaccaagtttgtattggatcattttaaggttgctgcgccgcgggtcattaagacagccgcaaatgaaaccgggcacgtaatgttggttgatcataacgaattccagcaaagcgttgctgatatcgaagacgtgcaaatcgattcagtggttgatcaccaccgcattgccaacttccatacggcgtcaccactatattaccgggcagaaccagtgggcagtaccaacacggtgattttcgagttgttccaggaacacggctataaaatttcaccaacactggcaggcttaatggcttctggcttgatttcggataccctgcttctgaagtcaccgactgcaaccgacaaggacaaaaagatcttgccggaaatggctaaaatcgctggcattgacctgcaatcatatggcttggctatgttgaaggcgggcaccaatctagctgccaagtcggatatggatatcattgaaggcgatgcgaagagctttacgatgggcggtaagtctatccgtattggacaagtgaatacagttgatcttgatgatatttatgcgcgtcaggatgaattggtggccgctatgaccaaagaagcacaggcgaagggctatgatgacttcctgttaattgcaaccgatattctgaacagcaattcaacgggctttgctgttggcgcagatcgtgacaaagtggccgcagcattcaacgaaaagtttgatgcaaatgaccggttggcactgcctggcgtggtttcacgtaagaagcaggtcgtaccgccaatgcaaggtgcgtttgaaggttaattttgaacttaataattggttttataaatcgcagccgtttgtggttgcgatttttttgtgctcaaaaacttggatgaacaaaaaggatagttcaaatttaaaacgaggtgcaaaaaacgcagcctcataactacttcgtataatatatattatgtaaactagaatggagattttgagtcgttgactttgacgtgacttatttggtgttcaaatggcaaaacgattgatgcaagtcccctcacctgacagacagctcaaaaacttttgagagaagcaaatcaattgtacggatgtgagcggtgcgctttatttgttttttctggtttgaaaatgaccagtcgttgctaaatatatgtaaattcagcattaatcaaagcagatttgtagaaagtatcattttgagtcataaacagcattcaagtcgcaagtgttgctgtcagctgaattctggatcaaaatacgaaaattgatttgattgcagccaatgaatcgttggttaattggttaaactgttgctaaagcggcgccgtggaatcaggacatcagcacagatggtcctgatcgtgcagtaaattcaaatttgaaatgcaactaagtttagtgtcaaatgacagatcaacaaatttggtgatttagctggcttgatgattagaagcccatttacctttggataatactaaaactttattcagttctacactggtgcttttttcggcgcatatcgttgcgaattaccgatattttcgtcattatccctcgccacgcactggttttttcgcgtatactgaaattatccaaaagaaaacatatgttcgaggtgactttatttgtcgacacagaactatcctaaattaatacaagccatgctaccttccctgccggactatattcaggattactatcacagccaaaaagcaattcccatcgcggattctaccctttaccagtacctgcacttttaccaggaatttctgcattggcttatctccagtcgggtcacggacgccatttcgccacagaatgtgcctttggaaactttagagcggctttccttgcgtgatgcgcaggcgtttgtggcgtatttacttgagcggccgtcaaaaacccatccgaataaacgtatgacgcggcgcagtgtggcgttacgactggtcgggatcaaggccctttatcggttcttaaccgaagaaagcgaaccaaatgcggacggtgagccttatttttaccgcaatgtttggaataaggtgaaacttaagacccatgcagagacgacgacttaccgtaatcataaactgcaggaaatgttgtttgtggatggcgaagatgcgcgctttttacagtggctggatcagcaatatgctcagcagctgccatcgaaaccgcgtgcttattttgaggcgacgaaggaacgaaatttggcgatcattgcgctgctgtttggctccggcgtgcgggttagtgaattggtcaatatgaatttggaagatctcaatatggatcgtcatactgtgcaggtggtgcgtaaaggtaattttcaggatcgcgttaactttgctgactggattgatccttatttaacggcttacttgaagtcccgaaccgcgatgattggtcagcagaagcctacttctccgctatttgtgacgcaaatcggccaaatggtaaaccgcattcgccaaaatacgattgaagcattcttcaaacgctatacaaccgcttatggccgcccatcaacaccccataaagcacgccataccttgggaaccaatatttataccgtcaccaaggatgtgcagcaagttgccgatcaactcggacaaacgacgaccagcgcgacggatctgtacatcaatctcagcgataaaagtggaaaagcggccttacgcgaagtttcggaaactgccgccaaagccttggatcaacatccccagcaaccataatgtcggcggttagttgtctggttaagtcatgttgcggcgctaattaacgtcacagtattcagtgagataacagtggcgacattttttgatgctggttgacatagaaaaaagctgcctgatcgcctttgatggcttgcgatcaggcagcttttttatactatgcgtcagaccgccctcacccacgactggatggctgacggcgggaaacaattcgataataaacgttgccggtcaaacggtacatcagcacgtagatgaccgcaaaaattgcaagcgtgattaacgaaacggttaagaagaattgccaatccggcaggccgaatagcatcataatacgttggacaaagggcaatgcaaagcccacgtggatggcagcgacgatcaaaggcaggtaaaacagtgtgagtagctgactattaatggtagcgcgaacttcccgaaggctcaggccgacgcgttgtaagatggtatagcggcgtgcatccgcgtagccttctgccaactgcttgtagtaaagaatcagcaaggttgccaggatgaaggtcaccccaaagacaaccccaaggaataggaaactgctcatcatgctggcagtatcatcgtaattagcggctcgcgattgaaccgattccggtaatgcaatccctcttttgacgactgcatgataaagcttgacctgattggcgtgactgccgcttaatgttacgtcttgattagtggtcacgtcggctttgagcagtgccattgacctttttggataaagcgcgtgtaaagcggttaatagttggacatcagatgggagcgcaacaaacaagttaggaataaacgttttaggcgcatttggaaaactggtgacttgtttggcgacgtggtaagtctgtttgccaatacgcaacgtggcgggttcgtaatgattggaggcatagattaaaacttcatgattgttaagtgtcacatgcttgccagtatagcggttataattttcgacggtcatcagctgaaccgaacgggcattattgaagctaaacgggccgttaaagttagcttgagaatctaacttgtttttttctaataaagcaagcgtacttgagggtccgttaaaggttcgcatcgagtggattttgacgtgatgtgttttagccagtgtccgtagttggttcgctgcatccggccgcttggggttgattgagtatgctaaatcaaccggggtttgcgagttgacaatctcatgaatgccaaagaataacgttgcggtggttgcaagtgtaatcagcgtcatggtgactaaaatagcaatcgaagccaaccctgcgccgttttgctgcatccggtaaagcagattcgagacgttgataaaatgtttaggcttgtaatagtagttcttgcggtgacgcagccatttcaagacaaataccgagccggacgtgaagagaccgtaagtcccgacaatgacaaggacgaccgcaaagaaaaacaagctcatcgcttgaagcggattcttgacggtgaccgcaatcgtataaccggcagccagactcgcaatgctgacaatcaaagttagccacttggttttaggttcccgttccccagcgttttgttcgcgtacgagttcgatgggatgtttgcgcaatagccagaactcgtcaaccaacattaaaacaatgaacaagccaatcgtgatcaacccggcaatgctgaaggcagtttgactcaagccaaaatcgagattgtgattgacatgcagcattttggccaaagtgagatagctaaggcgtgacagcacggttcccaaaattccgccgcacaataaggttgtcaacaatagcagcagcttttccgtggccatcattttgcttaattcacgtttgccaaagccgatgatgttgtagagccccaactggcggatacgctgtttacgcaaaaagttgttggcgtagatgattaagatgacggaaatgattgcggtcgtcattgagccaaatgaaaacagtgatttgccagctgcctgtccgaactggcggaacaatacatcactgctcgtgtaggcgtttagcatgatcaaattgatggccatcaaaaagctagtggtgataacaaatggcacaaataaacggcgatcggctttaaggttggtggcggctaatttgaaatagaatttcattgcgcctcgccttccttcgtcagcattgcggtcatggtttcgctgattcgggtcaaaaattcgggttgctgtaattcaccgcgatacagctgatggaaaatctgaccatcgcgaataaacaaaacgcgctggctatgactggccgcaaccgcactgtgcgtcaccatgaggattgtctgcttactgtcggcattgacatcggttagcaagtccaacagctcactggaagttctagaatcaagtgcgccggtgggttcgtctgccagtaggatttccggatcggtgatcatcgcccgggcagcggccacacgttgctgttggccaccggaaagctcatatgggtattttttcaataaatcggtgatacctagacgcggcgccagttgggtgagccgatttttcatgatttcaagcggtttcttggctaagactaatggcaggaaaatgttgtcctgaacgttaaaggtgtcaagcaagtcaaaatcctgaaaaataaacccgagatgttcccgccgaaatttagcccgtgcgccttctttgactttgcgcaggtcctgtccgttaaggctgatttcgccgccggtaggatcatcaagcgtggcgattaagttcagtaaggtacttttgcctgaaccggattcccccataatcgcgacaaattctcctgattcaacggaaaaactgatgttcacgagtgcctgtaccggttgggcaccgcgactggtataagtcttttcgacattttttaactttaataatgttgacataagatccgcccctttcatttatcagcttaaaagggaaactgccgaaaaactacttacagtcgacgtgcgttgcttacaagctggtaaggtggcttactcggccagccagcgcgtttgcgggaagtgaatggcaaaggtgctgccgacaccgacttttgatgtaacggtcagggttaaccctagcttttgggcaatttgccggcttaaaaacaggcctaagccacttgccttttgattggcgcgaccgttgtatccagaatagccttgttcaaaaatccgcggtagatcttctggcaggataccgataccggtgtcagccaccagcacggcatcgcccttggcataaatccggatgctcccatgcggggtatatttgatggcattggttagtaattgctcgaaaataaatcgcagccactgactatcactcaccacagtgggcaaagtttctaccgtgacggttaagtctttggcaataaacagtttcgctaaatcccgcacggtttcgttaacaagcggttttagtggtaattcggttaacaccaaatccgtattcagtgtggtcagtttgaggtaattcagcatcacggttagataacggttgattttaccaacttcaagccgcgcatcgctggcattgacaggttcaacctgtaataagagatccagtgcagtcagcggtgttttaatttgatgggtccacagttgcaaggtatcgaccgtttcttgttcctgatcacgatacgtgtcatgattttgacgtaaggtctgttgcagcatttggattttttgaaaataaacctgcccaagcggatcggaaatttgatcagccgcaagcagtgtaacatcgccttggagctgcgaccattcgcggcgaaaccgccaaaaatcgcagccgccgatcacaagtaacggaatcagtgcgaaaaaccagctgtttaacgcgacttcaagcgaagcgttaatcagccagtttgctaacagactggcaaccagtaagatgagcaaactcagccaaaccatccagcgggcgcgcaaaaaagctttaatcatggccgccctccttgtttgctaaacgataaccttttcctttgacggtttcgatcagttggttgagtcctaccggggcgacttttttgcgtagccgattcatgttcactgccaaggcgttgcggtcaatgaactcatcgccttcccataacttctcgatcatcgcttctcgagtaaccacttcaccatcggcaccaaataacaggcttaataacttggtttctgtcggggtgaggtcgatcacttgagtcggcgagcgtagttggttgtcggtcgggaccagtgtaaactcaccgtgacttaaattggtatcggtttgctggtattggtaggttcgccgcaacatcccctgaatcttcgccaataaaaccggtagctcgatcggcttagctaaaaagtcgtccgcaccgagattcatcgccatcaccagattcatatcatccccggaactggtcaggaagataaccgggaccttgctatgtttgcgcaattcgctcagccagtggaagccattaaaatacggtaggctaatatccataatcaccagatccggtgcggcggcacggatttctgcgtccacctgatcgaatttttggaccaattcaaccgtaaatgcccaccgattaaggtagttaccaattgtctttgcaatcacgtcatcgtcttcaacaataaaaatcttttgcggcatgtttgttatgctcccctcgtggtgattcgtgggctttttaagtcaattgctttaaactaaagtcagcttctattttaactgatttcaggtgttaaaagtgagacaagccaaaattgggtggcaggggcaaactgccgcctttctcttaagtcaaaatttatttgtttttggaacgtccaccgtcttttttgcggtgctctgggatattgcgctaaaaacctcttccggcgcgtggatgacctatgtttcgttagcaaccgccctgccagctattttaatttcgctttcagcaggcgtcttggcggatcgctacaatcgtaaatggctgattgtgatttctgcagtcggtgtgactgttttgaccctcgcagtagcttatgtgtttgcgtttgtgacgcaagagctatggttgttgctcgtcatcgcggtgattcgcagttttggtaatggtctggagaatccggcggctaacgcgttattgccgcagttggtaccggaaaagcaattgacgcaggtgaatgggtataatcagatgttgatggccgctatgctcgtgatttccccgctgctggccgggtatactttgagcgatctggggattttttggatctttgtcatcgatgcgctcacagcggtactggcagtgttgtgcttagggattgttcacgtgccaacaccggtcaccaatccggatcaagcaaccaagcagaaaaatggcattgttgccggtttgcgctacgtgggccacacgccggtattgctggcatttatgttcttcaccggactggcgtttattttaattgccccttcttcccaattatcgacattatatgtcaatcgtacattcggttcggaggtctggcatctgacgtttaacgagtggtcatggacaattggtgccgggttaggcggtttgttcattgcgcggcacaaaaagtttcgggatcagcttggtttgattgcgcttggttttgcgggcagcggaattgcatttgccgaaatgggcttgccgcagccatttatgacttacttgctatttatgttggtttccgggatcttttatccgctgattcaggccgggcaaactatctacctgcaggaaaatgtgcccgcggataaacttgggcgcgtcttttcgctgtgggcgattttgtcgaccgggatttatccgttagccatgttgggttacggaccactggcagatcgtgtgccgatcggatggattttcattgtgaccggtttgttgttaatcgttgtcgcttatgggttctggcggcggcttaagcatctgaatgggtcatcaaataagtagcatctattattgaaaaaagaacgctatcacggtgcagtccacaactactgccaccgtgatagcgttcttttctgacggattaaaactgccgttgaactttgaaagccgtcggaacaggtttaaagtcgactttgggataaaactgcatggctgctggggccgatagcaacatgattgaaatgttgggtccctggatggtatgcagtgtttgcaatagtgccttgcccacaccttgatgctggtggcttttgataacagctagctcggaaacaaacgtgcaataggacttgtcagacacaccacgtaaaacgccgattaactggtgatcatcccatgcggtgagcaacacatttgcgttgttaagcattcgctgcatgcgcgcacgatcttcagtcggccggtgaataccggatgcatctaaaacggcaataaactgcgaggccgagatcggctgattattttcaatatgtaacaaggcttatccctcccgaccgatacgaaacatgttgtcagcgtgtggcaaattaatgcgttcatagaaacctactgcgctgtcagccgcgcgcaatgataaagtaacccttgggccgatgtaagcttgtaacgtcgcgatcaattgccgcccaatttggtggccttcataagcgggcagaattaaaatgtcactcagatagcaacagtactcaaagtcggtcagacagcgtgcaaagccaatgagatgctcatcgtcccagacactcaagaccagttgggtttcatcaatcatcacttgtagacgggcagcatcagcgatgggcttgtcaaaatgcgtttgctgataaagatcatgaacttgttgaaccgttaagggtgcgtttactttgatggtgtacgacacaacatcagctcctttataagtttgtcaacggtcaggttaccaaaaagaccgagcagcactcggtcaaggttcattatgaaaatcatatggcaggcacgtttttcaaagtaaataaagtaaatagtgatgtaattgatgatttatttgaaaacagtgactttgcttgccggaatgcgataaagcgagtccggtgcattcttgggtttgccaatcgcaatcagcaaggttggcatgaagtgggccggatccaagtcaagtgccggcagaatcttttcgtgatcaaatcctgtcatcgggccggtttcatagccataagcgcgggcggccaacatcagcgacatcgctgccagactactattttgaatgataaattcccgcagtgcttgcttgtcctgtttgaaatcagccagcaagtgatcaatcatcggcttttggtgttccactgcccggtccgttaacaagccggccgttgccgcgcgtttgaacaaatcgtcttcaaatggtccaaggtctaattcgccgccgacaagcacgaccgccgaagcagataagatttccggagcattggtaccggcgacactggcaattttctctttggcggcattattttgggcgactacgaaccgggttggctgcatattcaaggcactcggcgctttggttgcgtaagtaataatttgcagcagttcccctttactgattgtgatttcaggatcaaattcacgggcagtatgacgcttcatgacaacttcatcaaagttattgttttccaacatcaaattcacctcttagattttttagacatcttcaggatacgctatatggtggcgttttcctagttatttttaaaatggtataggttttgatggttggaatcggctgtcttagttttgcgttgttgccattgtcaggttcaatgcccctaactgtgaaatggcagccgtcacgtgatcacccggttgcaaaaagatttgcgggtcacggcccacgcctgttccactcggtgtaccggtaaagataagatctccgggttgtagcgccacaatcccggcgagatagtgaattaaagcaggcactttaaaaatcaattgatcaagtttggcttgttgcatgatatgtccatttacggtggtcgtgatttgtaattggtcgaggtttgtgatggcatctgttgacgtcacccagggaccaatgggtgaatagttttggaaagacttggctagcgaaaattgcggttcggcattggcaaattgtacggcacgatcgctgaagtcttcgccaaccaaaaatccggcgacatgtttaagtgcatcagcctcggtaatattgcggccacccttcccgattaacacaactaattcggtttcccaatcggttttgggtccacggataggtatcgtacttgtcggaccggccagtgagctactgaatttagtgaagacgctcggaacttctggcaacttaatgtgaatctcttgcgaatgatcaagaaaattcattccgatagcaaaaatctgggaactagcagctaccggcgcctctaattgttccggcttaaagttgatttcagaaccgaatgttaaagtgtcgcggtgggttaaagctgtcaaaacatcggcagcattggtaatgggttgcgccgttgatgcagacgttatcagatagggatggttgtttaatttggcaattttcaaaataaatgcttcctttcagatgagccattagccacaccattattttacgcctgcatggtggcggttccaatcacttcagcgcatttggcccagtgagttctgcctgaaaagtttcaatgatgcgctgtaccgccgtgttttgtgcctcagtgccaaacgtgacgcgcagccagccgggttttaagccatcacgaacaagaaaaccttgttgtagcaggcgcttttttaaagccgatgcctgcattttgggggcctgaaagaattgaaagttggtttggctgcgggtgtgtggcagtccggtttgggttaaaaagcgttcccaactatcgcgcgcttgctgcacccgcttgcgtgtcatcgtgacaaaatcctgatcagctaaggccgcctgtgcgctaacttgggcaatgctgcttaaattgtaaggcaggcgaacggtttgcaagtagttaacaagttgtttagggaaaacaccgaagccgacccggaaattcgccagtccatagatttttgaaaatgttcgcagcacgactaggtttggaaactttgataataagctgatagcgctcgtggctggatagtcatcagtgaactcaatataagcctcatccattaaaaccagcacgtcttttggtatttgtcgcagccattcggtcagtgtcgcaattgacagcagcgtgcccgtgggattattggggttgcacacccaaatcagtttcgttttcgcggttaacgcctgcgccattgcaggtaaatcaaaattgccagcttcactgacggggacatcaatcacggtggccccttcaatttgggcatgcaagcggtactcggaaaatgttggccatggttcaatgacttcatcccccgggctcaaaaaagtgcgggcaattaaggcaatgacttcatccagaccattgccaaaaaccaactgctctgcggcaacgtctaaatgttttgccaccgcggtgcgtagttgactggcatagccatcggggtaatcacgactttgcgtaaaattccagttggtcacggcctgctgaactttgacgctggtaccgaatggattttcgtttgctgacagccgcaccagctgtggcaagccaagttcttcttttaatacggcaagaggcttttctggcgtatagggatgaagttgatgaatggtaggtttaaacataaacaacgcctccttgtgatcttgtttggtttggatgagtttcaaacgtgagcgctggctggcaagcggttgtcaatatttgttgattttatcgcgctcttttaagcgactcatttttccttcacggctcgccagttcagtcgcaatctgatcaagggagatgccgcgttcgaccatgagtaccagcacatgataagtcagatcggcgacttcgagtataaaagccgcatcgtcgggatttttggctgcaacaatgacctcggtgctttcctccccgactttttttaaaatcttgtccaatcctttggtgaaaagataatcggtgtatgagcctgaaactggctggcttttccgtgactggatgagatcatataattcggtaatgctttgtttggcagctgtcattgggtgcccttcctttctgtatactgacgataaaaacaactggtgtggccagtgtggcaagcgggaccagcgggattgacggtgatgagtaaggtatccgcatcacagtcaacggcgatagcttgaaccgtttgggtgttgccgctggtttcgcctttatgccatagcatgttccgactgcgcgaccaaaaccaggtttcaccggtggtcatcgttttttcaaggctttcggcattcatataggcaaccattaatacttgcttggtcgttgcgtcttgaacgacggttgtgattaaaccggacgcctttttaaaatcgagtggtatcatcgaatcgccacctttgcttgttttagcactgtcttgacttgcggtatcgttaattcgccgaagtggaagattgaagcagcgagtcccgcagaaacattcgtatcacggaataaggtaacaaagtcatttgcggatccggcaccgccgcttgcaacgacaggcaccgaaacaatggagctaagttgctggtaaagtcgcaggtcaaatccctgcttggtcccatcggcatccattgaggtgatcaatagttcaccagccccagccgcaactgcttgctgagcccacgtgagcactcctagatcaactggggtacgcccgccgttaatcatcacctgataacgattccgactaggttgccaacgcgcatcaatcgcgacaacaattgcttgacggccaaacttttcggccccggcggtaattaaatcagggtgtttgaccgccgcggaatttaaggcaattttgtcagctccggcacgcaataactgatgcatgtcggtcactgaacggatcccgccgccgaccgttagcggcatgaaaacctgtgtggctaccgcagcgactgtttgcgtcatggtttgccgcgcatcggtggtggcggtgatgtcaagaaagaccaattcatctgctccttgcgcctcgtaagctttggcaattgctaccgggtcgccgacatccttaagctggataaaatgaaccccttttttaacgcgtccttggtcaacatcaaggcatggaataatgcgttttgtcagcatcgttgtcctccaattctttaagtttgttcaagggaaaactgccggtctgccaagctttaccgataacagccgcctggatcccggctgtttgcaaggctgtcagatcagccaaagtgtgcacgccgccactggccacaatattgacgttaggtacggtttgatgaagcattgcgagcaatgccacgttaggacctttcatcatcccgtcgcggccgatatcggttacgataaaggtagtgacgccgcgcctgaccattgcctgtattaaatgcgttggcgattgggtgcttgtggtcagccaaccatcagttgcaaccttcccggcgcgggcgtcaataccaacagcaattttatcggcgccaaatttctgaacagcctgcgttaccagttcgggggtggtgacagctactgatccaagaatcaagcgatcaattccggcatttagatagtgatccatgatagttaaggtacgaataccgccacctagctcgataaaagctggtgtgtgttgccgaattgtgctaatgacggcttgattgactggctgttgggatcgggcaccgtcgagatccactaaatgcaagtgtttaagaccagcggcggttaaatttttcacctgaatcagcgggtcggcagtcagactgacttgccggtagtcgccttgagtgagtctgacactttggccggctaataaatcaattgctggatagagttgcatcagtcgtcatctccttaaaacgctgtaatccggcaagccctactgcaccgcttttttccggatgaaattgcgttcccagaatattctggcgccggacgatgctcgttagcggttgaccgtagtcggtgatagccagcgtgtaagtgggttgggtctggacgtaatacgagtggacaaaataagtcgcttggttggcaaatccggctgcaaaaggatcgggttgagtgatcgtattggtgttccaccccatgtgcggtgtcgggaatcccgctcgtggtggaattgcgacaaccgtgccagggatgaggcccagtcccgctgtttccccgaattcaaagctgcgatcgaataacaattgcattcccaggcaaatgccgagtaaaggtttgccggtagccgcaaattgacggataaccggaaccagatcgcgttgggtcaacgcagacatggcggttttaaaagcccccactcctggcaggattaaaccggccgcagccagaatgacggcaggatcagctgaaagttggttgtcaatagccagataatcaagcgcttttttgacattcaacgtgttgcccgtatcgtagtcaacgatcacaatcatgaaatcactcctttggttgagggaatccccttcactgccggattcagcgccaccgccgcctgcatactacggcccaatgctttaaacaacgcttcaattttatgatgcgtattacgtccgtataaaacagcggcatggagattgaattcacctgcaaaggccatagcctggaaaaaatcttccgtcacttccgtatcaaatcctccgagtcgttgattggttaattcagcatcaaacacaagataagcgcggccggaaagatccaccaccacgcgggcgaggctttcatccatcggcacaaatgcgttgccaaagcgttcgatgccagctttgtcacccagcgcttgtttaaagcaacttcccaagacgatgcctgtatcttcaatcgtatgatgcggatccacgtctaaatcgccttgggctttaacgattaaacccaagcgtccatgtttagcaaaagcatcaagcatatgatcgaagaacccaatgccggtatcaatatcaataccgctttgctggtcaaggttcaaactaatcgttatcgcggtttccttagttgtccgagtgatcgttgctgtacgcatgataaacctcctagaaaagtgagcgcgagccagcgcggttagaagtcggagtgtaagtggccttaagcgtgatggcccggttttggccattgcgcttaaggtccttacacgcagacttctgcgctggggagcgcgttatggtgagagcgcgagccggcgcggttagggatcggagtataagtggccttgggcgtgatggccgggctttgaccattgcgcccaaggtccttatacgcagatccctgcgccggggagcgcgttatggtgagagcgcgagccagcgcggttaaaagtcggagtgtaagtggccttaagcatgatggcccggttttggccattgcgcttaaggtccttacacgcagacttctgcgccggggagcacgtcctaaaacatcatttcaactcataaaaacatgctctaacgcttaatccgtttcaaaatcgcttccgcatgcccatccagtccttcagtttgtgccagcgtcacaattgcatctgcttgagttgccaatgccgcggcactatattgaatgaattgagtgcgcttcacgaagtcataaacgcccagtggtgagaaaaatcgtgccgatccggctgttggcaaaacatgatttggcccggcaacataatcgccaactggttcggcggcattttcacctaagaaaacggaaccggcattgtgaatttcattgagataagtgattggattaggtaattgaatttccaaatgttccggggcgatggtattcattaagcaaaatgcagaagctacgtcagggacaatcgcgataaaaccttggttggtgatcgctgcttgtgcaatcgccttacgcggcaaacttagtagttgtgagtcaaccgccttactgacggcatctgccagcgctggactggtcgtcaccaacattgcgcgcgcgtttggatcgtgctctgcttgtgacaaaaggtcagctgccacccgtaccggatctgctgaatcatcagcaataatgccgatttcggatgggccagcgatcatatcaatcgcaacatcgccaaaaacctgttttttagcttcagcaacgtagcgatttccggggcctaaaattttatcgactttgggaatactttcagtgccataagtcaatgcgccaatcgcttgtgcaccgccaatctgataaatttcgtccacccctgccagttttgcggccgccaatacagctggatttaaaccttttgcttgtggcggcgttaccatgacgattttcttgacccctgcgagtttagccggaattgcggtcattagaatcgtggaaggataagccgcggtgccgcctgggacatacaaacctaccgcggctagtggggttagtttttgaccacggataacaccgggatatgggctatcaataaagccttggctcatttctagctggtgaaaactggtgatgtttttttgggcaagggttaatgctgccagtaattttggcgagagatcagccattgcggcatcgatttgtgcttgtggtacgcggaggtcggagatagtgacatgatcaaaattggcactgtaggcaagtaaagccttatccccatttagtttgacgtctgccagaattttttgaacggtggtttgcactgccggattctgggcaacggtttgctggcgggtggtcacttgttgttgaagctcggttaaggtaccggtaagaattttcatgttaagcctcctgagggcgaacttgttgtagcgactgaataagctggtaaatggccggctttttttgttttaacgctaatcgattaaccaccagatgcgttgaaacgggcgttaaagtagcaaaaatcttgaggttgttttcgcgtaaggtggtgccggtttcggtgatatcgacaatggcatctgccatccccgtgagcggcgccaattctaccgatccttcaatcttgataatctcaacatcttcaccttggctttgaaaatagcgctgagcaagatgggggtatttggtggcaatcaatttgcgtttggttttttgcggatcaaagtcgggtgttgaagctaggatgaatcggcaccggccggttttaagatcaagcatgtcaaactgctgatggccttgttcttcaaggacatctgaacccacaatcccgatatcaacggttccgcgattcaaataagtgagaacgtccgcggctttgacaagaataaagtggtagtcagggttttcggtaaaaatcaaacggcggcttttattcgaaagtgcctggcagtcaatgcctgctgcagtgagtaatggcaaaacctgagtggtcgtgcgcccttttgccaaggcgattgtgagggtcattgcattgcctcctttggggataaatcgattaatttggcgtgatacttttgcgccatcgtcttggcttcagcaagcgaatcgactaggcaaagttgtgcgtgcggggttgtcgcaacgactgccgcggcctcttgccattgagacggacggccataaaccagtgtgagggccggtttgggatcatccggcaaaatatcggttaaggcgtccacatcaaaggccaagccgacagctggcagcaggtcttgctgaaagctggccaacagttgatcatagcgtccgccactaaacagatattgacgactatcactggcgtaggcgtggaaaaatagcccagtgtagtaagattgtggcggttggctggttaaatcaacggttatcgtgacttggggaaattgatgttgaagaaaagcaacagtttgttgtaatggctttaggcgactgtgcagtaacgttggcggcaacagttgggcaagctgagtgaaaatcgtggcagcctcaccgaacaaccatggccattgctgcaagaatgggtataacggttccgcacgtaatggcgcaatgagttgttgataggtactgagattctttttgaaaaatgctgcttgcaatgcggatgctgtcgctggatcaagtggtaatgcctgcatgacttgcgatacgaactgggcatcagacaattccaaggttaggtccgttaatcccaagtcttcacagatccgggttgcttcgctcaagcaggcccattcggcttttatcgaggcgtatccgattaattcgataccggcttgtgtcatttggttataggtaccacttaagctttttcggactcgaaaaacgtctcccacataccaccattgaacaggaggctgaatgctggtggtactcagtaaacgcgctaacggtaatgtgaggtcaggacgcatcacaaccgcctctccggcatcatctaacatttggtaaggttgttcaccgcgaaccgtcaatggctggaaaacatcacggtattccaataatggcgttttaacgcgctcataccctgaagcaatgaatcggtggctcatcatttgaatgagattttctttacgaatcgcccggggaccgaattcatcgcgggtgccgactggtaagtgtcgatttgacatagggttgctccttccgtttgcacgaagcagtggtcattaagtgatcgcgtgtacgttttgttgggaaaaatcgaaacgaattcaacaaaaaaacgccctcgaaaacggtttttaacgttttcgagggcgaatcaacttcgcggtaccacctcaatttgtctggaccttacgacccaaacctcatctaccaatcccatgtcggcttgcgcgaactgttattggcagcggtgataacgcaacgggtgcgtgatagcttactcggttcggctatcaagttcttagatgtgtgttcagtcggtcaatcacgcgttctcagcaatcggcgctctctgtggattggtgccaacctacttggtctaatcacaacttcatggctattgatttaatgtgactctcatcataacgacattttaaaaattgtcaaccatattttttgaatgtgcggcaaaaaactttttcaatgatcgattatttgtttttttattttggcatttttataaacaaatatgcaaaaattagctaatatttgaagtctgtttgattcctaaaaaagtcagtaacagttgttgaacttccgcatcttgctttggcgttccaaagctttgacgaatccagccaggaaccatgctgtctcgcaccagataaccgtgctgtttcaggaaagtgcccagtgcttgcggatcattgacctgatagagcatgaaattggtttgcgtggcataatggcggatttggtgctggtcaaaaaattgatcccattgcttccgggtggcaaaaatctgttgttttaccttgcgtgtgaatgtctgatcttcccaggccgctaaagccgctgcctgactcatgccgctgatgttgtacgggagacgaacattttgcattttggggatgagtgctttaggaacaatactgaagccaacccggaaatttgctaacccgtataatttcgagaaggttcgcatgacgagcagattgggaaactgatgggttaacgatagcgtggatggctcgggctgatcgacaaaatcgatatacgcttcgtccacgacaacgagaatgttgggcggcacctgcttcataaactgcgtgatttgatccgggggcaaataagtacctgtcggattgtttgggttgcacacccagatcactttggtttttgtcgtgatgtgggctaataacgcgtcaagatcaatctccccggtcgccgcaatcacgggggcattaatcgttgtggctccggcaatggcggcttgtaactggtactccgggtaagtcggccaaggttgtaggctctcatcgcctacttctaaaaaggtgcgacaaatcaaagcaatcatttcgtctaacccactggaaaaaagtaattgctccgctggaacgcccaaccgtttggcaaccgcggtccgcaatggcaaagcatccggatcaggataattgcgtgcctgggaaaaggcccatttttcaagcgctgcctggacctttggcgaggtaccgaccggattttcattgaatgacaagcgcgtcattttagccaaaccggccgctttggcgattctttccggggtgctgtctgagacataatccggcagcccggcaatactgttgcgtaacattacgccacctgctttcttaattgtcttagagtttacccgttatatcgaaaaatgtaaatatattatgcataaatatccatatgagtacaatcgtgtctgctcattttttgcgcaatcacgttattaaaaaaccaagccagtacgcaacagaatttgctaatgatgcggattgacttggttaaagttggttattcattcgtcataaaatgacaaaaatgtgcgctttattttttggcgacaaaggctaagtaataagtgaccgctgctaccgtctgagcggaattgattttgccacttttaactccggcgactagttcgctgaatggcacgagccggctggtgacaaattcatcgggatcaaaatcctgagaagttttggccgccaaatcaagttttgccaagacgagatggacggtttcatccgtcatgccttcgcttgaacggacggcggttaaccactgaagatcatgcgtgatatagccggtttcttcgcgcagttcccggctggcggcagtttgccaatcttcaccggcatcgattaagccggcgggcaacgcataaacttcactgttcgtcgccacgcggtattcacgattaattaacacccgattgtcatgagtcaacgccaacattgccaccgcgttagcatgccgaattaagtcacgtttaacggttaggccatcaggcgttttgattttttgcgtcacaatgtcaaaaatcgggccatgataatgcggggtctcactcaaaatagtcccctttgctaaagggtgatcaaaaaacataccgccatctcctcaatgaaaaaagccgcgctgatacgcgacttgaaattaagctttcgtaaaatctttcatccatgccaacgcaatcgccttttcgcccagatgggtaccgacaaccgggccaaagtaagatagctcgaacggtacattcggaaacttttgctccagatcggccatccagcgctgcgcttcttccggatcgtttgcgtggattacgaccgctcgaacaggatagtcaaccttcgccaatgtttcctggaaaagtgtttcaacacgcgcgtaagctttcttgatcgaacgtatcttttcaattgcaacgattttgtgcgattgatcatcaaacgtcagtaacggcttgatcttcagcatgccgccgataaaggccgaagcattgctcaaccgaccgcctcgaaccagattctgcaagtcgttgacaataaagtattcacccatggttgcccgtaaatcatccaggcgcgctaatattgcttgcgggtctttgccggcttctgccatttgtgcggctgccagcaccagccaacccattaaaatgaccgtgatctgggaatcataaacataaactttagcgccatgaacctcgtcaaccgcaccctttaaagtattcacaaacccggagattgtgctggctaagtggatactaataatggtgtcgtaaccttcattagcaagattttcatataacttcagcatttcgcccagcggtggttgcgtggtacttggaaacgttttggcagttttgagtttggcataaaattcttgtgtggtaatatctttaccttcgtcataaacttcgccgtcaagaatgaccggaatcggcaccacagtgatgtgatgttgatcaatttcggtttgcggcagataacaggtactatccgtcacgatagcaattttcatacaggcacccacttcttcaaaaatgattgtctacatcataccataaaaaaacgagttgtaagcagcgcgcaaccaggagcgctcggaaatccaagcacgtttggctgggtttggagcagttaggttcgtggctttttgagtcaaacccaaaagctttagctgattaattggacccctcaccagtttgggcagttccgcttgtttgactgctagttgtaccggtcgtatcactgctgtcattgcccgatgttgcggtgtcactggaagttgcagccgtatcatccccgggttcattagatgtggttggcggcgtggcgggcgttgtattggaagtgcctgttgtgttaccggttgccgcgccagtttgattccagttgccatagccatagccactgtaatagggagaagtatactgagaacttgaggtattggcagtattgttaccgtacgtattcgcagccccagccgtgttggcgttagttgaactcgtcgccgcatcgcttgttgtggtctgattggttgcaggtgtcgaagtagtggcgttatcagcagttgtctgcgtttctgcaggttggctttgcttttccggtgctttttgagcgatttgtttctgatacgcccgcttcaacttgctggccttttgcttaattgtttgtaaaacatcgcgattgtagacaacaaggccttgcttggtgagattagccagcaatttctcaattccatcaagtttcttttgtaagtcggtgactgagatttctttgagcgctttttttgtcaacgtattgtctttgagtaacgcgttattctggtcctgaaaatatttaacatcgcgatcgacatagttttgataacgcgccaggacttcattgctcgcgttagtctgtttggcgtaacgcttttcggctgcttttaactttttaagtgtttgcagacgttgagtgtcgtttttttgtggttgaccatactgttgcttaagattattcaaaatcacctgagttttttcggcttgttgcttttcgccttgaacgtgctggtatttgacaacgcccaataataccgccgcggcaattaaaaccactgtaacaagcaatagaatgcttcgtttgcccttcatttttcccaataccctttcatgaataactttttaactgccctgccccatgctgagcaattttacgaaccagacgctgccgagagcgatcaatcccaaaatattatgcgcgaagattagaaagccgggttagcctagtcgtttcggttacactatcaaatctattttacctgttgtgacgactattgcctaccactaacagacgataattagtcttgatggaaaatggtatgtgagcgtcagtcgggcgttattcacagatatctttttaatccggcatgtcacgtgacgttgacagctttgccttacgcgcctaaaaccggtaaaatgattgggacaattggaaagcgagcggatcgatatgtcttttgacggaatttttacccatgccatggcccaggagcttaataccacgttaagcggcgggcgggttgctaaaattcaacaaccttatgaaaatgaaattatcatcacgattcgagctggacgcaagaaccatcccttgttgctctcagctaatccacagtatgcgcgggtgcaaattacccacattccatttacaaatccagacgttcctgcaaccttcacgatgacgttgcggaagtattttaacgcggctacgttaacagagattcaccaagtgcaaaacgatcgggtactacactttgaattctccacgcgggatgaattgggggatgaactggggctgcgcttgatcattgaaatgatgggtcggcacagtaacatctttttagtcagcaagcgcaccggcaaaattattgatctcattcgccacgtttctgcggatcaaaatcgctatcgtccgttgatgcccggtgccccgtatgtcgagccgcctaagcaagataaagtggatccgtttcatgattcggagcggatttatcacgaacttgaacgtcaggtaacaccttcattgagtcgcgccaccttgcttcagcaacattaccaaggacttgctaaggattctgcatctgaattggccctgcgactcaatcaaggcgatgccggctgggatagcttttttgcggcgctggcaacacctgaaccgactattacaacccaagggaaaaaagccgtttttaccgcgatcccgtatcagtctctgaccggcgaacagcaacatttttcaaccttaagcgcgatgctggatgcctattatgcgcaaaaagcggaacatgaccgggttttgcaacaaggcggcaacctgattcatgtgatcaagaatgtgattgataaagatcgcaaaaagcagcgcaaattaaagcgaacgctggaagaaaccgaaaaagccgatgattatcgaattcgcggcgagattctgacgacttatctgagtcaagtcaaacgcggcatgacgagtattgaactgcctaatttctatgctgataatgagccgattaagatcaccttgtccaatcagctgacgccatcacgcaacgcccagaaatattttgccaagtatacgaaattacgcaatgcagtggcacatgttcaccagcaaatgcaagaaaaccaagaagaactcgactaccttgaaggcattatggcgcagattgatgtagctagtccgaaagatttagtcgatattcgattggaattacagcaacaaggctatctgcgtaaacagaagtccgggaaaaaaggcaataaacgccaaaaagtctccaaaccagatcaattctatgccagtgacggcactaaaatctgggtcggaaaaaacaacctgcaaaatgatcagttgaccttacacaccgcgaagaaaactgacatttggctgcacgtcaaagatatcccgggatcacacgtgattatcgacagcagtgatcccagtgagaaaaccttgctggaagcagccgagctggcagcgtatttttccaaagcgcgcgacagtgccaatgttccggttgactggattgaggttaaaaagattcgtaagcctaatggagccaaacccggctttgtcatttacgaaggccaaaaaacagtgagtgtaacgcctgacgctgatttagtcgccaagctgcgcaacccgccgacaaaataggagatgcatgtttatgtcagaatcatcagcccaaatcagccgcccacttcaggaacatatcatcgccaacaaagtcaaacatggctggaataccaccgacactaactttgaaatgctgctggcttatcatgaaatggcggaattgacgacagcgttgcttaaacacgatcaagctaatatcgctgaagaactggcagatgttaccatttacctgctgggaatcgctgaaataaaaggaattgatttagcccaggccgtgaacgacaaagtgacaatcaatgatcaccgtgtatacgatgctcaaggacacaagcatttggagtaagtatgctggctttagtgcgctaagattgctgctaactttaaaccacaaaaaatcgaccttaagctagcatgttgattgctgctcaagatcgattttttgattcatctgctggtactaccctatcccaaaaacttaaagacaactttactatcaaatagcttgaatgttttttcaaatagtaacttacttaaaagtgcagcggcaattggcaccgcgaaccagcacagtaagaccaagggaattgccagcccggcatctaatgaagctagtgggccgaccataccgaccataccaaaaccggctgattgtggggttccgctgacccctagcagcgcaaccggaatggcagaaacgatggcggtgaatagacacggcagtaggataatcggatgtttaaacagattgggcatcattaacttcattgcgcccagtgcaattgccagcgtcacgccggatttattgacattccaggagaaaacaaccaacgcaatagcagttgccgccacacccatagccgatgcgcctgccgaaataccgttcagttgaatggctagcccaatggcaacggttgaaatcggactgataatcaaagtagcaaacgagcagcaaattaaaatggccatgagaattggctgcaaggtggtaaagctgttgatgagttccccaatggcggttgtgaaagccgcaataaacggtagcagtaagacacctatataagccgtaccacaaccaaccagaatcggcatggccactactgccgttgaaccgaaccgatctttaatccagatcaggagaagtacggcaatcgaggcagtaatcatggtattgatcaaatcgccggtacctgaacccacataggctttcagcgccggattaaacttaacgactccggagccaacaaatgccgctccagctgtcaccatcatctgcatgggattcaattcgaactgtaaggcgatcaagcccccgataatcaatggcgtggcaagttgaaaaatgacggcaatctgtgtcaacgtcaccgcaaatgtattcgtacccagatatttcagaatgccggataagacggcattgggaatgaggccgataatgacacccaaagcggtacctgataagaccttattaagaaaaactgtcaccgttaatttggaagacttttgcttggcgtgccgatcttcaaccagcccgctttctttgccggcttcttcctcagctagtgcatgtgcagcagctgttaactctttatttgccgaatctgccatgggacttcacctcttctataatgttggatctatataaatcaaaataaccatccgcttgtgatgattgttatgagaatattaacagaagatggcatatttagtccatagttaattttggtttaatactactctcacctttttaatatacgcaaaaaaatcggatgcaagatatttttaatcttccatccgatttttaggtatcataagagtcctacttgtgcagtatcgtcacaagcttatggtcgttaaaactggacgccccacttggccggatcttcacgccattgatgcaacgaagccaattgggcactcgtaatcgccccttgcgcttcggcggtttgaatcaaggctgtgtaattcgtcaacgtgaagaacggtagccctgctttggcgaagtttgctgtcaccgcggcgagttggtaactgaaaattgctgcgactccgagaacgttcacgccgtctttttgcgcggcggcaacggctccaagaaccgagccaccggttgacagcaaatcatcaatgacgactaacttggcatctgcagaaaggtggccttcgatctggcgtccctgaccgtgatctttaggcttactgcgaatatacaccagtggcaggttaagtaagttggcaaccaatgcggcatggggaatgccagcagtcgcaacgccaccaatggcagtcacatcaggataatgggccacaatctcttgtgccaatccagctgcgattttgctacgaacgtctgggtagccgattgtgagccgattgtcggtatagatcgggctttttagaccacttgcccaagtaaacggtgcttctggtcgtaaggttaccgctttgattcgtaacaagtcgctggcaatttgattttctaatttagtcatgtgctgtctcccacgctttcttaattgattgataggctgcaaccgggtcatcagcttgcgtaatcgggcgaccgatgacaatagccgaactgcccagacgtttagcacggcctggtgtcacgacgcgtttttgatcgcccacagcggtgccgcgcggacgaatacccggggttaccaccagaaaatcaggtttggtgacactgcgaatgagtggtgtttctaaagcactcgcaaccacgccatctgcgtcactggcctgggcgatcgctgctaatcgttgaaccgcctggctaattggcatatcaatcgataactgattctccaacatagcttgatcagtggaggttagatgggtaatggccaacatttttggtgccggctggtgggctgccttggcaccggctaataacccgcgcttggctgctaacatcatgtctttgccgccagctgcatggactgttgtcaacgcgacccctaaccgccctaactgccacgccgccttttcaacggtattgggaatgtcgtgtagttttaagtctaaaaagatgtcgacagggtgagcggcttgaatcgctttgataacggctggcccttccgcatagaaaagttccatgccgattttgacaaataatcgttcggtttgaggaaaagcctttaaaaaatctagcgtggtagcctgatctttgaagtcgagtgcaatgatgggtgtcataccgcctgtccttcctgaatacgtgcaaattctgcggcaattttggggattgcctgttcttggtaataattagctgaaccgatggcgactgccttggcaccggctgccagcatctcggcgacgtcatgaccggaactgacgccacccatcccgataatcggaatgtgaaccgtgtgcgcgacttgataaaccatatgcaacgccatcgggaacagcgccggtccggaaacgccaccggttacattggtcaaaatcggttcgccagtttggatatctaagcgcatgccgacaaaggtattgatcaaagaaaccccatctgcacctgctgcttcaacagctttggcaatcgtagtaatatccgttacattcggcgtcaatttaacaaagataggaacggaactagcttccttgactgcttttgttaccgcagcggccacggagggatcggttccaaacgccatgccgccttggtcgacattcgggcacgagatgttgacttctagcgcttttacatttggggcggcgcttaactttttggctactgctgtatattcagcaacatcggcgcccgcaatgctagcgataatcggtaagtctgggtaatgggacgcgagccacggcagcttttcgtgtaacacgacctctgctccggggttttttagcccaaccgcattcagcgtactgcttggcccgtcagcataaatcttgccttgattgccgattcggggcattaaagtcgttgatttggtaaccaaagcacctaatagattgagatcatattgtttggcgtaaccttcgccaaacccaaatgtcccgctggcgggcataaaggggttcttcatcgtcaaacccggtaactggatggccatgtgcgctttctcctccgctaacctgcgtatccttttttggatcagctgatactaactgcgaatcggtgtcattgagaaggcacgcgattccaatactttcaaaatggcatcggccgtgtcaaggctcgtcattaacggcacgccatgctcaatcgcggtttcccgaatgcggaatccatcgcttgacgcctttttatctgccgtcatagtgttaatgaccagttgaatcttgcggtcggcaatgtcttcgagaatcgtttctttaccactgtcaagcttttcaatcgtcgcgaccgtaatcccggcggcttcaaacgcctttgctgtgccgctggtagcaactaactggtagcctacttcacggaagcgcttagccagctcggtagcttcaactttatcggcatccttaaccgtgattaaagcgcggccaaattgtggcaagtgcatacctgctgcttcgaacgccttgtataaagcttttgccagcgttgtatcgctgcccatgacttctccggtggatttcatttccggtccaagcagactgtcaacgtgattgagtttggagaaactgaagaccggcgctttgacgtggataccagcttgattaggcagcagaccagtcgtaaagccttgttccttcaaacttaaaccgaggatggccaaggttgcgacttgagccagtttaacgtttgtgaccttgctcaaaaatggaacagtccgacttgcccgcgggttgacttcaatgacataagccttgccttgatgaatgatgaattgcacgttcatcaagccgatgcagtttaaagcgcgcgacagtttgatggttgcatcggtaatctggtcaataatatcctgactaaatgtttgcggtggataaacggccatcgaatcaccgctatgaatgccggcgcgctcaatgtgctccatgatgccaggcagtaccacggtttcaccgtcggaaatgcaatcgacttcgcattctttgccgactaaatagtggtcaatcaaaactggatggtcgtgcgaaaccgataccgcgcgatcaatgtaactcgctaattcgtcagcatcgtgaatgatttccattgcccggccgcctaaaacataacttgggcgaactaaaacgggataaccaattttatcggcgactgctaaagcgccatctttgtcagtagccgtaccgccttctggttgcggtaacttaagttctttaatgacttgatcaaacaagtcccgatcctcggcccggttgaggtcggctaccgaggttcccagaatcttaatgccccgttttgcaagcggttcggctaaattaatcgcagtttggccgccaaattgaacgataaccccttttggttgctccaggtcaatgacattcaggacatcttcaagcgtcaacggttcaaaatacagtttatccgcaattgaaaagtcggttgagacggtttcggggttactgttcataatgatcgcttcatacccggctttttggatcgccttaacactatgaaccgtggcataatcgaattccaccccttggccaattcggatggggccggaaccgattaccagaatacttggtttatcactcttggtgctttccgtgctgctttcataggtgctgtagtagtatggggtgtcgctggcaaactcgccggcacaggtatcgaccattttataaaccggtaaaatatgctgttccttacgcatctggcgaatttggtcggcgtgcaatccccagagtttggcaatttcttcgtccgcaaacccataccgttttacttcagctagtaatgataaatcagctttgtgggcggctaattcccgttccaattcaacaatatgcttgatcttgtcgaggaaaaacggattcattttggataattccgcaacttcatcaatcgtgtaatcacgacggaaggcttcggctagataaaagaggcgttcatcgttggcctgaataatgtgtttgcttagctcatcatcacttagcttagaaaattcagggcgccgcgggtgaatcaaaccgacttcaagcgaacgcaccgcttttagtaagctttcttcaagtgtgcggccaattgccatcacttcgccggttgccttcatttgggtgccgagggttcgatcaccattttcaaacttgtcaaatgggaaccggggtaatttggtgaccacatagtccagtgccggctcaaattcggcccaggttttcttggtgactgggttcttaatttcgtcaaggtttaagccaactgcgattttagcggccattttagcgatcggataaccggttgctttagaagccaaagcacttgagcgggatacccgaggattgacttcgatgacgtaatatttgaagctgttgcggtcgagtgcgaattggacattgcagccgccttcgatcttcaaggcccggatgatcttgagtgccgagtcacgtaacatctggacttctttatccgttaaggtttgagttggcgcaaagaccatcgaatcaccggtgtgcaccccgactggatcgaagttttccatgttgcagacaacgattgcggagtcggaagcatcgcgcatcacttcaaattcaatttctttgtaaccggcaatggagcgttcgatcaagacttgggtgaccgggctgaggttcaggccgttttcagcaatttcggctaattctttttcgttgtcagcgataccgccgccagtgccgcccatggtgaacgctggtcgaatgataaccgggaacccgattttgtcggcaaattcctgcgcttcttgaacattgtttgcaatggctgattccggcaccggttcgtgcaatttttgcatcaaatttttgaacagttcacgatcttcggcttggtcaatcgcgcttaatttggtacctagcaattcgatcccaagttcgtctaaaatgccggtattgctgagcttcattgcaagatttaacccgatttggccgccgatggttggtaaaatggcatctggcaactctttgcgcaaaatctgactgacaaattcgacagttaacggttcaatatagacgcgatcagcaatttcggtatcggtcataatcgtggccggattggagtttaccaaaacaacttcatagccttcttcacgtaatgcgagacaggcttgcgtccctgagtaatcaaattctgcggcttgaccgatgataattgggccagagccgatcactaagattttatgaatatcttgacgttttggcatgattatcctttctgcgtacgatctgagaatgcatccatcatttccataaattcatcaaaaagatggtcggcgtcgtgtggacctggcgcagcatccggatggaattggacggtgaaagccggatacaggcgatgccgcaacccttctaccgtgccatcgttaatttccacgtgggtgaccagcaaggtgtccgggtcaatgctgtcaggatcaacggcgtaaccgtggttttgactggtgaaatcaatgcggccggtcgcaatttcacgaaccggatgattgaacccgcggtggccgtatttcattttgaaggtgtcggcgccgtttgccagtgcaaataactggtggccaagacaaatcccgaatagtggaatcttaccttcaatgccgcgaatcatatccaatgcttccggcacatctttcggatccccagggccattggttaacatgacgccatccggtgctaattctagaatggtagccgcagtggttgtggacggcaacacggtcacgttacattgacgtttagccagttcccgtaaaatgctatgtttgaggccaaaatcaatgaccaccacattgcggccagtacccggtgccggataagcctgctgagtcgagacttgttgtacttgattctttggcagtaccaatgctttgagctggtcaaaggcatgttcgtcggcggcatccacaatactggctttcatggcaccgacttcccggatttttttggtcagcgcccgggtgtcaacgccgctgataccgggaatatgtttgcgcttgagaaattcatccagcgtcatctgactacgccaattaccggtgaccctcgcaacgtctctaaccacaatcccctttgcagtcggatcaatgctttcgtaatcatcacggttaataccgacattgccgatgagcggttgcgtgaatgtaatgatttggccattgtaactttgatccgtaatggtttcttggtagccgctcatgccggtgttaaaaacaatttcaccagtcgtgaccgtttccgcaccaaagccgacgccaggaaaaacactgccgtcttccagaattaaatagcgcttcatgcttgtcctcccttttgataggcgatttggccgtgactaatggtatataacgcctggccttgcacctcttcaccgataaatggtgaatttttaccttttgaaaaccaatcggcgggatcgattttataagaagtttccagatccaaaatggttaaatcagcgggcccaccaactgtgatgtgaccacctggcagtccgaatttggctgccggaatcgtgctcattttggcaatcagttgttggagcgtgaacattttggatttaacgaacttggtgtacagcagtggaaaggccgtttccgaaccgacgatcccgaatgcggcggttttaaacgatcccgtcttttcttcagccgtgtggggtgcgtgatccgtggcaatcatgtctagtgtgccgtcttgcaagccttccagtaatgccaaatgatcagcccgtgaacgtaacggtggattcattttaaacatggggttatcgccggggatgttattttcatcaagtaacaaatgatgcggtgagacttcagcggtaacgttgacgccgcgtttcttggcttcgcgaatcaaggccacactttggcgggttgagatatgacaggcgtggtaatgaacgcctgtggcagctgccaggtctaagtcccgagctaattgactgctttcggtttggttaatgatgccaggcaggttcagttttttggcaaccggaccggcgttgatcacgccaccgtgcatgaggcttgcgtcttcaatgtgagccacaatcggcgcgtttaacttggctgcctgtagcatggctcgatacatggtgtcagcatcttgaaccccgacaccgtcattggaaaaaccaagtgcaccggctgcttgtaaggcgggcatgtcaaccacttgatccgagtgcaggtttcgtgtaatgggggcaaactggcgaacggtgattttggcatcgctacgattcttggccagtaacggcttcaaagtggcgactgtatccggcaccgggtttaaattactcatggcgacaacggttgtaaacccaccatgtgctgctgcctgcgcaccggttttaaaggtttcttttgcggtaaaaccgggttcgcgaaaatgaacatgaacgtcaatcaatcctggcacaactgtcgcaccggtggcatcaatcaccgtttcatcggctcgagctgtcagttgctggccgattgccgtgatctgctcgccggtgatctggatatcggcagtgtattcggtgtcgctaacgatgtgggcatttttgatgagcatgagttactcctctccgaagtgacgggcattgatgaccgcttccagcatggccattcgcatgaagacgccattttgcatttgcgtaaagatccgtgattgtggtccgtcaactaaatcgctggctaattcaacatcacggttaaccggtgccgggtgcatgaaaatggcattgggtttcatggttttagccaagtcatcggtaatgccatacttagcatgataactttctttagaaaaggcttcgcgattatcctgattgaagcgttctaactgaacccgcagcagcatcaacacatcgacttgtttaaccaactccggcacgctgatgaagtcgccataacggtcaaagctaggatcataccactgttgcggaccagcaaaatgtaacgtagcaccaagtttgtgcagcatctgcatatcactgcgggcaacccgactgtggctaaggtcgccgacaatcccgatgttcaagccttcaaaatgaccgaattcttcgtgaatggtcatcagatccagcatcatttgggaaggatgttgcccggcaccgtcacctgcattcacaatggcggttgttggccatgcacccatgagttctttataatagccgtcttttgcgtgccgcatcaccgcaatattgacgccgattgccccaatggttttaatggtatcttccagcgtttcgccttttgatactgaactgtgggccgggtcgaacgggatgacggttagccctagtttgcgttcggccatttcaaaactggtatgcgtacgggtactattttcaaaaaataagttagcagcataaattggttccggaaaatgaacggtttgaccggctttgaagtcttcggcgcggttgattaacgccatagcacttttttcatcaacctgttcagcggaaacaaaatctttaaacggtgtatctgtcaaattagataaggtcatttttctctgccccttcttcattagcggcatgttctggtaaaacaaagttcaggaagattccgatcacggttgccagtgcaaggccggaaaattgatagccggcaaattgcagactggcattgccgatgccgatcacaagaatggtcgaggcaatcatcaggttgcgcttcttatcgaagtcgactttgttgtcaattaaaacccgtaagccattggaagcaatcaccccgaacagcaggaaactaatgccgccaataaccggactcgggatgctacgaattaatgcgcttagcttaccgatgaaggcgaacaagatggcaaacatccctgcgccgcctaatacataaacgctgtgcaccttcgtcatcgcaagcacaccgatattttcgccataactggtgacaggcgggccaccgacgaatccagcaatgattgacgcggttccgtcaccggctaaggtatggttcaagccgggatccttaaagaaatcacgtttagtcaatttgttgagtaccatgatgtggcccatatgttcggtcatcgtgacaaacgcaatcggtgccatggataaaatggctccccagtaaagttgcggctgatagctgataaaaggcagttcaaactttggcagatcaaaccatgccgcttgttgtaccggcgtcagatcaacaatgccaaacagcaaggccaccacatagccggtgacaattccgagtaagatcggcaaaagactaataaattttttgagatacatgttgtaaatgatgacggatgccaaggtgatcatcgcaacggcaaagtatcgcaggtcataaacgctcttggtggcactgattgtacgcatggtcgcatcggtggcggctgtgcctgccaaggataagccaatgaccatgacaatcggaccgaccacgattggcggtagtgcccgatcaatccaagctgatccgctgcgagcaacaatcaaggcaacgatgagataaacgacaccgactgctacggtgccttgtgcgatggctggataacccgcacctttcatcaaagcttgcatgatcgtgataaacgagaaactcgatcccatgtacgcaggaatcttgccacgcgtaatcaggatataaactaaggtgccgacaccgcttgaaaataaggcaatgcttggatccagtccgactaaaatcggtaccagcacagttgaaccgaacatggcaaaaaggtgctggattgaaagccccacccattgaccgaatttcggcttatcaccgatatccagtactgcttcgtcattatgaaaagccattgattattcccccatcttttcaatgctgatgccgtctttgccatcaagttcggccacctgcacctgaatttgctcgtcaagtgaggttggaatgtttttaccgacaaaatccggtcgaattggcaactcgcgatgtccgcgatcgacaagcacggccaagctgatcttacgtggccggccttcatccatcaacgcatctaaagcggcgcgaatggtgcggccggtgaagatgacatcatcgactaaaatgacatgcttgccggtgatgttaaccggcaactgtgccccttcaacatctggttggtgttcatggtcgattttatggacatcatcgcgataaaaccggatatccaattcgccaaccggaacttttaaaccttctagttgttcgaggcgtttggcgatgcggtgggccaaataaatgccacgggttttgatcccgactagaacaagatcgttcagacccttattttgttcgatgatttcataactgattcgtgtcaatgcgcgtttcatagttacctcgtctacaacctgttttgactgtgccattgatgtgccaccctttcttgtatgtatgctgataaaacttggtgccagtgagtttgcttggggatgaaagctgtgctccgacttctaaccgggctggttcacgctcacaaaaaaacgcctcctacccaatttggatagaaggcgaccgtagcctgaataatccgccgcaacggaaaggaaaccttctaagcctcactggacttagttaaaggtgcttgtttgattgagttaagattaccgaacgttgcgggtcttgtcaatgcctgcacgcagatcggttaaggttttttcaaaaattgggggtaccggcgcggtaaaagttaataattttcccgtgaccggatgcacgaagccgagttttgcagcgtgaagaaactgaccatgaccaggaagggtacgcttagggccatagagaggatcgcctgctaccgggtgatggatgtaagccatgtgtacgcgaatctgatgcgtgcgcccagtatccagaatgcattttaccaaggtgtagtttgtaaagcgctccagtacttgaaaatgggtcacagcatggcggccatctgcgaccactgcttggcgtttgcgatcgcgcgggtcccgacccaacggcgcatcaattgtgccctcgtcttctttaaacgtaccatgaaccagtgccaaatattcccgaatcgacgttttagccttaagctgggcggatagacttagctgggcggcttctgtttttgcaaccattagcaagccgctcgtatctttatcaatacgatgaacgattcccggccgaatgacgccattaataccaggcaacttggtgtgatacagcaacccattcaccagcgtgccgtccggatgacccggtgccggatgaacaaccatgccttgaggtttgttaaccacaatgacttggtcgtcttcgtaaacaatctcgagaggaatcggttcagcaacggcctttagtggtttaacttccggaatggtcaccgttacgacatcaccggccgtcaccttaaaattagctttcacgggattgccattaacggtgaccaagccgtcttggagccatttttgcacctggctgcgggtgtgggtcgtctcgtgggccgtgatgatcttatcaattcggccgctttcggtggtaatggtgaaggtatcgctcatgctaccgccgccttgtcacgatcaaacagaatgtagatcaagacgaaaacaaccccaagcgtgatgcagacatctgcaaaattaaaaatcgcattaaaacgccactgatcaagaaattcgagatggaacatatccgttacatatcgaaaacgcaaacgatcaataaagtttccgatcgcccccgctgtgatcaaggtcaaccccatccgataaaacggcttatgcagactatcgcgccacagcatggcaacaacaacaaacgccagaatcgtagtaacgtaaaaaaaccactgcttaccttcaaacatcgaaaaagcagcaccagtattacggatatgggtgagatcaatcacacctggaattaatgactgactgtcaccaagcggaatatgaaccctaacccaagtcttaatcccgaaatcaagcaaaaccaagacagcagcaaccatgacataaataagcaaagaaaaatcctcctgagcgcgagccggcgcggttagggatcggagtataagtggccttgggcgtgatggcccggttttggccattgcgaccaaggtccttatacgcagatccctgcgccggggagcgcgttatgatgtaagcgcgagccagcgcggttagaagtcggagtataagtggccttgagcgtgatggcccggttttggccattgcgaccaaggtccttatacgcagatccctgcgccggggagcgcgttatgatgtaagcatcagctgactcctacctcagccgcgcgtctaatgtttgtttcctagtgtaccgcgcccaaagaaaaaccgccatcttgaaaatggcggttaacgtttctcgcagcgatgacatgattagaaaagtccggaaatcttaccatcgtcagtaacatccatgtttaaagcagctggtgcttttggcaagcctggcattgtcaaaaccgtgccggtcatgacgactaggaacccggcgcctagcttagggataatatcgcgcacatgaatggtgaagccttcaggagcgcctagtgttttagcgttgtcggttaacgaatactgggttttagccatgcaaatcggcaagtcctgccaaccgttcttggcaatggttcgaagtgcagcattcgctttaccttcatagacaacatcggcaccgccataaatcttttgaacgatggtcttgattttttctttgacgtcgctgttgcgatcataaagcggtgtgaagtgacttggctgattcaaagcatctaaaactgcatccgcaactgccaaaccgccgcggccgccatctgcccaaaccgttgcggtaactgccttgacattgagtttggcacaggcatcaattaaccactgaatttcggcatcggtgtcacttgtgaaccgattgaccgcaacgacaaccggcacgccgtaaccttgcatactgtggatatggcgtttcagattggcaaaacctttagctaacgcgtccaggttttcctgttgcagatcggctaatgcaaccccgccgttatactttagtgcgcgaacggttgcgacgatgacaacagcatccggggttttacctaacactggggtcttgatatccatgaacttttcaccgcccagatcagcgccgaagccagcttccgtaatcgcgatgttacccagttgcaaagcggtgcgggttgctaaaacggaattacaaccatgtgcgatattggcaaatgggccaccatgaataaatgctggcgtatgttcaagtgtctgtactaagttaggcttcagggcatcgcgcaataacatggcaatggcaccggtgacttttaaatcgccgaccgtgacgggtttgcggtcataggtatacccaatcacaatccggccaattcttgcttttagatcggcaatgttttcggccagacatagaacggccattaattcgctggcgaccgtaatgtcaaacccatcttcgcgcggcacgccactggttggaccgcctaagccaattgttacatggcgcagtgcccggtcgttgatatccaacgcacgcttccacaaaattcggcgagggtcaatattgagtgtgtttccttgctgcagatgattgtcgattaaagcggccagtgtgtcaacggcagtggtcaaagcatgcatgtcaccggtgaagtgtaggttaatatcttccatcggtaccacttgcgcatagccgccaccggttgcgccgcctttcatccccatgaccggacctaatgaaggttcccgcaatgcgataacgggatgctggccgcgttgttgcaatgcatcacctaagccgacagtaatggttgatttgccttcaccggcgggggtcggattgatggatgtgaccaaaacgagcttgccaaacggcttatctttcaacgcattaagcgccgtaaagctgagtttggcttttgatttgccataaagttccaaatcatcagcggttaaaccgatacttgcggcaactttcgtgattggccacattgagctggcttcgttagcctgggcaatttcaatatcagacatacaacacactccttatttagtggatgtttccaaaccttttttgatcaacgccacgattttttgttttcgctttttgccgaacatcagaaacgaaacgcgaccgtattgtttggttttaagcataacggtcaaacggccattcgtaaagtcctcaatgtccgcccaagctaaattaatcgtgttacttttaaaaaagctggttaaacgaaggcctttaggcgttgcgactaggcggagcaataaaatctgaacaatcgcaactaaaattgtgatacctgcaaccgcgaccgccagccatgataaattggtgctttccagctgaagaatgatcgctaaactaagtccaaatacgatcgcactccaaaacatgctaaaatcgatccatgcaggttgataatgtgttcgatatcctgccaatttgccacttccttaggagaaatcatgcttaaactatacacagatggcgccacaaaaggcaacccgggaccggctggcatcggcattctggttagcggattgcctcagcaaattcaacatcatgccgctttgcctgcgatgagtaaccacgaagcagaatttgctgctgccattgccgggtttaaattattgattgaatccagcttgacaacaggcacagtcgcttactacagcgattccaagttagtgattcaagccattgaaaagcgctatgccaaacactatccggctttaacggcagagctgctgagcttaattgacgagtttccgctggtattgcccaactggatcccggatcggcaaaatcgcggtgcccatcacctggctcaacaaggtttgcaccaagctgaaaccgaaagttagtgtcagtcatcttgtcgtttcatggatcgattgacgtaaaaaaaagcctgaaactccagcaatattggaagtttcaggctttttgatcgaaacgtaccagcttgggttatagctgattatttaagcactttgaattgttgctcacgatccatgtaatccttggcattcgcttcgccttcgatggaaccgaatggcatctgagcacgtaactgccagtttgccgggatatcaaaagcttcgcggacaaggtcgtcaatgatcgggttgtaatgctgcaagttagcaccgataccgttgttagccagcgttacccacgtgttaagctgagccgatccttgtgactgttctgcccaagttgcaaagttatcggcatacagcgggaaatttttctctaactgttttacgacgtcggtgtcggtgaagtataaaatggttgcaaaagcggctttgaaaccggcaattttcttcttggttgcctcgtaggcttcctcgcttggcacttcactctttaagcgcttgaccacaatgtcccataacttatcatgttgctcgccaaacaggaaaacggcccgagtagcctgtgagttaaaggctgttggtgtttcttgaataacggattcgattaatgcaaccaactcgtcaggattttgtttgatatccttgccgagtgcatagatggagcggcgttgtttgagcagatttagaagatcttgattcacgagataaccacctttttattattaatcaatacgtgttcgggcacacaccgtcaaacccaccctcacctatcactggctgtgaacgttaaaggcggtgcaacgcatgtgagaacaagcataagtttaccaactgactattagtaagtaaacccccaagcgaaaatttcttgaaaaagcgactggctaaacttgcattagtataccgaatcctgcttagcgcttctatactataacgtgacagtgaccgttggcttgggtacaataaaattattcttcatggaggtgcggtatgtcgctcattacgtggctaattattattattttggttttgaataccattggggcgattttcaccgtcctccgcgaagtccgcgatatttcaacgacctgggcttggttactagtgctgattttcctgccgattattggtttcggtttttatctattcgccggtcgcggcttgtcaaccaagaagttgcggcggattcaacgcgaatatgaatctggcgtgaaagccttcgtgtcacttcaaaaacatgaaaatgcgcgcaataagctattgccgcctacggattacacgccagcagctaaggcgttaacggccttttttcttaatacggcccaagcaccggtactcgcgcacaaccaggttcaactgtacacggatggcgaaaaaaagtttgcggcgttatttcgtgacatcgaagcggccaaacattatatctatgttgagtattacaccatttataatgacgagctaggtaatcagtttcaacaactacttataaagaaagccaagcaaggcgtcactgtaaaggttttatatgatgcctggggttcaatgggtgcctcggctaaatggtggcggcggctcactgatgtcggcggacaggctgagagctattttagctcgaaacatcccatcaccgactttcggcttaactatcgcgatcaccgcaagatcgttgtgattgatgatcacgttggctatattggcggttttaatgtcggtgatcaatatgtttcgcgtaaaccgaaattcggttactggcgcgatacacatttacgcattgtcgggaacaccatttatgcgttgaaaattcgctttacaatggattggaacgcaactgtcgatgagcaaaaagaaattgcctataacgtcgaacaaagcggtgccgaggatctgaccagcgaaagtatgaccgcaggcagcacgccgattcaaattgttgcatccggacctgaccgccccacccaacaaatcaagctggggtacaccaaattaatcactagcgctaccaaatcagtttggattcagagcccctatctggtgccagatgatacggtaatcgatgctttagtctcggcggcgatgtccggcattgatgtccgaattatggtgccggatatgccggatcatccctttattttccgtgccacgcaatattatgccaattatctggcgcgatcaggggttaaaatttatcactaccagcacggtttcatgcacgccaaaaccgtggttgttgatgatgcgattgccagtgttggctcggcaaattttgatatccgcagtttcaaattgaacttcgaaataaatgcgtttatttacgatcgcaaaattgccggaactttggccgaaatcttccaagcggatatggccaaaagctatctactgacaccggaaatcatttcgaaccaaggctggtggttacggtttaagcaagacttttccaggctcctgtcccctattctttaaattgcttcaaaagcctttcattataacgcgctcaccggcgcagaagtctgcatgtaaggaccccttaagcgcaatggccaaaacccggccatcacgcttaaggccacttacactccgacttctaaacgcgccggttcacgctcactttctataaggcgcaaatgataacaacgccggttcaacgatgtgatgtttcgctgaaccggcgttgctttttgaaaaatggctgatgaagataccgcgattaagtaaaattattaccaaaaaggactaaagtcgtctactgaacgataccccgcgcttggagactttcaggaccgcgcgcattaacgctgccaatcatccaataccttggtgtgaccaagaaggtaatgaatcgcagcatgaactaactcgtcgcgtgccgtgagtaattcatcgccgtcaagattatacttatcgcgcaaataaccctctgcaatcgcttgatattctttgcgcgcttcgccaccatcgtttaaataagtatcgatcgcttccagattatctttggcccgattagccagttcttcggccagatcatcaacatgcggctgacgtttgtgagcgtaatccatcagcgtgtcattcatatcaatgacggccgcttcatcagctttcttgtcacgtttcatggttacttcatctcctaatactattagtatgcacctatgacctattttcatcaacgctgagcgcgaaccggcgcggttagaaaccggaacataagtggccttgggcggtgatggcccgggcttggccattgcgtccaaggtccttatgtgcaggtttctgcgccggtgagcgtgttatagaaagtgagcgtgaaccggcgcgtttagaagtcggagtgtaagtggcctcaggcgtgatggccggggctttggccattgcgactgaggtccttacatgcagacttctgcgccggtgagtctgttatagtgtgatttcgtcatataatttccgatggttctgccagcaacaaaataacggccaccgattaacgatgcaaaagctgacgggagcggtggaacaattcttgataaagtgctgaccagctctcgaaccgatcacttgccaaataaaaaacaggcgtgtctggtacaatcggttcctcaccgggagccagcgcctgagcagaaatcacgaggtccgggtgttgggcaacagttaccagtcgaatataggcgggatgcatcagattaagacggactgtttcgtacaaaggttgtggcatcatgggatcaagtgccactttgagtttatctgaaacggcactgtcggtcatgaatggccaaagtaattgatagaatccgtcaacgatttcaggccgggatttttcggtcggcagttcccgggcaaaaaaggccttaatagctgtctccagacgcggataaaacgcgcgcatgggactggcggttttggttaaatcaatgtaagcgccgcctgggaagatgcgttcgctaattaaaatttttagcaagttacctgccaaggcgagatcattggtcacggatggtgaaattccgacgagtcgtgtgctgagttcggtgcgaatcttagcgaccgtttgccatgctggcgtctcgttagcggcatgatagccgaccaaggtggcagcatcaaattgttgttccgtatgaaagcgtggaatccgccattgtccgagataaagatagagcatctcggcttcagcagtggctcgtggcaagtttgctaaaggtgcaggtatttttttaggtaatgatggctgcggtttgagcgcagaaaagttcaaagtaccggcaattgagtggtgggccttaaggcgatgcaaattaatattggctgaaaatagcaactgggcgaccgagaaatcgcgttgtaccatgccggccgcttgcaacgctttgatgagttggcgtgattcgggcaaaatatcggcgaacaacggattcccgatatcgaccagttgccacaataattggcgatagatttggcgaattcgcggttcagaaccgatcagcgataacggggtcaaattaatcgaaacttcagctcggcgcaaatagagtcgtaatgcggaaattcggcgaaaaaaagcagcgcgggaaaacccggtttcagtcaatagatctgaaagcgttgacgtgggcgccatcaaagttttgacaagtagtttccccggcagtgaccgccgatataaaaatatgcgataacgaacgcgactgatggcaggcggtgccgtcatgttgctatcaccgcggtgcaataacggtggtgcagcaggatcaatttcatgcaaatcagcggctaccttctccatgagccggcgaagttgccgataactttcaccacgcgccattgaggtagtcacaatgttaagctggtggttgggtgcgtcgcgtaaagtgccgtaaatcgctaaccggtctcgttcttcgcggtctagaaaaatttcttcaaacgccatggtgccgccttctttttcaaactttgctatagtatagcaaatggcgattgtaaactagctaaataatgcctgcttgaggccacccctattttgaatcatttttgccgctcattcaaagtcttcaaagtagcgaccacgttgacgtgatggtcattgacaatatttaacgcgtccttttgccggttgccactggcgtttactatgcaatcttggtatactaaaagtaagcagaaatcggatcgacaccatatgctcgggggtatcaaaaaaattaaccccaagatatggtgtttttcattgacaggcaccccaatattgagtattctaaaagacataagataacaagaaaggatgatacctatgcgtaacatcacactgtttacgcgcaatggctgtccgcaatgccggatgacaaagcgctacctcgatacccataacatttcatttaccgaacacaatatcaacgaagaacctgaatacatcgactacttgaagaaaaagggattccagcaggttcccgttctcgaagcagatgggcttgattcattctccgggttccgaccggatgccttgaagcaactggctgtttgatcagccagtttttttatcgcatcgaaactagcaaggaagattaaatgcagcgaaagcagggattagcatgtcactaaaaaccattagtccggatgaggttacttattacgcacttaacaacgagattaacattcccgttaacgaccaaattccgcttaacaaagataaagaagcattgcaggcctttttgaccgaaaatgttgcacccaataccatgaaatttgcttcattacaggagcgcttaaagtatctggttgaacatcactattatgaagcagactttttaaagaaatatcaaccggcctttttggagaagttgaatcagtttctcaccgcgcagcatttccaatttaagtcgttcatggctgcgtataaatattatgctcagtacgcgttaaaaaccgatgacgggacgcaatatcttgaagattacaaagatcgcgttttcgctaatgcccttttctttgcggatggtaacgaagatttggccgttgacttagccgatgagatgattcatcagcgctatcaaccggctaccccatccttcctgaatgcaggtcgggcgcggcgtggtgaactggtctcttgtttcctgctgcaaatcaccgatgacatgaattcaattggtcgggcaatcaactcggctttggaactttcccgtatcggcggcggtgtcggcttgacgctgtcgaacctgcgtgaagccggtgcaccgatcaagggcattgacggtgctgccagtggtgtcttgccagtcatgaagttgctggaagattcattctcctacagtaaccagctgggtcagcgccaaggtgccggggtggtttatttgaacgtcttccatccggatatcatcagcttcctaggcgctaagaaggaaaatgccgatgaaaagtatcgggtgaaaacgttgagccttggtgtgattgtgccagacaaatactacgaactcatcaaggctaacgctgacatgtacctcttctccccttattcagtcgaacgcgcgtatggcaagccattttcttacgtggatatcacgaaggaatacgacaagatggtagccaatcctgatattaagaaatacaagatcaaagcgcgcgacttggaaaacgagatctccaagttgcagcaagaatccggct

SEQ ID NO: 29 - DNA, 2945782 bp, Lactobacillus rhamnosus (residues 1,472,892-2,945,782 of 2,945,782)
  source 1..2945782: mol_type = genomic DNA
atccgtacatcattaatatcgatacggctaatcgcgccaatccgatcgaaggtaggattatcatgagtaacctgtgctctgaaattatgcaggtgcaggttccgtctaagctcaataatcgtcaggagtacgaggtcttagggacagatgtttcttgcaacttggggagtacgaatattcctaacttgatgcacagccgtgattttggtcatagcgtcgaagccatggtacgcgcgctcacctatgtcacggatcacagcaacattgacgttgtgccatccgtgcagcatggcaatcaccttgcccacagtattggccttggtgcgatgggcctgcacacctattttgccaagaaccacatgtactacggttcaccggaaagccttgatttcactaacatctacttcctgctgcttaattattacacgctcaaagcttccaataagatcgctaaggaacgcggcgaatccttccacaactttgaaaatagcaagtacgcagatggcagttattttgacaagtatctcaatcaaacctgggcgccgaagtatgataaggttcgcgacttgttcaaaaacattcacattccaacgcaggctgactggcaggcactcaaagaagatgtgatgaaaaacggtttgtaccatcaaaatcggatggcagttgcacctaatggctcaattagctatatcaacgacaccagcgcttcattacagccaattgtcaaccggattgaggatcgtcaggaaaagaaaatcggtaccatttattatccggcaccagggctttccaacgacacgatgccttactatcaaagcgcctatgacattgatatgcgcaaagtcattgatgtctacgcagcagcccagcaacatgttgaccaggggatggcgatgacgttgtttatgcgtagtaccatcccagctggcctttatccgtggaaagatggtcgtactgataaaatgaccacccgggacttgaatatcttgcggaattacgcccactataaaggcattaagtccatttactacatccggacttataccgatgaccaagaagaaatcggcagcaacgcttgtgaaagttgctcaatttgataatcttttaacagggggatctcccctgtttttacataaggagcgaagaaaatggtaaaacagtatattgcgattaactggaatgcaattgaagatgaagtagataaagccacttgggaaaaattaaccgaacagttttggctcgacacccgaatccccttgtccaacgatttggacgattggcgttcattgagtccggatgaacaatgggtcgttggccacgttttcggcgggttgactttactggataccctgcaaagtcaagacggtatggcaagtttacgccaaaacatccggacccaacaggaaaccgcggtgcttaataatattcagtttatggaaagtgtccatgcgaagagttattcatcaattttctcgacgctgaacacgcctgccgagatcgatgaaatctttgactggaccaatcacaatgagcatttgcagtacaaggccaacaaaatcaatgacatctatcacaacggctcggcactacaaaagaaaattgccagtgttttcctggaaacgttcctgttttattcaggcttctttaccccgctttattacctgggcaacaacaagctgacgaatgtggccgaaattatcaagctgattattcgggatgagagtgttcacggaacctatatcggctataaattccagttaggcttcaatgaattaccggaagcagagcaacaacaactgcaggattggatgtacgatctgttatacgacctctatgaaaacgaagaaaagtatacgaacgatctctacgctaaaaccaaatggaccgatgaagttttgactttcctgcgttataacgccaataaggccctgatgaatctgggacaggaaaccgcctttccggataccgccgatgacgttaatccgattgtaatgaacggcatttcaacatcaacggctaaccatgatttcttctcacaggtcggtaatggttaccggctcggtcaggtcgaagcaatggaagatgatgattattcattctcgactgaagataaagggcacaaggattaaaatgaccttgctcatgacagtaaaacagcctttgcagacaattatttttgtctcaaaggctgtttttgtttgcctgaaatcgtataaatactggggccaattctgataaatgacgcgtagaatggtgaccggctttcgcttataacctgaccacgagattacgattcggttttatcagacgcaatcttctcgtggacaagttccaaaaagtgttgcgcgatacgcgaaagctcccgatcccgtttccagaccaacgcaaccggatcggctagtgcaggtgctaacggacgaaaagtcaaggaagtattagacgtttgggtagccaggtattccaggcacaatgcccgccccaaaccgactgctgtcatgcctaatgcatcagcagttaagtcataagttccgacaatataggctggatccaatccctggccaagccaatgttcaaaactattgcggatgtgcgttgctcgtggcaggatcagttcactgtcactgatatcatttggcgtaattaacagattatcagtcaggggatcctcggtgtccatcaagattccccacgcatcacgcatgggtaacaacaaccgttcatattgcgtgtgctctttacccggacgcagaataaagtcatacatgccggcttccaggttagctaccagactttcatctgatccatacgtcacgtggacatgtaagctggggtactgaagccgcaaagattgcgctaactggagcatgagtcgtttgccgctagtttcgcctgcaccgatatagagatcaccgcccaaggcatgtttgccttgtaaattgtttttggtccgttcggcaatggcggtcaattcgcgtgctcgatttagtagataggtaccatcttcggtcaaggtgacgcggcgattaccccgaatgagcaacttgacgcccagctctttttccagatccttgagctggcgcgatagccctggctgagatatacctaatgttctggctgcagcggtaatactgccatgatctgcaatttcaatgaagttgcgcaacgtctgcagttccatgttctcccctacttcctatcagtcctaattatcacaagtgctttcctataacaattatagcccattagcggcactttgtattccctttcacacatcatcctttatcttggcaagtgttcgctggcaaaggtgttcgctcacctaatccgcttgaccgtgaaaatgatagtttgattcaaaaaagcatcggctcaagtgagccgatgcggatggtgctaccagatttgaacgcgcttttccggcggtaagtacatgccatcgcctggttgaacatcaaaagttgtataccaatcatctaaattgcgcggttggatgttggcccgtaattcatggggtgcgtggacatcgactgctaacaacatcttggcgcgctctaaacgcgattttgaacgccaaatgcgcgcccaattgatgaagaatgcgcgtaaatcagcatccttttcccgtttagccgtatccaacgccgctgctaatccgccggcatcggcaatattttccgaaaccactaatttgccgtttactttgccggctgccgtttccagaccgtcaaattcgtcaatcatggcttgggtcaattcatggaaatgatcaaaatcggctttttgccaccagttggccatgttgccgtactcatcgaactgggcaccattgttgtcgaatccatgagaaatttcgtgcgcaatgaccgcgccaatcccgccaagattttccgaagcggtttgctttaaggaataaaatggtgcctgtagaatggcggctgggaaagtaatgtcgtttttggacggatcatagctggcattcaccaagtgtccgggcatgttccataccgtgcgatcaacgggtttcgtcagtttatcaaagttatactgtacttgcaccttgcgcatggcaaataagttttctagcaatgagcgattgggatcaacatggagcagatcgtaaatggcttcaggatgatccggataccccatttttaataccatcttatttaacttaagaatggctttgtctttcgttggctgagatagccagtcagagttagctaagcgctgtttgtaagttgcaatcatcttttcaactagctgggtgacatcggcttttgctttttccccgaagtaggtccgcccataataaatgccaattggttcactgaagtaccggttggcgacccgataagcatgcttaagctgatcaggcgatttcggtgcaccagataatgcgcggttatatgtaccgctcaattgccgcagtggttcgctcaagaagccggccacgtcacctagcgtcatgacataaagccagtcgcgataaagcttgaagttggcttcattaaatagctggtcaaattcattcaaaaagcgcggatccgcaaccacaattgtttccggcacattcttgaaaatggtctttaagaggtcttcaaaattaaacggcttgagcttctcaatgaccgtgctagttggcgttggattataggccttaggataatcagcccattcttcagaactcttgacgtgcttggcaatttcggcatcaaacgccaacgcgccttccaaagtggccttttgtgcggcttcgtccaaatcagtgtacgccaacagttgctgcatcatgtctttgaaaatgccaagcaattgcgcgccattttgattgtccttagcgtaataggacgtatccggcaaaatcgtttttggccccatcagattaatcacatttttgctggtatctttcatgtcgacatcaacaaaaaagttgaatggcggatcgattaaatgctcctgaagcaaattagcagcgcgttggttgtaatccgccaggtctttaatgcccttcaccagatttaagcgtggttcagccggggcaaatccagccgcgtcccgcgttttaaagtccttagcctgttgatacagcgttactgcctgggcaaaatacttgtcaggtgcctgctttttgccagctgaaacggcggcaaaatcagccatcatcttctcctcgacttcatcggcaagatcctgaaacccgccggtactgcttttgtcgtcaggaataactgcttgtttcatccaagcaccgttcactgcttgatataaatcgtcttgatagcgtacttcacttgtcattaaaaagctcctttcaccatgaaacgttatgtcataatcttaacgcacttctcattttcttgcacgactgattcacgtttcagtgcaataggacgcaataaattctaatttggccttaggtttttctcttttaatgaaagcgtgccaagtattaaagtcggcgggacaaaattggatcgcacagcgagttagattggcaaaatagattgttgtcaatcgaaatcgctttctttttggcgcataactcgttaaaataggccatgtactaagtcaacgatcgactaatcgtgtcagtcgttactggataacgcatttgctggcagctgctgaagctgtcagccgatgctcataggaggatgtgcaaggatgtattatgtcattatgaagtctcacgatattcgtgaaaacttggcgactgagcaatatctgatgaatgccaagcagtttgatgaaccactgctgcttttttattatgaaaagccaagcgtgattgtcggccgtaaccagaacacgctggaagagttgaatcaaaagtatgttgaagatcacaatatcgttgtgacacgtcggctttccggcggtggtgcagtgtatcacgatttgggtaatttatgtttttcatttgtggtcgatagtgactccgaagaatttggtgattttaagtccttcacgcagccgattgttgatgcgattcacacgctgggtgcgacaagtgccgaagtttcaggtcgcaatgacatgctggttgacgggaagaagttttccggcagcgcaatgtacacccgcaacggtaagacattttcgcatggcactttgatgctggatgtcgatatgagcgtcatccctaatgtgctcaacgttcctgaagataaaatcaagagtaaaggaattaaatccgttaagagtcgggttacaaacttgcggccttatctggataaaaaatatcagaatctgacggtgccggaattccgggatattttattgacccgtctgttcggtgttgacgatgtggccgccattaaagataaggaataccacgtgacgccagaagatgaagttgagattaaaaagatttatgacgatgtttataataactgggattgggtttacggtcatagcccagagttcaccactaagaaacgtaagcactttgattatgggacgatcgatgcgcggtttgacgtgaaagatggcaaaattgccaacgttaaattttacggtgatttcttcggcccacaggatgttagtgatgttgcagcagctttaaaagacaagccgtacacatctgaagcggttaagaaaactttagatgcaattgatacaaacgcttatttcaccaacatccctaaagaagacgtcattaatttattagttccttaagcattcagacttacttttctataaaaaggggcagccatttgtcggctgcccctttttgatcattcttgcaaacaatcaattatatttaacctggctaattgcatatgcctggattcgtttggctccccgcccagtttcaacggtaatgacgccgcgttcgttataaggcttaacggttgcagcctcgatatcaatgacgcgaccctttaagcgatggcgatcaattgtattgattgccacctcctgttgcgtgtgcaaagcatcttgaagcaagttggtaatttcttctgggcgttgtgccataagaattcctccttcatcttaatggttagcatgcgtccatccagctaacagcacggatcaaggaaagttgcgctgcgaatttccttgaaactggctcttgctgacagacgtattcggttggggatactgtcgcaatctgatttgcaatcggcgtcacttaaaacgcgcgattgaaaacgattacggttccagtataacgattctgcggaaaaatttcagtatccgcggctaagatcaacttggtgactggctaactgaccgcttgctatcaaggattggaggttatcattaaaaattttaaaaacctgatcacgcagatgtggtacggtgccggaaatgtgcggcgtcaataagacattgcccatgtcccaaagtggcgaatcttgcggtaacggttcaggatcaacgacatccaaggctgcggctcgtaactgctgggtctgaagtgcctgaaccaacgccggtgtatcgaccgaagcgccgcggccaatattaataaacagcggctgattttgaagcccggaaaagaattctgaattataaaaatgcttggtggcagaagttaatggcaatgcattaataaggatatcggcgttttgagcggctgtgtgtgcgttagcgtctgtaacgacttcctcaaaccctgcagcgggacggccgtgtgcactcacgccaagcgtatgcaggcccagtgcatgtaattttgtcgcaatcgttgagccgatatggccagtgccaaaaatgaccgcggtttggccttttaacaacgtcattggcggctgttgctgacggaaagtccacatctgacgaccggcgcgaaccggtggtagaatgccgcggctgatcgtaaataacacgccaaggacatattcagcaatcggttcggcatgaataccactcgtgtttgccaataatacctgatgtttagcaaagtcagccagcggtagatagtcgactccggcagaaatagcctgaacaaagcgcaggtgatcgaaattcacttgcgcagattgatcgtgccacccataaacaacgtcaatttgctgggcggttgcttgatctaattgattatcgtcaatcaccacgtgccctgctttttctaaggcttgtcgttgctcaggtttgagattaaaactatttaaaattttcaaggtgtgcctccttacttgttatgatgccagttaggcttaccccagtattggaaaagatcggttcgaatggtgccattgtacaactttcgccgtttggttgcttgactgccatatgctttttcaaatcccatatcactggtcaaaatgtacttgctccaagtcgtcaacggcgcaaaggcttggcccatttccttgtaaagttggcgcaccatggcctgatcgctaagtcgcttcccatatggcgggttggcaacaatgaccccgttttccttggtggtgctaaaatccttgactgctaattgcttaaagcgaatgctatgcagtaagcccgcttgttgcgcattcagcttagccatatcaatcatatcgccattaatgtcactagcctgaatatccagctcacggtcaaaatcggcggcgtccatcgcctgatccttggtggtttgcaagacggattgatcaaaaaagccgaaatcttcaaacgcaaagtgtcgttgtaatcccggtgccagatgatggccaatcaaagcggcttcaattgcaatcgtgccagatccggtcgtgggatcgacaaacggcatatcaggatgccagttcgtcaataagacaagcgctgcagcaaagttttccttcagtggcgcctcgccttttgcaatgcggtaaccacgtttgaacaaactaggtccggttgtatctagcgtcagggtcgcaacgtcttttagaatggagacttccagtggataagtagcgccggtttcgggcaatcgcgtggttcgatgatagactgcggacatcttttcgacaattgcctttttggtgatggcttgaacatcgggctcagaatgcagttgggaacgaacagctcgccctgcaaccgggaacgcagcgtctaacggcaaaaagtgatcccacggtaatgccttaacgccttcaaataaatcgtcgaaggtgcgcgctttaaactgaccgatgacaattttgatccgatcagcgctgcgcaaccagacattggtcaacgcaatcgtttggtcattaccctcaaaatagactttgccattttcggtgcgggtttgaatacccaatgccttcagttctttcgtggtaaccgactcaaggccagccgccattgttgcgacaagttgatagttcatagcatgagttcctttcaaaattgtgagacgagattagtcattcaaggttagtttaactttttatgtacgttatggcgattgttgaggggcataactttatcgttgcggttgaggttgagtttggatggtggtttaggcgtggatggtcagaaagtgttcgggctttggctagtggaagtgactgttggccgatgctgctcataaacgcgctcacaggcccagaaacctgcacctaaggaaaatggccaaagaaggtttgggcattggacagtgaaatagaagttggccgatgctgctcataaacgcgctccccagcgcagaagtctgcgtgtaaggaccttgagactaaatggccaaagaccagccatttagtctcaaggccacttacactccgacttctaaccgcgctggctcgcgctctcaaaaaaacagcccgggtttccccgggctgtgcctgcatgtagatccctataagccatgttttgttccagaacctgttcaggcgcgggttccttcagtcatcatctatctcagcgttgccgctgtattgccgttgcttcagtttgcttggcaaaacgcccctaccaaaagtttgggttactcgctcgcggggtttacccgttccaccgttcaggtttccctgaacgtttcgtcactgtggcacttttcagacctactgacgcataaccgaagtcttagcgtggttggccgccgtaaccgttctcacggtccctaagcttattgggcttagcacgaacactacaagcatcgcagcttgtgcgggcatggactttcctcagcctgcagatgcagaccgcgatcactcaggatctacatgtgatcattaatactggtcaacgtcggaatggttgctgtcgtcgcggttatcaacactgccgctatctgacagttttgaaccgaaaacatgccgttccaaattactcagacgtttaagaatatcataatttgttgccgcagcattggtttgcggtgtttgtgcgctgacattcttggaaacactcagctgtttggtcagctcatcgacccggctaaacagctttgcattttcttctttcaaccgatcaatttcattggtgaaagcctcatagtcacgaatgatgccgtctaagaattcatcgacttcatccggatcataaccacgaaccttgtttttgaacttcttgtccaaaatatctttaggcccgtactggatactaaattttgtttctttgttactatccattccgacacacctcattgttttcatggaaccagactactaattagcttaccatatctcaatcattttgaaaatgctcattttcagcttctgccaattcttcggatgtttcttgtaaatcatccatcgtaatcagtgttaccggataatcacgtcgattagccatgtcttcggcggcacggtaatcccactgcggttttccgggaaattccggatcatagacaatcactgccgcatctgtgtgtgccgtcataaaccgcgtataaccttgaagttgggcgggcttttgataaggtgcttgtgagactgcatcagagaaatcaacttgctggcgtaatgcagccagttgggccttattgttgtcattccactgactaccaaagtcggtaaatggcaacatcatcgcaatcttaaactcaggatagagcggtttaagtgttaaggcaacttcgatggaccactgttcaacccccagttgaccgcctgtaatcagccagttgagcccttcatcaagaaactgggtcagcgtgttttttaatgaagttttaaggactttcagttttggatcctgagccccaaaaacattgagctcataggcacggtaaccggttatccataacctttttcctgccatgatttccctccaatcattaggccaacgcgcttgatattggtataatagcgccaggagtgtgatcgcatgaccatccgttatcccaatggtaatccatacaaagatgggacgcaattttcaccagacgcagtgtcgcgccctaccatttatggcggacgcgggatgactttagaagaagaacttaacctcagcaatcagtattaccgtagtatcgacaaggccgttgtctataagaagccgacgccagtgcagattgtgaaggttgactatcctcgccgaagtcaggcagttatccgtgaagcctattttaagacgccttccacaactgattataatggtgtgtatcgcgggtattatcttgactttgaagccaaagaaaccaaaaataagaccagttttccgttaaaaaatttccaccagcatcagattgatcattttcggcgttgcttaaaacaaaacggtatctgttttgttgtgattcggtttgcaacgattaggcggctgtttgttttcccggcaggacggctcattacctgctgggatcagcaaagtacaggcggtcgtaaatcgattcctttaaccaagattattcaacacggatttgaacttcatccgcaattgcagccagttgtcccattccttgatggcgttgactggctgatagaaacgaaagtaggtaatgtacgtggctaataaccaaaacatgtcgcgaatggcacgacgccgcgaaggtaaacagtcaaaaagccctaaaccccccaagaaattatggcggcggattttaaaatggaccttgctcggcttgcttctcattttcattgccggtgtcgggttattctcctggtatgcaaaagatgcacctgaagtcacccaagcaaaactcgaatctggcggatccagtacgatttatgatcgtagcggtaatgagattacaacgcttggactggaaaatcgcgactatgtcaaagcttccgagattccgcaacaacttaaagatgcggttgtttcaatcgaggaccgccgcttttacgatgagaaattgggcattgatcctgtccgtattctcggtgctgcttttaacaacatgaccggaaccggtgatggcttgcaaggtggctcgacgttgacacaacagctcattaaactatctgttttcagcacaaaatcgtctgatcaaacattacgccgaaaagctcaggaagcctggctagccatgcaggttcaacaaaagtacagtaaagatcagattcttgaatattatattaataaagtgttcatgaattatggtcagtacgggatgagcactggggctaagttttattttaataaatcgctcaaagatctgagtcttgcacaaacggctttcatcgccggcctgccgcaaagtccggctggctacgacccttatgagtacccgcaaaaagcgactcagcggcgtaatgcagtcattgatgccatgttacgcgataagaaaattacggccgctgccgccaagcaagctaaagccacaccgattactgatggtttacagccaaaacaacaacagacaaacacaaccaccaatgataaagtgattgattcctacttgacgcaggtgattgcagaagttaagaaaaaaaccggcttgaatccttacacggacaatctggatatttacaccaatattgacatgagtgcccaaaaacggctctacgatatcgtcaataccgatgattatgtcagtttcccggatgatgccttccagaccggcgtcacgatgacagatccggataacggacaggtcttggcgcaaattggcggccgtaaaaccggcgatgtgcggttggcatacaaccgggcagcgcaaaatacccgtagtaatggatcgacaatgaaaccactcatggattatggtcctgctattgaatatcttaactattcgacttatgaacaaatgacggatgaaccatacaagtatcctgggaccacgatttcgttatatgactgggacaagaagtatcaaggtcggatttccatgcggacggcgcttgaacagtcccgcaacattccagccgtcaaaaccttgagtgcagtcggtatgacgaatgccgtgaagttcttaaagggactgggtatcgacttacctgcctcagaacaatatctttccagtgcgatcggggcctcggtcaacacggttgaagaagccggagcgtatggggcctttgccaatggcggcacttattacaagccttattacgtcaataaagtcgttagcgccgatggcaacacccaaacatttaacagtcaaggaacccgggcgatgaagtccagtaccgcctatatgatcacggatatgctaaaaggcgtgttgacaaaagggacaggaacctcggcggctatttccggcctttaccaagctggtaagactgggacgaccgattatagcgatgaagagctcaagcagaatccggccctaaacgctacaggcattgccaaggacgcatggtttacgggctatacccgcaatcgggtcatttcagtctggaccggttatgataagccgacttctcatgggatcagttatgctgagcaaaccatttcccagaagatctataaggcactgatgagttatacctcccagaaccttgataataaggattggacaaagccggatacagttgagtcttacaatattctaaaaggcagcaatcccggcacagcgattacgagtggctcagccaacaccacgaaggagttgtacgttcgtggtcatgggccaagtagtcataaagcagtggccgaatcatcatcctcttccagtgccagctctgaatccagttcctcaaaagaatccagctcagaaagttccaatgctgtttccgctagcgttgcgtcatctgcttcatcctccaatgtttcttctgctgcccctagttctgcaacaccttcaaaagaagaaccgagcgccagcagtgaacctgcttcatctgctggcggtcctggtggtaatcaataagattttttcacgtgatttgaccatcaagagttttccctgatgaggattgccggacatcattaaaaaagcaccgctactgatttgagatggtcagtagcggtgctttttatatgtgaaactaagcttgctgttctagatgaaccacggccacatggtgctgtgccaataacgtttcgccatacggatcattgcgatagtcatgcgcatacacgacacgcttaattccagcctggatcaaggccttcgtacaattcagacatgggaaaaagttaacgtagacggttgcgccatgggtactgaccccattagccgcacattgaatgatggcattcatttcggcatgtatggtccgaatgcaatgaccatcgcgcattaaatgaccggcctcatcacaatgcggatcaccactaatcgcgccgttataacccgtcgcaatgatccgatgttcctgaaccaaaaccgcccccaccgttgcgcgctcacaagttgaacgttctgaaacctttttggcgagttcaagaaaataatgatcccagctttcacggtgaaccgtacgcttggatggcataatggtatctgtcaatgttcttccccctttaatggcgcgtaatgggtagccagaaacgtccattccggtccggatggtggctgtgggtcacgcgcgcgtaaatgttcacggccgaatcgaatcaaactgcggtgaagtttgatccaggtcgattttggcatcaaagtttcaagtcggctttggatttgaaccggtgttgctttaggtgaaaccaggcccaatcctttcacaatgcgactgacatgggtatcaaccgccacgcccggtatgccaaaagcatcgctgaggaccacagtggcggttttcttaccaacccctggcaatttgaccaagtcagctgcattggctggcacctgaccatcatatttttcaactaaaatagcactcaacgcttttaaatgcgccgctttagttcgatataaaccaagacgactgatttttttggaaatatcagtgactgaagcagcagccattgccgcgggcgttggatacgcggcaaatagttcgggcgtaaccgcattaacggctacatccgttgtttgcgccgaaagcatcactgccactagaatctgaaaaggattttgcgcttgtaatgtcggctgtgggtcaggatacaacgccataatttgctcgaacaattgccgggcttctgaatcagtcacacaggttcccccttttaaaatcggcttgattgtgattccggtactgcctaatagctaaagttcttgatggcgcttgagttcggcttgaacctgttgcgcggttttaagatgccgccgttcccaattcagcaaaatgcgatccatgtacttcagtgaatacgcggcattcaaaacggcttcgcgcaacgccaataagatcacttctggcaagtagtgatccgtcgtcagccagtcgcgaattgtttcctgttcaattggtgaaagtggtcggccaaattcaatttcaatttgattaaagacattcgtttgcgcatcggcatttggttgggacatcacactgctatgggctttttggtttgctgggagtttcgccagcaacggcgcgagatcataatggtcgcgcattttaccctgaccatccggaatgctttcaagaacaatcgcctgtttttgaatcaacgtttcaattgctgtatagattgcattgggtgcgacgttcatgcgcgctgccaatgccttaagatcaggggcttgatgatgcttggattgccactgatcaatgaacagatacgttataaactcggtttgggtcagtcctaacgtaggatagttatcaaacagcagattagagacattaaactgccccgcttcgatataccgttttaaatcagtcatgatagggatcctccaaaaaaagccggcgcgttggcgtccgacttttggttgccattacggctttaggcgattgatcattcgtgggaatggaatggcttcgcgcagatgatccagcttgcagatccaggtaatggcgcgttcaaggcccaaaccaaatccggaatgcggtactgaaccgtacttgcgtaaatccagataccattcgtattcatctaaatcaaggccggccttttcaatggcagctttgagcttgtcataatcggtttcacgttccgaaccgccgatgatttcgccgtaaccttctggtgctagcatatcggcgcagacatattgctgctcatcttccgggtccgttagcatgtagaacggtttgatggctttaggataattcaacacaaagactggttgatcaaattgatctgacagatacgtttcttccggcgagccaaaatcatcaccgtatttgacgtccatccctgctgcctgcaacatttcgattgcttttttgtagctgatgcgtggatatggcagcttcgtatactgtttgagcacttccggatcgcggcctagcaaatgtaacggataggcgcagttatccaataccgcctgcaccatataggcaacataacgctcctgaacctttaaactctcttcctgatgacaaaacgccatttccggttcgatcatccaaaactcggtcaaatgccggcgggtcttacttttttctgcgcgaaataccggcccgcacgtgaagactttaccataggccattgcccctgcttcagcatacaactgaccggattggctaagataagctttcttatcaaaatagtcagtttcaaaaagttcagttgtgccttcaggtgccgaatcggtcaaaatcggcgggtccatcttgataaagccttcattgttaaagaattcaaacgtggcgcgaatcatttcgttacgaatttgttgaatcgcaaattggcgctttgatcgtaaccaaagatggcggtgatcgagcaggaactcaatgccatgctctttaggcgtaatcggatagtcgtgtgaatccccgacaagctcaatgttgcggacttcgatttcgtagccaaaatgactgcggctatcttggtgaatgacgccggtgatccacatgctggactcttgacgtaattcctttgccagctgaaagacctcatctggcacgtcggctttagaaacgacgccttggaaatacgcagaaccatcgcgtaattgtagaaaggcaatctttccggagctgcgtttatcggttaaccacgccccaattgttacttcctcgttcacatgttcttttgcatcaataatgcgaatcttttccgtcatgcgttaactccccacttcaataattatttaccaacaaactcccggatacgccgggcggcctctttcagactggccaaatctttacaataactaatccgcgcatggtccggcatgccaaacgcccgtccaggaacaatggcaaccccggtttcagtcaacagtgcactgataaagtcatcaaccgtaccataatgactcaattgagcggcacgcttaatattcgggaaaaggtagaaggcgccttgcggtttatctcccatatcgaaaccgggaatatctgccagaagatcatagaaaagattcagccgttcttcaaaggcacggcgcatcttttcaacaacctgctgatcgccagttaaagctgccaccgcggcgtattcggaaactgctgccggattagaggtcgtgtggctaataaaggtcgccatggcctgaatcagcttttccggaccggccgcataaccaatccgccaacccgtcatcgcatatgacttggagacgccggaaattaaaacagtattcgctgcgatatcgggatcgatactaatcattgaggtgtaagtcgtaccgttataaatcagatcccggtaaatatcgtcagtcactaccaaaatatgatgcttcagcgcccaattgccaattaaggtcagttccgtgcgatcatagacaacgccgcttggattttgtggcgaattgataatcaatgcccgggttttatcggtccgagccgcttcaagatcatcgacactgactttatgtccgactgctggcatgaccagatgtggcacgccactcgccaatttaatctgttcctcgtaggaaacccagtatgggacaggaatcagcacctcatctcccgggtttaagaaaacctgaaataaggcatacaaagcaaacttagcgccggtggttgcaacgatttgacgatgatcataacgaataccgtcttgggcaaatatccggtcactaatcgcctgctttaattccggaataccggttgctgccgtatagaaactggcattaccagcctgaatcgccgcaatagctgcgtcatcaatcgccttaggggttgaaaaatctggttggccaatagacaaatcaatgacatcggcaccttttgcctttaagtctttcgtctgattacttaaggccaatgtcgctgacggtgcgacgttgaggattctttttgctaaatgcacgactgcgcctcctacagcttcggcaccattgcggctaccgaatcatttttaattataaatttttgatcgcgttcaattgttcgccgctgcgaaaactgtacgtcacgtagttcagtttaccagactttgacagatagccaatatcccagacaaattccgatcctcttttacccagtgatgcattcagaattttcttgggagcgctggtttgggtcacctgttgaatggctttttgccgggtaattccggacttttggtttaaaatcgttaccttacctgtctttttctgaatcacaacgtaaactgactgattcttcttggtttgaccggcaacggtgagataactcttatcacggttgtaccaccagaagccgttcacggtttttaaatcagcccgattggtagcaattttttccgcttggtcgcgcaattgttggtaaggtgacagactcttggcataaattccgatggcagcgatgatgagaacaatcaggccaccgataaataagaatttgacccagtcgaatcgacgatgatgacgcatctgtgctcccctccttttgttgggtatggttggttgagaattaggtgatgattaagccaatgctgttcgtaagcgcgctcacaggcctagaaacctgcgcgtaaggaccttgattccaaatggccaaggtgtagttagctcgtgcaactttttggttaatgaaatagtgttggccgaagctgttcgtaaacgcgctcacaggcccagaaacctgcgcataaggacctcaaacccaaatggccaaggtgtggtcagctcggcaactttttggttagtgaaatggtgttggccgatacctttcgtaaacgcgctcacaggcccagaaacctgcacataaggaccttgattccaaatggccaaagcccggccatttggaatcaaggccacttatgttccggtttctaaacgggcctgttcgcgctcttgtttcttaaccacattctaatgtaacccggaatatcggtgagtggcaatgtcattggtttaatatttggtaaggatttttgcattttcttaccatacgcggtggtgatgaagcgtggatcgaggatgatgaaggcgccgcggtcggtttcggtgcggatgaggcggccgaagctttgacgcagccgcaagatcgcacgcggtagggcatcttctgtgaacggatcgccgccgcttaattgaatctgacggtatcgggctttggtgatcggcgcttcaggcgcatcaaagggcaaccgcgttagaatgacgatttcaagcagtcgatcgggataatcaatgccttcaaaaaagcttgctgcccctaatagtaaactctggtcgccaaccgcaaaccgtttggcaattttttccgctgaaccggtgaccccttgagccaatagctctttatgcccggcaattggtcgatggatcaaacgttggtagacggcctcaatgacggataaagaattaaataagacaatcgtttgatattgattatccgccagttgttcaatggccatcgctaaataatcagcgtaggcatcatccgagacgtctgcggcatgaggagcatctgttgccactaaaaccttggcctgatcgcgataatgaaatggactgcggagttttaagaagctggattccggtaatttgtgatagcctaattgggcagttagaaaatcaaatgaacgctcagccgtcaaggtggcaccgacgaatactggcgcttcaaaatgatgaatcagttgctgaacggcagatccgacttggaaaacatcccaacttaattccagactcgccacatcggtaatctggcgtaaattaacggacatcatcaccgcctgcccggcaattaaatccggcaaccggcttagtaactcttgaagaagccggcgatgatctgccaaggcgattcgcagcgctgctaacgcttgaaactgctgaccatcgctttttaagaagaaatgcggtcggcggttaaaatcagcaattaatttgtcagttgtgaccgtcaaccgcccgagaaccttaatgagcgatttgatggtggtcgtttgtgtctgttcgagccacttggccgctgctgaatccaaacttaagttcacaaaacctgaagctgcagttgttttgccaaaaaagaagtggcgatggatctgacgctgcaaggtattcacagccgtctcggcagtggctgcctgttgattcagttgctgtaacaccgttagcatggcaggttcactttgataaatcgcagtcaaagaatgccgttcgtctggttcactcaattgccatacacgatgcaaatgatgatttaagtggtcaagcgccacccgccgtgcaaacgcggcagcagtattgtcggcaaagtgctgcgcctcatcgaccactagaaatggccgtttaaatggtaacgtgtctgcatgccgtgaaagaaacgcgtggtttgttaccaccaccactgcgtcagccaatttagcctgcagccgccgataaaaatcgaacgtataaaaaggattgataaatggcgtgccaacatcaccggtatgccggatttcagcaaacaacggcgcgcgataagtggttaaatgcagctcatctaaatctcctgtcgttgtttgagtcagccataccagtaatttcatttgcaacagttgggtttggcgagtcggtccttcttggtgaagactagcggcaaatttattgagatcaagataatgctggggacttttcagctcaaccgtgggtaacgtgcgcccaagcaaggcatcaagtgcgggaatggcttgcgttatcagctgcgtttgcaaaaccagggttgacgttgccacaaccaacttgtgctcaggtgtggcaaggtaagcataaggcagtaaatagcccaacgtctttcccaagccagtccctgcttcgatgaataatggtatttcggttttttgcgcatgcgtgaaaatggcatccatcatcttggcctgtgctttacgaaagcgatagcgcggctgtagcagatgttttttggctagttcggttgctggataagcgccagccgctgccaaatcggttggtgtagtcatcggccgacgtaacaccaatggcccgacctgaacaaattctttttttaacggtctgggaggtgacgcgatcattttcagataatcaccggtttcgcgaataaagccatcgtgacgctgaatcaaggcctgttgcgttggtgtcggtaaggcctgaaagcgcgcctttagttgcaacagtagtttcgcggtactggtagcgtcactatcggcttgatgcgggttgtcatgttggatcgcaaaatgagtcgtcaaatcactgagtcgaaaactgctgatttctggaagtaacacctgtgccaactcaacagtatcaatcgcctcaagctgtaattttggtaaaccgatacgctcaaactctgcatttagaaacggataatcaaaattaacattgtgcgccacaaagaccgtcttagttagcacttggtgaagcgcgggcgctacctcatcaaaatatggcgccgcgactaaccgttcagggctgattccggtcaaccgctggatcgtctgcgggactgaccgatccgggttgatcatttgtgaaattgtttgaatgatcttgccatggcgcaccaaagcacaaccgaattgaatcatacggtcgccgtctttgacactggttccggttgtttccaaatcaaccacagcaaaagtggtgtcagcattcatgaacttttaaccattcctgtctaaacatactgcatctatcatactatttccctgttgactctgctactaaatccacaatcgttcctgtccgtaacaagaccagataacgatgggtaaccggctcgggttgaagttgcgccagggcctgagcgtataagttcagttggccacgataacgcgcgactaactttgccggatcgggctcgtgatcggttttgtagtcaaacaacgtgacaccatcggcctcagtcacataaccgtccataatcccgtgaaccaaaacatcctcgccggggtcattttgtaaaatctcaaacaactgattggcaggcaacaacatggaaaacggcacttcccgttgcacctgttgcggcttagcttgcaataactgccctagatcggttgcaaaaaagcgcaccaaagcagttaggtcaatccgcttggcaacctctgccggcatgaccccggtggttatcaagtggtggcgcaaggcttctagactgttcagcgtaatcggtttggtcaggtcaaccaattggagcaataaatgcgtcgccgttccaatcgcagcggcattcccaccaccggaagtttcggtcaaaaatgctggggcacttaaatcgtgtagcggcggtttttgccctaaaaatcggtcggcacttacaagttccatcgtatccggatcgtcaaaagcccgcttgatttccgaaacactttgaaagcctgccgttgtcgtggcagcttggaatggatactgtttggcaaaccatcctgtcagatcaatcgcaggtgcatctgttttggctggcgttttggtcgccactccgactttaatttgcggatgagtctcgattgcaatggaaaactcggttggatcagctatcaaggccggtttgacggtggtttcagtcagtcctttgacttgcggatgacgaatgagggccggtccgatccaatccagataattcgttgccgccccgcgaatttgcggtgcaagtgtgagctgttcaccttccgcggctttggcccacttggcgaccgttttgtcagccgaagttaattgctgcccgctcatggttgcgccaacaacatagaggcgttgctgggcacgcgtcaacgccacatacaaaagacgcatttcttcagccaatgtttgattttgtcgagcggctttggcggcttggtattgcggtaactcatattccacccgggtttgcgggtcgagccacttaataccgatcccatttttagttaaaattgccggtccgctttgatcgcgacggttaaagtgtttgttcgtttgtaagacaaaaacaacggggaactcaagccctttactcttgtgaatcgtcatcaatttgacggcatcattatccggatcaacctgagccggtgtggcaaggtcctgatcctgcttttgcatcaaggtaatgaaatgaatgaaggcaaacaaacctttaaagccgccagattcataagtccgagcacgatcaaccaaggcaagtaaatttgcctggcgttgactgccgccaggggtgccgccaacataatcgagaaagccggtttcctgataaatggcccacagtaatgtcactagatcattttcccgggccagatcgcgaaaatgattgagttggtccaagaacgcggccaaagtagcgtgggtgcgtttagccagcggcgttgtcggtgttccggtgagaaaagcggtcaccgcgtcataataaggtacttgtttggctgccaatcgaatcaaggctaactgatcagctgagaggccgacaatcggcgagcgcaaaaccgcaactaacggaatatcttgcttaggattatcgatgattttgaggagtgccagcatcaccatcaattccgtcgtcttgaagaaattcttggtatcagccacgaataatggtacgccggctgcagcaaattgggtttgaatgaggctgttttgggtggtttggcgtgttaaaagcgtaatatcacgataccggatacgccgatattgctggttggcgcgatcccataattgtgcatgggggtccgaaactaaccgctggatctcggcaatgaccatttgcgtttgaccggtcgcaacatccagcggctcgtcatcttcatcggttgcagaccagtccgaagtcgcgtcggtttcgtcatcatcgtccgaagtcgctttgctatacagcatgactttgaccgctgggtggcaatcgccataatcaagcgcaccatactttaacgcagcattgtcgtcataagccaaatcgccgacttcaggatccataatctggctaaaaataagattggtgaacgccaaaacatttttagtcgagcgaaaattttctgccaaaataatccgttcaggtgcggtgggtgtttccggatgattggcaaacgcctgatatttttgaatgaataactgcgggtcagctaagcgaaatccatagatactttgcttcacatccccgaccataaagcgatcgccggggtcggttgtgctgacggctgccagtaacgcttcttgtaaggggctaatgtcttgatactcgtcgaccatcacctcatcgaaactggcgcgataattgtcagcaatcggtgcgccggtttggggatctttttgctgcaggattcgcagtgcgttatgcgcaatatcgctatagtcttgcacatgccgaaccgccttttctgcggtcagcgcatctaaaaaggttaaggccacctccgtcagcatggtcatcatcggttgcaccgtgcgcagtaagtcggtgatttgctcactcgttaaggcaaaatccggtgccaactgatcctgccatatttttttagcggcatcccgcagttgtttagcctcatttttgagtgctttgtcgtcgtcatcaagacctttgctggcgcgagaccacgccaagaagtcatgctgaactaaggcgtcgcgaaccgcttcatagctcggctcagggttgtctaataaactttgtaacgggttcaaatcggccgtgatttgttgatgccagactggatttggcaagcggttggccagctcatccgcttgcgtcagcgtggtaaatacttgcatgagtttgcgcttggttcgcggccaaatctggtgcgtgaaggtcgccgcccaagcttctggtgcataaggctttgccagttgttgcaagtaagctttaggatcggttgtggcagcagcttggcgcattaactcgaacattaaatcctgaaggccactatcatcccgatcgccgctaaagttagcggtcaattgctcgaattccgccgcttcgtcaccagcataaaattgttcgcgcaaatcgttccaaacctgttcttgtaacatatagcgctcagtttcatcagtcagtaatcgaaagcctggatctaaatcgataacatagtaataagtttggacgatttgcaagctaaacgcatccaacgtactgattttggctgcattcaccatggcaatctggttggccagatggcgccgatcctcagcatttaactcatgtcgcttggcggtcagtgtttgcttcaaggcagtctgaatcttagtccgcatttccgaagttgccgctcgcgtaaaagtcacgatcaacattctggtaatatcggcgtgttgtttgagaatcttttgaataatgcgttcaactaatacagtggtcttgccgctgccagccgaggctgataccaacatatcatggccgtgatggctaatggcagcttgttgcgatggggtaaattgcgtcatgactgtggatgctccttttcagaatgcggtatttgtgtcgggtcagcggtaaggcgtccgatcacgtctttacgctttaacttagggacgtgatggtaatgatcaaaaccggttgcagggtcaaacagcataatactttgatagtcgctgcgactgacaatcgtggaagactggccatattggaaaggctcaagtgcaatatccccagcgagaatttgcgtggctgcatcgataatcagcgcctgattgtgagccaaataagcccgcaacgcctcgggagtcaggacgtttgactgattttgattgaaactgccatcttttttaaagccaagcggtgcaatctcactacgaccgccactttccggtgaaatggtacgatccacggccgccagctcatctccgtgttcggcgactaagaaccccagatacttgaaggctttgagtcgctcaagtgccggttccaattcaggcgtgtatttgagtttaggatcctgcaagtgaaaatacagcgcccccgccggaacaaacggtggctctgctgtcacgttggtcattgcttcaatgtaagtcagcatttgcaaggcaatgccataataagcgtcactatcatcgaagcggcgttgcccacttttataatcgacaataataaaacgccgggcatcaggttcgcgataaatatcaagccgatcgattttaccgtgaacattgacgcgacccccatgcggcaacggccatgataagcctggcagtcccttggtatcgccaatccggccaaactgcagctcggtgcgcaccgggcggaagccgctgcgttgctgttgctggcgcatgttgagcaaaacctgaatgagcagtcgacttaagcgcttggtcaaataagtcatgcgatacgtactgccgaggatttcataccccggctgtttggcaatctcggcaaccattggcggtacggcagccatgatcgccgcgggttcaacatcggccaagttttgttgttgatcacgcaattgcgttaaataccgatcaagtacagcatgaaaaagactaccggtgtcggctggtgaaagctcaaattccggtcgcggttggagcagcaaaccatatttaaggaaatattcgaaatgattaagataatacgtctccaatcgcgacacggaaacattcatatcgcggccatagagttgcaccgccagctgtggatcaaggcggccaggatcattttgatacgtcaaacttccggcaaggcgttgggccaggttggctaaatcggtttgtttcaatgcgcttaacacactttgccaagccagactcaggggttgtttttgctgttgggcatcaccggcagcccgaatgaagtcgcttaacattgcccgcgggctgccaaggacagatttgaccgttgtcgcgagtgttaccggcgcccaggtttcgggcacgagatgaagcgcccgtttcagttgctgaaaataaggtgacgcctgattttcactattttcttgcgggttttgcatggggtaacttagcgtcaacgtctcgctggcggccatgaagcccaaatagttgataaacggatcacctaaagttgttgttggaccttgctcgggtaaaaagcggtcatccggcaactgtgcagctaataattggcgctcttcactgtttaaaacgccgtcatcattgggaacatccggcatggcggtgctggtggccccgataacaaaaacatgttttgctttggctaatcggactaacccggtttctgaaatcacaaccgcgtcaagtgtggccggaatctgtgtgtaagtcgcactggcaaagccggcagcaagcaactcatgaaattgctcgcgattaaacttagcgttgcccaaaatggtaacgtaatcatccagcaaagcggtaaatgtggtccatgcttgttcgtgcgctcgactgcgagcaagctcaccggctgcacttgctgcttctcgccacgcgttcaactggtccactaccccaattttcgttaaccagtggtacaaacttcgcgcagcctcaagtccggttttagctgcctgccattgtttgagtaaggccggcacagtttgagccaccagcgtttttatggcattgatttgagcggttttatcggcttcaggatccatttctgtctcatcagcagcgggattacgctgaaaataccgccatggttctgtctgtgtccagcgtcttttacctgcaatccctgttcgaaccaaatgattgtcgagggtatcgacggcatcacgaaaatctgccaccgccatcccctgaggcaacaaaagctcagtatgcaacaagcgcatgatgtcttgatactgatagtcatgatcctggatggcaaataggctttcgattaacaccaccaagggatgatccttcatcggccgctgcaagtcggtaaattgtggaatctgaaattcagcaaaaatagccggaatgatcgttgcgtacggatctaatcgccgagcaataatcacaaaatcccgataacgtgctccgttgcgaaccgcttgatagatagattgggccacatgccgcaattcctgatagggatcagtcgcagtggctaaatgcacatgatcggcaacatttgcggttggcgccggctgcggttcgatattggtattagcctgccaccaactcgccacctgtcgcatgcccaagcttaagtgccgtggctgagcaaaccgatccaaccgaattggaattcgcatcgttttggctttttgatacaaacgatgataaagccgaccagcaggtaaaaagagattaggagccacaggcggtgcagttggataaggccgatccaacacgaggccgatcgtcacttctgcggcggtttccagcatcgtttccaccagtgctgactctgaagcagaaaatacgttaaaatggttgagatagataaacgtgtgggtgagatcatgggtacgcatggcttgctgcagcccacttagcagactggcggttgtcgcataaggaccgatttctgcttcatattgatcaagaataatgcctaaatcacgcaacttagcccggtgccgatcgcctggtgtcagagccgcaacggtattggctaagtcttcggcggtaatccggccaatcatgagttcactcaattggccagcaagctgtgtgacaaacccagtgtgctgagcttctccggcataaatggttaagtccgcttgccgttctgcaagaattttggcaaccagcatcgtattgctagcttgatccagccgtggttgctgataaagcggcgtgttcttcaaataaaaccaggccagccgggaaaaggataagacctgaacgcgactttgcacgtaagtctccgagttcccctgttgcaattggcgcaagcgtttgagaagatcaatttctgcttcaaatttaatatggttcggtaccagtaaaaaaatccggttttgggaatcagcggtaagcttttcatgaatcatagccgccatggtttgggtatgatccgtcgttgcatcaccgagaataaactgcaaccccatgtgaaaacctcctaaggaaagtgagcgtgagccggcgcggttagaagtcggagtgtaagcggcctcagacgtgatggcccggatttggccattgcggctgaggtccttacacgcagacttctgcgccggggagcgcgttatagaaaagtgagcgcgagccggcgcggttagggatcggagtataagcggccttgggcgtgatggccgggctttggccattgcgaccaaggtccttgtacgcagatccctgcgctggggaacgcgttatagagtgagcgcgaaccagcccggttaaaacctaccccaacccgcatgttgcgatgtgagaaaaccactagcacagcagccccagtacaaagacgaccttaattttaatcgtcattctcttaaaccgcctacttaaaggctaccgcaccaacaaaaacagtctcactatttaaatacgtgtgcctgatgacttatgctttagtctagcataactaagtagtgtccgatcagggtttgcgctatcataagtaaagaatattaacgaggtgtttatatgaaaatcgggacggggaaaagttacgcaaaaattattctcattggcgagcacgccgttgtttatggggaaccggccatcgctttgccagtcaaaagtattcgattattagctaaagtcgagccaatacctgatggccggcaggaagtcacgtccgccttttttaccggcgatttgaatgcgggtcagttaaccaattttgccggcattgccatgctcattcgccagctgctcgtgttcttcaatgctgctgatcaaggctttcatctgaccattaccagtgctttgccatcagaacggggcatgggatcatccgcagcgactgcagtagccgttgtgcgcgccttttacgatgcgtttcaaacgtcgctcagccattcggttttgctaaactgggccgggatctcggaaaaagctttgcacggcaaccccagcggcttggatgcggctacggctagcgctgaaaagccgcagtggtttgtccgcggcaagtcgttacgatccatcatgatgccgcgcaatggcgttttactgattgccgacactgggatcgccggtcagacgaagattgcggttgatcaagtggctcagaaattaaaaaaggacccgaaaacgtatcagccactgatcaccgacattggtgatgcggtgcgtcaggcggctttggcactggcacaagatgacattatcaccctaggacaactcttaaatcgagatcaagcggacttggcggctcttggcgttagcagtcccgagcttgatcgactgattaatgttgcccttgataacggcgcatatggggcgaaactgaccggttccggcatgggcggctgcatgattgcccttgccgccgcggatcaggcgccgacaattatccaggcactaaaggcagccaatgccgttaaagtctgggaataccactttgaaacgaaatgaggctgctatgacaacttatgcacgtgcgcacactaacattgcattgatcaaatattggggcaaagcaaataagcaactgatgctgccggcaaccagcagtatttcgcttaccttgaatgacttttacacggacacggcggtaacttttgaccctgcactcgatcaggatcaattcacgttaaatcaccaaatgcagtcgcctactgctgtcagccgctttttggatcatgttcggcacctggcccaaattgatacacgcgctcgggtcaactcgttgaatcatgtaccgactgctgccggtttggccagttcggcttctgcgtttgcggcactggcactggctacaagtcgcgcggctggcctaaatttaacccctaccgctttgtcacggttggcacgtcgcggctcagggtcggccacccgttcaatctttggcggagcggtaatttggcaccgtggcagcgatgatcaatcctcgtttgccgaacccttaaccattcagccaactctgccgctgcggatgttggtcgtcacggtttccgatcagaaaaaggcagtcagctcccgcaccggcatggccaacacggttgcgaccagcccttattaccaggcatgggtacaatcgaatgaagcgttaatttcacctatgatcacggcattggccgaaaatgatctgacgacgattggtgcactcaccgaattatcgagtatgcgcatgcacgctgccattatggctgaggagccgccgttcacctactttttgccggaaactttacgcgcctggcaattggtgcaagaacaacgggcactcggcattccggcgtttgccacgatggatgccggacccaacgtcaagatcctcacaaccgcaccgtacgtggatgttctcatgaccgccttgcagcctgtttttggcgaccggattttgagcacccgcctcggcccggacgcgcaagtgattacaaaggagcaatttaatgacacagagtcagcaatcacatcgcaaggatgagcacgtctttttagcggaaaaatattttcaggcgactgcgcatgccggcttcgatcaagttcggctactacaccgggcacttccggaatcctcattagcagatgttgacttgacgcctcccattccttttggctggcgttggccgatttacattaatgcgatgacaggaggttccccgcaaaccggcaagctcaatgctcagctagggcaattagctcaggcgcttgatctggcaattgctagcggctctcaatccgtggccttacatgatccccaattggcccctacttttaaaacgctgcgtgatcataatccggatggttttattcttgccaatatcggtgccggacacgatcagcacgcagctgaaaaggcaattagtatgttagacgcggatgcacttgaaattcacgtcaatgcggcacaagaagtgatcatgccagaaggtgatcgcgactttttgtggcaggaaaatatccgtaccattgcagcaactgcttcggttccggttgtggttaaggaagtaggtaacggcttcatccgcgaagatctgcaaaccttgcagcaactaggcattcattatgtcgatatcggcgggcgcggcggcacgaactttgcggtcatcgaaaatgctcgccgcccccaccacgacttttcctacctgcaggattggggacaaacaaccgttgagtcactgcttgaagcccgcggactaccgttaacaatcctggcaaccggtggcattcgatcgccgctggatgtcattaaggcacaacgcttgggggcgcatgcggtgggcatcagtggactggtgctgcaccacttgattcaaactgactatgcggctacattagcctactttcaggaattcctgcaacaattacggcaactgtatgcattgctaggcgtgaccaactggcaagcactgcaaacggcaccggctgtgctcagtcctgaattagaacattatcgccatgtccgtcacttgccagcaatttgattttaggtcaataacaaaaggatgctagtaaacagacaatacctagcctgtcactaacatcctttttgattactttttaagatgctgatactaaattgcaagccaactaaactcgcagcccttttggatagaaattcttaaccgttccattgactaacttgccgattgcaaacggcttatgttcaaacgtgagtaagacgaatcgtttccctgacagcgaggtcgtgagcgtttcgccatgacggtagcgcgcataaccatcggcatccacctcaatcacggtttgaaaatcagccggatccagcgcagttgcgatactgtggctgggttcaaacctgtttttacggaaactcccaagttcaagccccgcgcgaaccaccttcactcggtcaaacggaatcatggttttcgggagtaacgacaggaagtccccgtggcggtaaaattgtccggtcaacggcttatgcaagctggtcgagaaaaaagtggtcacttcatcccgcgcggctttcactaaaggttttatctttagcggttttactggttcgttcggcaattcacccgcaagtcgcagtttggcaacgaaatggccttcaccgcgtacgagatgtggaaacagccgcactgtttttgccaattcaggattgccatctgcccattccggtcgaccagcaaccattcctggagactttttaatgggttcgagcgtcaaatcgtagtgagcaagcagccaagcaatgatttgttcgtcttcttccggactgaacgtgcaggttgaataaatcaaacttccgcctggccgcagcattttaatcgccgcttgcagaatgactttttgtcttgccgcacattctgctgggtagtcgcggtgccaatactgaattgcatctggatctttgcgaaacatcccctcaccggagcaaggcgcatcgaccaaaatccgatcgaatgtctgcggccaggctgcggctaacgtatccggatcattattggtcactaaaatattccgactcccccaacgttcgagattaccggaaaggaccttcgaccgcggcccgtttatttcattgctgaccagtaacccggtttcaccaagataactagccaattgcgtggatttaccaccaggagcggcacataaatccaacacgcgctcccctttttgcggtgccgcgactgtcccgacaaattgcgcactgggttcttggctataaaccagcccggaaacgtgatcaattccgtttccggcaactttgccataatacccccaaggactccaaggaatgggatccgtggtcttttcgtctaatggccaaggtttagccggatcgcgccggaatcccgccattggttcgtcatcaaaactagccaaaaaagccgaggcgtccgctcctaataactgggtatatttttctttaaacgcttcaggaagttgcacttgttcgatcctttctccgaatcaaatatcgcaggaaaacaacggtcgcaatcgttaaaataattaagaaaccccagatgctggcgcgggtcgtatagtaaaaccaccaattggcaaacaaaccgccaagcagcaaactgatgccgacgtggctggcacagctcgacaagacgccgcgcaaataccgcgcacgcatgttgatttctagtcccgatgtctgcaagggtccgatgagcaccaccattaggacgctcagcaaacctgcccctaacaataaaagcacacagaataaagctgtctggccgtatgcgcgccaccaggttgcggcattgctatcactgaaatgaacccgatgaactttattggcgcgcagaatgcttttaagcgcttttccatgctgatttgcaccgtctacatagacttttacctgcttgaggcgtaatccaccgtttgcggtattgggtgacgcattaagaaataccgccttgttcagcggactacccttacgcgtgcccacagttcccaacactggaacatattgatcattcacgctcaaataacgctgattattgctgccagtgtagagtttatccgctaagtcgtgaccgacaaccgtaaccggtaaacttgattcaaaatcgccattcgaaaaccattgaccagtttcaaccggcaagctcgcaaccgttccacgctgatacacgtagaccacttgcttactcacaaactgcacctgataccccgaaaagtcagtctttgccagctccgcaaccgcagtcgtcacccgccgctgactcttcgtcacatattcctgggcagtctcagacataccaagatgatccagctgactggcatattcattttgatcatgctgcgaccacaccaaaccagccaaaattgccaagccgatccatagtaagtcgattaagaatagtttcttcacagtggcctccttaggaaaagtgagcgcgagccggcgcggttagaagtcggagtgtaagtggccacagacgtgatggctggtctttggccattgcggctgtggtccttacacgcagacttctgcgccggggagcgcgttatggtgagcgcgagccggcgcgttatagaaaagtgagcccacacactaaagccaactccgcccatcactgcaaccgatacacccgttcatgaattgcatcaaaatgacccaatgcgcgattcaatgcaaagattcggcgatcaggtaccatcatcgcctcctgccaaaataaccggctattggtcgcaccatagcgctcgccaatcacaaacaattgcttatcaggaaagtatcgttgcatgatatgtaaaaaccgcacatcattggggtctttatctgggctccatgccatgaccaccgcatcaacttgtgccgcatataaaaataaagctgcattggcggtagcggttttcactggcactaatggttggcggccggtgacattttccgcaacccatgtatgagcatcggtggtaatagtcggatttccttgatcacgtaatcctgcactgacatagccattgcccgctgcgacttccagataacgttgacggccatacaactgttgccacgtcgcgaaaaaatctttatgcacaaacgaccacataccatcatgaaacgcaatgtaccgcctaaaattgtgaagcagatgatccaacgccatcaaatcggccaatttggctcccggcagtaacaatgcctgttcaatttgaggggtggttaaccccagccacggcaaggcatgttgcggtaattgctggttggcaagcgcaagccgccacgctgtcatggctgcgatttgtttttttaacggtgaaattgcctgatatttttcagccagttgtaagagtcgtgtccagtaagccatcctaacctcatattctaaatactggcagctacttagctaacccttttttcgcgcaaaagaacaggcaaaagccgccatgaacggcggcttttgcaacaggggcaacaacctcgtactaatgaatgcccagtgccatcttagcataccgactaagacgttccgggccccacgctgggtaccagacaaggtgaatctcaacgctttggatcccgtcaatcgccgttaacgcctgcttgatatcggcatcaagcatatcggtcaacgggcaacccatggtggtaagggtcatttcaaccgtacatttaccattttcatccaagtccaccccatagatgaggccaaggttaatcagatcgatccccaactccggatcaatcacggtttccaatgcatccaggatctgctgtttcattttatcaaaataggcctggtcttgggtggcggcttgatcatgcgtatttgccatcagcagtcccttcctttctgaacatcttcaggattatttcttgtcttcttcaagcacaccggcaactgaataatggttcttggccatttcattcaggacaatatggacatgctcagccggcgctccggtgtccttaacaatggcggcggtaacatctttgaccagtgctttaagctgctccggcgaccggccttcaatcaaatcaatatggactagtggcatcatgctccactccttcaactgagaataaggtgcgtgttaatctgctttattttagcatgtgaaacacgtttacgcacgtatgatcaaaaagtaagcgcgagccggcgcggttagaagtcggagtgtaagtggcctcaggtgtgatggcccggttctggccattgcgcctgaggtccttacacgtagacttctgcgccggggagcgcgttatgggcgtaaagtcaaactagtggccttggacgtgatggccgggctttggccattgcgcccaaggtccttatacgtagatctctgcgccggggagcgcgttatgggcgtaaaggagaaatagtggcctcagacgtgatggcccggttctggccattgtgtcttaggtccttacacgcagacttctgcgccggggagcgcgttatgggcgtaaaggcgagcgaaaacaaaatcaattaacagtcaaggtgcataatttcaagcgtgatagtccgtatttagccactgcaaataagatcgcacaatcaatccccttctctaaactcaagattcttccctttctttaaagtctcacacagtaaacaaattagtcgcctgctgcttcacccactgttgatcagcagtgagaacgatggtgtatccatgtgcctttaaccatgctaggatagcctgtccgcgcgccatgtcaaccacatcgaatgggcggtcaagaatcagcagctggctgctaagtgcggcccgtgccaacgcaattcgttgcttttcgccagtcgaaattgttgaagcattgatttgggtgtcagtgtggaagcgcgcggaaatgccaaggatgtccagtaagtctttttctactgaacgcgatttggcagctggtgttgtcccgactgcaaacccggggaatagatgcatgttattcgccaaagactcatggaagacagctggattttcaggaagataacctaccgcaaagtcgggcaatttaaaattggcagccgacaaattcagatatttggcaggttcatttgccagttcgcgaagtaatcggcttttgccactgccattttgtccttctatacagagaatatccccaccacgtaaaacgaccgagctattcttaaattgctttttgagccggtcacgagtctggttatacccagcatcatcccgccctttacgcgggaaaaattgcgcgattttagcttcaacaaagcggatgcgctgaagcaactcaagggtttgatttgagatcgtcacaaagtcaaatcctggcgcgatataagttaggaataaggcaatggttcccggagaaatctccttagtctgattcgcaatcaatagcgtgaatgcaatcgccagcatattgataaaagcaatcatattggtcaaaaatgccgcatatgtcgcctgcttcagaccactgacgagttgttgcttattcttgcgatccagctcggcttcagggtgaagtacccccaagaagcgcatataccggttgttggaaataagatcaaacatgaaattaaaatagttaagtgaagcctttctagcacgcccatacaggacgccattgtatttttgcgcaactaaaataacggtttgtacaactatgagtgggatgatgaccgcaaccgtcaacgtttgactgtatgaaaacagaatgactaaagaacccaccaagaagacaaacttcacgcacaagtcggtgatggtcaaggcaacaaagtcaattgacggcaaatcaacattcacgacattcagaaggtcggcggcatgcttcgacccaaaatcaggcagttttgcaaataatttattgataaaggttttatcggtattaaacgtgattcgtgcgtcaagcatgccatagcgttggcgcgacaggttgatcaggatgacaaccccaatgaacaccagaatcgtcagccagaatagcgacccgtgatgttttgccaaagcatcaaaggcccgcttttgaatcaggccaatgactaacggtgcacattcctgtatcaacgaaaataggatcaaggcggcaatcagctttttattgtcgaaaaatagatcacgaatttttaacattttgttcgtcctcgtaggttgatgcccaatctgctagtttcgagaagtagacgcattcaccctttgtgatgccataaacatgatcggcaaaatgtagccggttggttttatgcgaaatcaggatcattttaatcttgaaagtgtccacgtaatgccgcagcaaacgggaaacctcggcaaatcgagcggtatcaagtgagctcagggtttcatcaaggataatcaagtccttttcttgcaaaagcgctcttaatatcagtaacagttggcgatcaccatccgccagcttgtcaatgttcgcaccgtcttcacccacctgagctgataaggttgtgcgcaaataatctaacctagctttcgacacaccaagttgttcgaggcgttgccagacattttgcgtggcattatttaccgaaaaaccttgtaagctcttctcaattgaaacgtggaaaagcgattggtcaacagagacgtaagcaacgtttgctcccatttcagaagctgatatttttgaaatcggcgtctttgaatagtcaatttgcccctcgtactggtgctgcaggccaacgatcgcctttgcaagggtgcttttccccgaaccggacacaccggacaacccgatgatttgtcccggtgcaatggccatatcgactttctttagtacctggtgatcaaaatttctcaagtttgaaatatggagccgaatagtaggtttagtaggatagggactgtttcctgattgcatcacaaatttgcgctccaattcagcaaggttggcaaatgcacctttgagatattgcacattattcgcgtgaaactgcatgctttccaagggtgcttgaattctggtagcgtaatcgatcatcatatacaccgtccccaacccgatcacgccgcgtaggaaactgtacccgcccagtgctaacgaggtaacttccaaaaaggcaatcagcaccagtgcggcgatccacgaacgataaataaagctctgagcatgtaattccaaaggcagcagcttatcgtactgtttattaaaccaagcaatgacgcgactcgaagcctgcatcggggccacgtcattgttattaacaaaaacatcttgcagaaaatcagccgtctttgcttccctttttcgcaacttagggatcacatcgttgccactggtattaacgtgccttaaaacgagaatcgagagaagcagataaccagtaaaagctgccccgatcaaaactgactgaaaaaacaagacgcaaataatcgtgatcacctgaatcacatctgaccacactggaattaaggtttgctggcaaaaaagtcggcactgatcaatgtccttagtcaggcggtcatttaagtcgccggtttgaaaggattcagaatcgcgaatttcatcaccaaaggaaattaagttgaggtatccttttcgtacccggtgcgtcattttcaaaaaaaccacatacgaaaaagcgctgaagactgtgcgaccggctaacaatatcaaccctagtgctagataaatataaaaattgtgaagaacgtttgcgctgccgggaactgtcacgccgttgatcatgcgctgaacaaagacttcagcgtatactgcactggcactcaacgccaaagatattaataagaccagtcctaatgtcagcttaccgcggcttgaagcaatttcggatttaagtattttaggcataagcgcttccttgttattagtatgaaatcttaactatcggcgagccgttaaaccggatggtatccttcattcttaatggcttttaatattaacaaccatccattgcgtatgtaggatagcagtcgcctgataatctcattttattatcatcaggctatcattatattgtgaaacggtcaactaatgatctaataagtcgtgaattattttttgacttcatcaccggatcacggctttacaggtttgattttcacgacaacaaaatagagccgtccaaccaattgaacttatcaacaccgcatctgcttagggtacgcggaattaataggtcagtcgataattagacgactctcttaactataaaaatgttagctgttacataaacgtaaacggatcggtcgacaatttcgatggaattgccttgacgtcccaaccttcagcaaccgcccattcgttgatcaacccggcaacttttcctttcatgatcgcttcgatgtgatggcccggatcaatcacaggtaaatccgccgccagcatatcgtgagccgtatgatagtaaacatcgccggtaatgaagacatcggcaccagccgctttggcatcgttgaaggcatcgccgccatcgccaccaagaatggcaacttttcgaaccggccgctccaagtcacgagcaacaacgcgtaagcctttgacgtgatacgctgctttgacttgttcaataaaggcctcaagccggatcgattcaggcaacaaaccgattcggcccatattcgcaccttcaccttcgttaataaacggcacgacttgagtcaaacccagcgcatcggccagccaatcattcatgccttcctgaacccgatccaaattggtatgggcgctataaactaacaggtcatcttttaaaatctgcgcgtacatcgcattttgcggaacccgtaagtccagattgtgaaccgaatgaaacattgccgggtgatgggaaaagatcatgtcagcatgaaccgtttcagcttcggccaccacctcaggacgaacgtctaaggtcaccaacacggttttaacgggacgatcagggttgcctaattgtaagccactgggatcgcgctccatagcaaggcttaaaggcgcatagtcttcaaaacgattgataatatctttaccggttgtcatgtgcacttaattcctccttaattaatgccagcaggtgctcctgttcacgaattttggccaatggtaccatttttgcatcggctaatccttcaagtaccgcttcagttttttcggcttcacggtgcatctttttcatgaaagtcgggcttttttgacggcgcagaatcggaccaaagcgcaggtctgcttctgagtagggtacatcgggtctggttttgcctgctgccatcatttcgtaaatatggccttcatcttctataatttgttcaccgataatgccataaccgtgtttatctagccatagtcgaacatcgtactggtgacgattaggtgccagtaccagcgtctcggtgccatccaactgcggctgaccggcctcgaggatgttcgtaatgagctggccacccattccggcaatcacaatcgttgaaatggcatcagcagggtgaatgccggctaacccatctgcttggcggacgctgatttggtctgtcaaaccagcgtccgcgacattttgcttggcaattgcaacgggtccggcgccaatgtcactggcaacggcgaatttaatgatgccgcgttgcacgaggtcaatcggcaagaaagcatgatccgtgccaatgtcggctaggcgctcgtttggttcgataaacgcgcgaatcgcctgtagccgttttgataaatgtatatgatccatgaatttactgtcccctcatctgattaacagcttttattataacaaactgatgtcacggtgctggtattgtcgctaaaaaggttcagattcttattgtgtggcggttgtgtttcaaaatagcatctgaccggccgcgccaagtcgcaaaaagccgccatctcaaatgagacagcggctttgtcagttgcttattcaagaaaatccttaagctgcttggaacggctcgggtggcggagtttccgcaatgccttggcttcaatctgacgaatgcgttcacgggtcacgccaaagactttgccgacttcttccagcgtgcgggtccggccatcgtcaagtccaaagcgcagccgcaaaacattttcttcgcggtcagtcaaagtgtcaagcacgctctccaactgttccttgagcaattcgtaggaagcgtgatcttctggactggtagcgtcttggtcttcaatgaagtcgccgaggtgtgaatcgtcctcttcaccgattggcgtttccaaggacactggctcttgggcgatcttcaaaatttcgcggactttttcggttggcatatccatctcggcaccgatttcttcaggagttggttcgcggccaagatcctgaagcagttgacgctgaatccgaatcagtttattaatggtttcaaccatatgaacaggaattcgaatcgtccgggcttggtcagcaatcgcgcgggtgatcgcctgccgaatccaccaggtggcgtaggtggagaacttgaagcctttgcggtaatcaaacttctcgaccgccttcatcaagcccatgttaccttcctgaatcaaatccagaaactgcatgccacgaccaacgtagcgcttagcaatagaaaccaccagtcgtaagttagcttcggccagtcgttgcttggcttcttgatcaccttgttcgatcttcaaagcaagggcaacttcttcatcagcggtcagcaatgaaacccggccgatttccttaagatacatccgcactgggtcgttaatcttaaccccggatggcgcggacatatcgctcatttccttcttggaaacctttttttgcttcttgaggctgatcgtggccggttcgccgttttcgtcaacaatcgcgatcccgttgtcttcgattttctgcattaaatcatcgatggcggtactctttagctcaaatggcttgatcagtttagaggttaaatcgtcttcggtgatctgctttttcttcttataatctttgatgacagctttgacggcatcatcataagccttagtcgttgtgtgactcttgctagcggtagtcttcttggccgttgttttcttggttgcggtcttcttggtcgcagcctttgattcggttgctgctttggttgaagctgcagccgttgtcttctttgtggtcttgcttacttcagttgctgtttttttatcagccattaaagttcctcccctagccttgttgttgcttcaaaagtttcatgagattcacatattgcaccgttaattcgccttgtttctgtttgtcacccaatcgctgtgcctcggtaatggcttgtttaatcgcctgcagccgcgaaacagttgacgccgacgtgatcgtctggattaactcgtcaatcgtggcctcgcttgcttccggcagtgactgcatcgcgacatcagccgccaccccgctgagttcaggatcaacccgatctaaaaatcctgcaagctcaccatccggctgttcatgcaaaaagcgcaaccagccagtgaaaagtgtttgaaaatacggcgttggaaatacaaaagtcgcatttttcaagcgttgcatcacaaggtcatcgtgccagacatagtacaataactggcgctgagccgcggtgtagcgatccagcgggcgaacgggttgatcggcaatcggtggctgagctgcggccggtcgcctggtttgcggactcggcaggctttgattgagcgcggcaatgggcacctcggtcgtctctgccagctgtttgacgtaaaccgcccgagcaaccggatcactgattttgccaatgatgcgtaaggccgcattcagataagtcaacttggcctgatcgttgtgcatgtccacaccacgggccagaaattgtaacataaaagcagttggtgtcaaaaccgacttgacttgtgcttgaaaggcttctgctccccgtgcgcgaatgtactcatccggatccatgccatccggtaaaacgaccacatccgtttgcaggcgaggatgatcagccagcatggtgacagcccgttcaatcgctttttgacccggttcatcaccatcgtagcaaacggttaaccgtttgctcaaatgactgatgatatcgacttgttccgtggtcaaactggttcccattgaggcgatcccggttttaacgccagcttgatacgccgcaatcacatccatatacccttcaaaaaggatcgggccaccatcacgcccaaactcggctttggcgcgatgaaggttaaataaaatatcccgcttgttgaaaagcttggtttccggactgtttaaatacttagcctgggacttatctgactgtaaaatccgcccggaaaagccgaccaccttgccattagcatccgttaacggaaacatcacccgatcattgaaacgatcaaacaacttaccggcctgatcttcaacaaataggccactggcgcgctgatcctgatattcaacatggcgattattaagaaatgctaccaatagattacgttcttcaggcgcataacccagtttgaattcttcaatcgtttcgtcggttaacccgcgtttatgcaggtaagccagtgcagcttcacctttttccgtgtttaccaaaatatggtgataaagatcagcagtatcctgaagaatgtgttgctgcttggcaacttcaggatcaaccggcgctgcctgacccacttggacgtcaagcggaataccagcaaaatcggctacctttttaactgcctcaggaaaggtcgcgttgtcataatccatgacaaacttgaaaacattaccgccacgtccgcatgaaaaacaatgaaaaatctgtttggattcattaacggaaaaagacggtgtgtgctcttcgtgaaaaggacaaaggccaaaaagattttgtccggtctttcgtagttgcacatactgcccaatgtaatcggcaatattgaccgcttttaagacttgatcgactgtggcctcgggaatcattccggcgatatcagctcactcccttcccatggcgaatggcattgcaagcattgcgccaccacgacttgaaccgattgaaatagcggtaaaaagtcgcacttctgacgtgaaatgcgacttttatatagtctatcggcataataatacaagatatagtatagcctgatgaatcaagaaaagcaagtctatttgacaatcacttggctaacgtcaccaaattggcggattaactgggcaagctgctgcaaggtagcaaggcgattttcgcgaacagccttatcatctgccatcaccatcgtcgcatcaaaataggcatcaatcggcttagccaaggcttttaatgcttgataatccgcttcagtcggttcagcagcaaatgttttggcagttgttgtcactgcatcatgtagttgaccttcagtcggattttcaaacttagtcggatcaaccgctgtggttaccgtttgcttaccggtaatccgcaagacccgccccaaggctcccatcaccggcttgaaatcagaatcggcagcatgctgggtcagtagcttagcagcatccaaaataccggcaatatcggcatcgctgcgaacggtgacggcatcaacgatatcgtgccgaattttttgaccttgcaacaactgcttggcccgatcaatcatgaaatcgttaagttcttgttggtgcgcggcaaaatcaagtccgttcgtttgatcagcttcagccaaggctttagcaatggtcggctgtaggctagccagcgcaaacggccagtcatgttcggcaatcatgcgcacaataccgtatgcctgacgccgcaacgcataaggatcgttggaaccacttggaattaagtcaacggcaaagaagctcatcagcgaatctagcttatccgcaattgccagcaccgtgccgactagactttgcggtaaggcgccatctgccgcgattggttcgtagtgttccgcaattgcctgagcgacggcaggtttttcgccggcaagctgggcataatgttcgcccataatcccttgtaattcaggaaattcgccgaccattgacgtgacaagatcgaatttgtagatcgaagcggcgcgatctagatcagctttttcgtccgcggtcaagccgaattgatcagcaagtaacgcggcaatgactttggtgcgcgccattttgtcgtacattgagctgattttgtcatggaaactaaccgctttaaggcgctcaacgtcttcagcaatgctgcgtttctggtcttcggcatagaagaacgctgcatcttccaagcgcgccgttagcactttttcgttgcccgcaatcacattgttcaaatgatcgtggttgccattacgcacgccaataaacgcattgaccattttgcctgcctgatcacgagcatagaagtaacgctggttatctttcattgaagtaatcagcactgcttccggaattgccagatatttcggatcaaacgtaccggcaaaagctgtcggccattcgactaaattgttaacttcttccaataagtcactatcgagttcgatctgccattgatgatcagtggcaatttgctcgatttgttcccgaatcaactgtttgcgtgcagccggttctacaatcacaaactggtctttcaacgccgcaacataagcatcggcattaggcagcgtcactggcttaccgaggaatcggtgcccttgggtgacccgccctgcttcaacatccaataacttcatcggcacaacggtatcatctagcagactcactaaccaatgaatcggacgaatgtactcaaaatcatatgctccccatttcattcgcgtcgggaacgtcaggcctttaatgacatcaagcatgccaggcaaaatctcggcagcttccttacctttaatcgccttatgcagataaacataatcaacgcctttaatcgtcttaaacacgatgtcatccggcgtcatcccttgactgcgggaaaatccgatggcagctttggtccaattaccatccgcatcttgagcgattttcttggccggacctttaacatcggtttcaacgtctgcctgtttagcggctaaatcgtgaaccagcagcgcaagccgacgcggggtcgcgtaccggtcaatttggccatgctcaaggtgattggctttcaaaaaggcaacggttttgtcgtgaaattggttaatacttggcgtgacaacatgggccggcatgtcttcaaggccaatttcaatcagatagtcatgcgtcatgttattgcacctccgttttgtgctgcagcaatgggaaaccaagcttcttacgttccgcaacgaaagcgcgcgcaactttatgcgccattttgcggatgcgactcatataaccggcacgttcagtcaccgaaaccgcaccgcgcgcatccagcaggttaaacgtatggctgcatttaagaatgtaatcataagccgggtgaaccaaccctagatccatcaagcgccatgcttctttttcataagcgtcaaaaaacttcagcagcatagcttgatcgctgacttcaaacgcgtatttactgtgttcgtattcaggttctttgaaaatatcgccgtataaaacgccatcgccccattcaagatcaaagacactgttcacgtcttggatataggaagctaaccgttcaacgccataggtaatttcgctggtcaccggcgaaacttcaagaccgccaacaacttgaaaatacgtgaattgactgacttccatgccatcgagccaaacttcccagccaaccccggcacagcccatggacggattttcccagttatcttcaacaaagcggatatcgtgttccaatgggttaatgccaagtgccgccagtgaatccaaatagtaatcctggatgttttccggtgatggcttcatgacaacctggaactgatggtgctggaaaagtcggttcgggttctcgccataacgaccgtcagctgggcggcgtgacggctcaacgtaagcagcattccaaggctccggtccgattgcccgcaaaaaagtatacggactcatggtaccggctcctttttcaacatcataagcttgcatcaacatacaacccttatcgccccagaatttttgaagcgtctggatcatcgtttggatgtccatttttgtcgtcatgattacctctttcccggtgaatcaaagtctggcgtgggtagcataaatgtccatatacatgaaaacgtccctacgccaagatatggcgtagggacgcttctgcgcggttccaccctacttcagatagaccgaatctacctgcagctttgtcatttggttcgaaaacgccaatcacattcaccaccatcaggcttacactatccctgactcgcttgggtttggtacaaatgcgaccctttttctcatcaccgattcaatttccttattagtatagcatcgcggctaggggtgtcaagcggggtttctgaaaaggaccacggcttttccatcaaaacgatataaaataccctgaagtaacgtctaatcacgttctcgctaatcacaagtcatctcgtgtcattgaccagattgctaaatcaacttgccgaccatgaaaacaatatgactttcgaagcgttccttctatcttcatacctattcttgccatgagattcatcgattttagattgtcaaatgtatgtctcgcatacaagcgctcaccttcaagttcattaaagaagatgtcacgtaatttgattgcagcttcagttgcatatccatgcccttcgaattttttgttgagtacataacttaactctgcggatttgttacgatcgtctaagtttaagaaatagattgtaccaatcaatttttcatcctcaattttcaagtcaagtgcaacgatgataacgaattcttgatagtggtctaggctgttacgccatgcatcggtagtaatcgcatgggcgaagatagttcagaatacgtctgggacgatggttcagtgcggattggactgcttgaatttcaaccagggtaactgctctgagagacttccctttcgggaagaattccctaagcagtccattggcgttctcgtttgtgccacgctcccaaggcgagtacggatgtgcgaagtaaatctgggttccaacaatctctgataacttggcaaactcggaaccattgtcaaaagtgatactctcaaattccttggccccgtagtcgtcgatcgtgtcctgcaaggctttaaggcaggtgtccgcatgatagtcaggaatcttgacgatgatctcagtccggctgtaccgttctgtgagcgtcattaatgctggctcatcagctaagcgaatacctttgaccaagtcgccttcccaatgtcccacgcctgtgcggtcattcacgtccgcaggacgcaactcgattgagtcgccgtatatcttcttattcttgcgcttgtgggcgttcttatagcctttgatgcggcatcggagcttcttgggaagtgtcatgttgtctagctcaagcagcccggcgtcgatgtagcgatacacagttgtcgttgaagggcaagccttgccctggtcgcgatagaagtgtacgaagctatcaacgctgtgtacgcgcggcttacgagtaagctccctggcgagagccttgaagaacgcacggccggtcttaagaaaggcgtagtgaccggttctatcgcgtttacggtcgtgcatggcttgggcagtttccgcaagatagacttgatgcgagtgacgcttcgagtcgagctgagttacagatccacgcgtgatttctcgtgagattgtcgctttactgcgatgaagcttctgtgcaatcacggtcgcggtgtcaccagcagcctgaagggcctgaattgtagcacggtcgctaaaactgagttgttggtaatgcttgtgggtgttagtctgagagtgggtcatgaagattcctgctttcttgtttagctagcactaacaagaataggtcttcatggcctttatggtctagtcgtcagggtgttgcacttgaattgtaaactggggaatcaatttttcattcaaaaaaatgccatatttgccaagcccattctctataaatattttttgaatgatgtcttttgtatctcccaaagttttattggtttcaaacacataataggcattctccggattacttgcatactcaaacatgtcaggcgcatcgtcaatcgtaaccggtgccaacacaagcctttctgtttgataagcatgttttaatttttcgcgcattggcttacctctttcctatccacataaaaaattaaaagacataaatataccccgctctcgatgtaaatcagaccgttctgaaaagacggtttggtttagcgataacgataaagcaatactgaaaagaaatatgaaatcacatataaacaggcaactgcagcaacggcgacaagaaacaatgaagctttgttttggctcatcaagaaagcctgtagtttcgcggaccggatccgcggtaggattgccataagaagaaggataatgatgaaaataaacatcaggccgctttgtgaaaaagcgtacatagccggaagtaagataatgccaaaaacagaacatacaacaaaaatgatcgcggttatcccaaataactgcatcggtgacgttttcggtacgataatctcaatgataaggctcatcacaaaggcaagaaatgatgttgcaaaacaagcgattgcatagaatacgtacctagaaccaacaatcttgaatggattcaggtgataaggcactaaaaaatctttccagtgactttgattatcaagctgaaaaagcgtttcaagcgcaacaatggcaagcgcagaagaactgaacacaaataactcggcaatgtctttgttaacgaaaactgcaaccagaaaagcgccaaacaaagaaatcaagacggggagtttaaggattcgtttcttgacaattataaagtctttaataagaaagcctgtcatttagtatcccccacttcttcgcaaccaaaagtgacttaagaacagcctcgtctgtttctggggttaaactgaagtctgttgtgatgctgccatttgttagaaccacaaaccgattacacagctggatgacatcatctaaaatatgcgttacgagaataatgctggcaccggtttgattttgataagcttttatttcattcagtatttcaatccgggtcagtggatcgatcccgctggtaatttcatcaagaatcaccaaatcgccgttcatcgataaacaaactgctaagccaagtttggtttttgtacctttagagagatcaataaaattagtttgcttggggatttttagtttatcgatatattgtctatatttttcacgatcccagcgtttaaagattttgggaaaaatatagtcaatgtctttagctgacaagctttccggaatgtaaccatcatcaaatgccatagaaatcgcagtgccttttttaatgaagaccgttcccgaagttggcttgagaataccgataatcgtttttaatagcgttgttttcccagcaccattactaccgatcacgcctagaacatcaccagcgttaatgcttaagttaacatctttaagcgaaaaatggccaatctcaaccgaaagtgcctttagcatcagaatatgattagcatgctgtttccctttgctgctgttcatagatctagcctcttctgtcatagaaattggcgatgaaaagaatagccagtgttacagtcattgttccaagcgtcgcagtactgccaaatcccgtctttgcgatgacaaagatgcctacaatgatactaatagctatgattatcttaaagaaggttttcaaagtaaaaagcctcttttcacacgtggatgatggtccagtaagcctctaataatagaaatttttcggtggagtttgtatcttttaaagatgcgtgttccggcttgacatgaaccttatttcgtttttattgacgtacatttaattgctagcatgataggaatagttttatcttatcactgctgtgtaaaataaatgtatacagtcggttaaatttttagcgcgatcatttacacgctagaattgacttaaatcaagcacgcgactggctcctaaacataaatgcgaccgttcaccactccttggcgtacggtcgcttctgtgcggctccatttatttaggaagctcgaattctccatcgcttggtcattcgttccaaaaccatttccatcaagctcaaacttttcctgacttgccggagtttggaacgaatgtgacccttttctcatcaccaatttaattttctttgctagattggtcttaaggttgcttgtatcaattcacacccgacactaagtcgatacgttccttactgttattccaaagttcttgtggcgtatagctatccttttcaaatagaatgacggaaccatccttttcgatgcgggcatttgaaccgagccactgccatgtcggaggcaaaatcaagttaacccgtttgcctttaccttttttaagtgaccaagccgaaatataatccttaatattatgtgatcgcaggtatctggtttgcccattatcaaactcgattgctaatatatttgccgccatccaaactttgactgcttttggtagtgattcacccattattaaaattcccctctcacaaaattgattaagtgattattgtcttcggttaaagttgtcactatttccgcaagaggcatcacctcaaatctgtaaccgcttacttataacttagcacaacgaggaataaaaacaatcagttgaatcaattaaatatgcggacgatcattattggacgaatcttctgactttgtacgatccggcaaccgatcctgccactgattcatttgatcgataaaccgcttagcttttggcgtcaccccgaccatatctgcgtaaataacatcaagaattcgcttgagttcggctttggtcgcgggcttcacatcaattcgcttgacctgactcaaatcaagcgtactgaaccgtcgcagataaaaaatggcgcgcggactggcgtggagtcgatgcgggtccttgtcccaatgttgctgacacaataagccaccatagctttctgaaaaatccagtggcaaatcagtgcggccgtcgatgacacagccgcgccaattgggttcaacaccgtaagctttaagcatttgcacttcaaccacattggcgataatttgcgggtcaaggccggtgtcaatcaaatgcaaggcttgtttgacttgtttgaaccaaaagccgactggccgctcgtctggaaaggctaaatcgagcaagccgaagatataggctgcataggcgttcaaggtaatatcattggagatttgtcgatactgcgtcgggctctttatagcggacaagtaggacagtccagaatcgcggacctcaccaatataatccgcatgcgtaaagggcaaaatgccagcagctaaagtaaaaccgggcttgcgggcccggtttaccagaaacatttttttaccgaactgatccgtcaaaattttgaccagcatatcggattcacgataattttgacgggacatcaccagcccctcaaaggtttgtgtttgtttgaccattaacgcagatccttcatgttataacctaatgatttaagataagcattgttgtcgcgccagttcttttgaacccggacccatagttttaagttaactttatcgccaagcaggttttcgatatcgcgacgggcgcggataccgatttgtttgagcatttgtccgccgcggccgatgataatgcctttttgactatcacgttcaacgataatgtacgcttcaatttgcagtttgccgccttcacggtccttcatgcgctctacctgcaccgcgactgcatgcggcacctcatcacgggttaattcaaggattttttcccggatcagctcaccgacaacgaaatattcaggatggtctgtgagctgatcttccggataatactgcggtccctctggtaatgtgcccgtcagcgaattcagcaactcgtccacactattccccatcgtggcactaatcgggaagacttgtgcaaaatgataatcatgctgatagctttcaatcagcggcaataaatcatccggtttaaccaagtcgattttatttaatatcaaataaaccggcttcttcacttcagcaagctggcgcagaatatacgcatcccctgcccctttttgctcatccgctgcgaccatgaacaaaatagcatcgacttgattaagcgtcgataacgcggccttatccatgtaatcatccagctcgtttttaggtttgtgaatgcccggcgtatccacaaaaacgatttgggcgtcaggggtagtgtaaatcccgttaattttgttgcgggttgtctgcgctttaggcgacatgatggcaatcttttcccctaaaatacggttcatgaaggttgatttgccgacgtttggccgcccgatgatcgcgacaaaaccagaatggtgttcactcaagcctgtaagtctcctttcgaaaaagcgcctggcaacaatgcctgcggggtcgtttgaaccgtttcgccgcgcacattggtcaaggtaataaccgcatcggccgcaaaaaattcactgataacttgccgacacgccccacaaggcgctaccggtccttttgtatcggcaatgaccaacaactcatccaactgggtgtacccggcgctcacagctgcaaaaatcgcactccgctcggcacaattgctcagcccgtaactggcattttcgatatttgccccggaaaaaatccgctcacccacgcgaacagctgcacccacggcaaagtgcgaataaggaacataggcattctcacgtgcggctaaggctgcggtacgtaaaactgacaacattcaccaactcctcaaaagcgctaacagcggcggtccaaaaacataaatgccggcaactaccgcaatcagagaaacgatcaacacggcaccagcgctcatgtctttaattttctttgcccgcagatcgtaatgctcgccaataatgaaatcgaccatattctcaacaatcgtattcagcagttcgcctaaaaataccaacaaaatcgccaaaatcaaaacgaaccacgaaaatggcggcacttttaaccagatcccggcaattatcaccaatgttgcactaacaaattcgcgtttgaaattgttctcatcgacaaaaaagacgcgcagcccatcgagcgcgtggcgggcgctttgaataaaatgcttgtttttgccgatttgcttatcgggtaaggccataagcagtcagaattttcttttgcagcggaatcatcacggcttcatcttccggtttaatatgatcatacccgtttagatgcaagaaaccgtgaaccaccgtataccccagctcgcgctcaaagctgtggccgtattctttggcatggcgccgaacagtcaagggatcaatgaataagtcgccaatattttttgccatgccaggcatcaggggcaagtcatcctcgccatcttcaattgcaaaactaatcacatcagtcgcgcgatcagtatcgcgatattcccggttaatcttttgaatcgcatcatccccaacaatggtaatcgacatttcggtatcattaggtaacgccaactgttgcccacaaaaagcaaccaacttctggatcagctcatgatgctggtcatccagcaagtgatcatcatcgtaaaattctaaatccattgtttactccttcgtttgcttttgcagctgtaaatcatgtttgccataagcttcaataatcttggcgacaactgggtggcgcacaacatcctgtgcggaaaattgcgtgaaggcaatatgactaatcccttttaataactgttccgcttgcaataagccacttttggcattatgcggcaagtcaatttgcgtcacatcaccattgacaatcattttcgagccaaagcccaggcgcgtcagaaacattttcatctgggcctgagtcgtattctgggcttcatccaaaatcgcaaacgcattgtccaacgtacgaccacgcatatacgctaatggcgcaatttcgatgacgccgcgatccattaggcgatcggtgtgttctttccccaaaactgcatataaagcgtcataaaccggacgcaaataaggatcaaccttttccttgagatcaccagggagaaagccaagactttcgcctgcttccacggccggacgcgtcaaaataatccgctcgacttggccggccttcatggctgcaactgccatcaccacggcgagaaaagttttcccggtaccggctgggccaatgccaaaagtaatgtcgttatgtttgatggcatcaacatattgacgctggccaaaattcttaatccgaatcggttgccccttggcgtcgcgtaacaaggtctcactatacatatccgcaaaatattcgagcgtgccccgttttgccattgcaaccgcactagcaatatcctgaggtgacagtttgatgccttgtgccaataacttagttgccgcctcaagcagctgtagtgtcaagctgaccgcttcggcttcaccgctgatgcgtaattcgtccccaaacggcgaaatccggacgttcaagccttcttcaattaacgttaaattcgcgtcattaatcccaactaggttaattgccatatcaggattactaaaccgaaaaattttctctgaggtctcctgtgccaaatattggccccctaacaaataatttaagcattgaatgatggtcttagtttagcatatttttaaagtagcgtcagaatcgtttaaacggacgtaagtgtcaactttttctcggttctactctaattaagtgatttccgttactccgagctggctccgcggtgactgggctggaacgtggtgggcacgacttcgaacccgcaaagaccgcggtttcgaagctcggccttggtctaaagcggagaagcccactccgcttaagaccaatttcaccactgagcccgccaccactccgccagctcttgctttctatcttagtaatcgaacaaggtgactcatgatgcttcaacaccatcaacatcaagctgcatttaaaattgttaaatctgtttgtttaggttgaaactggcgtcaaactgcttggcaattttactaacgacaaccattcatgctttaaacaacagggttcaaattgcctcaaatgcctaaacttcaaaagttgatctgcacgccggactctcgacagaattgcctatggttacacaataaaaaagccggtgctaacaccggctttgtcgttaactaagtttttctttaaccacgctgctgacaagtgcaccatcagcttggcccttgaccttgggcatcagcgtcttcataaccttaccaaagtcttgcttgccagttgcaccgacttctttgatggttgcatcaacgatatcggctacctgatctttgctcaactgggctggtagaaaacgttccacaaccttgatttcagcttcggttgcctcaacaagatcagaacgaccgccttttttaaattcagaaacgctttccttgcgctgctttagttcagttgcaagaacgcttttttcttcatcttccgaaaggtcgtggccgagtttgatcttctcattgaccaaggctgtcttcaacatccggacaacgctcaacgtcactttgtccttggctaacatgctttgcttcatctgagcattaagctcatccattaaagccactattcaccaagtcctttattaatacttcttgcgtttacgcgctgcttctgacttcagcttgcggcgtacgctaggcttctcgtagaattcacgcttgcggtattcagcgagtgtacccgacttggatacagtgcgcttaaagcgccgaagagcgtcatcgagagattcgtttttcttaacaactgtcttagccatgtgatatccctccctccgacacttgtgtaaccactgacggatatcatagccaatagttcgtttattagtatacaaaactgttaaccacgcgtcaataagcgatttcagatttttatataaacaaccaatgttattgcttaagtttcgccggtgagccgtctttttcgataaaatggcaccgaagcgtttatgcccttacctaataggcttagctacacgttcgcaaataaattatgctatgatagcgttatctaaggtagcgaggtggcattatgacccaagaactgaatttatatattatgtcagattcggttggtgaaaccggattgcgacttgcccaagccgttgcagcccagtttcccgaatttgaagcacattatgtccgttttccttttatccacaccaaagagaaaatttatagcgccattgatgaggccaagaaggaaaacgcactggcaatcatgacgtttgttacggacggttttgcccaactagcaacgcattatgctaaagatcaaggggtcattgcgattgacgtaatgtcaccgattttgagcggcattaagtcgattacgcatgaagaacctaaccatgttcccggcgccgtccatgatcttaatgaacgttatttcgatcgtatatcggcgatggaatttgccgttttgtatgatgatggtaaagatcccaagggttttctggaagccgatattgtattgctgggggtttcgcggacaagcaaaaccccgctttccttattcttggccaatcgtaacttgaaagtcgccaatttgcccttggttcccaatgcccacattcccgaagaaatctggcaggttgatccgaaaaaaattgtcgggttaactactgatgcatcggtcctaatggaatttcggcggcagcggatgattcaatatggtttgaatccggacacagcctattcagcccgcgatcaggttaatcaggaacttaaatttgctgaagatctatacaaaaaaatcggctgcatggtgattaacaccgcacaccgatcaattgaagagacagcaaccttgattttggagcatatgggtcttgatgaattcgacaataccgagacgcattaagccatcaatttgcgtaattcttctggttggaaatgactcgttttaagccatttaatttctgccccgtatggtggaacctgatgttttttatcagggccgacatacggggtttcgagtatcttgggtagcttttcaagtgctggatggtgggcaattcgatttaaggcctcaaagccaatggtgccaaagccaatatttgcatggcgatctttatggctgccttgcgggttcttggagtcattaacatgaatgacgctaagccgatcaatgccgatgatgtgatcaaattcattcaacacgccatcaaaatcgtcctttacgtcatagccggcatcgttcgtgtgacaggtgtcaaaagtgacccggagcttttcattataagtcacaccatcgataatcgccgccagttcttcaaatgaacggccaatttcagtgccttttcccgccatggtttcaagcgcaatcgtgacatgttggttaggatcaataatgcgatttaaacccttaataatttgagcaattgccgcttcaggaccggcaccaacatgcgcgccggggtgaaacggcatcgtatacgcatgtagtgcatcagcccgggcaacttcttcttgcatgaattgaacggcaaattcaaagttggccggtttttttgtgttcccaagattcacaatataaggggcatggatgactgggtgactgatatcatctttagccatcgctgccaagccttcaggaattctcatctcgctagttggcttacgacgcgtattttgcggcgcaccggtataaaattgcagcgtgttggcctcataacttgcagcttcttcaactgcgcctaacaacattttcgtgcctttcatactcacgttggcaccgattaacattaaacgacctccctaatcaagataaccttgaattcaaaccgatctgtataacatcggccatgcttacaatcaattactattttgattccgcctagtaaagtgagttttcagcaaaaatcttgccgactccaatcttgtgtatgttcgctaatccgttttaggctcgtaaaaatggccaagtattttaactgaatcagtgatggaaacaaacgcatacggatcactgtgacgcatcgcttgttccaaatcgtacatctcggcccgggaaataatggtgaaaagaatcgtcttttcttcgtgatgaaaggcgccttctgcatcgtgcacaatcgtaatgccgcgtcttaacgagccttgaatttcccgcaccacctgttttggccgcgccgtcacgatcatgacctgcaaccgttgctgacgagtatacagcgagtccataactcggccattaataaaaattgccagcgctgaatacaaagcatgtggccagtcattcacgaacccggcaaaaaagataatgaggacgttaaacataatgttaatcgttcccactgtgcgtccggtccgtttacgcaatacaatgccgagaatatcaatcccgccagtcgaaatattattacgtaacgcaaagcctgtccctaagccattgacaaccgcaccgaaaatcccgcagacaattggatcttttgtcaaaggggtcaaaacgcctagtacgcgaatcataatggttgaaaagatgaccgccaagaaagtgaacagggtaaaccggtgtccaatggccttccatgccaacacaaacagcggcacattcaggaagaacagtaacgtcccagttgaaaacaagtcagtcgttgccagcgaaaaaaacggtaacgcgatattaaagttaaaccacttacgcacaatcgttgccaaaagctgagccgcaccggtgataccactggcgaaaacgccacccggctcccaaaacatgttcagcgcaactgccacacaaatgctgtaaaaaaaggccgcagacaaccgcgaccaattttgatgccgacgaattagccgatcaatttcttccattacaaaaaccgctccctgtcacccattaatcatatcgtgatcaagtataacaagggcggacaggtaatgctactccattctgtgactgtgagcgcgttttcgcagcagtatcaggcaggccttggtcccaagtccttatgtgcggtccccgcaactatgagcccgtttttcaaccgcccacgcccaaaatcttaaccattgagcgacacacaaattccaagctctggcatacgccaatgaatcggtgcaaagtcagacggaacttgacctcactattcagacaagctttattgattattaaagtttacttatcaaataactgccgatacttcccgtaaccttcttcttcaagcttagccaccggaataaagcgcagtgcagctgaattaatgcagtagcgtaacccaccttctgcagccggaccatccgtaaacacgtgaccgaggtgcgaggcggcttgcggacttcgaacctcaacccgttccatgccgaagctttgatctcgatgctcggccaacttggcaatgggtttggtaaatgagggccagccacatccggcgtcatatttatcttgtgaagaaaacagcggttcaccactcacaacatctacataaatgccatcttcataaaagttgtcatattgccccgtaaatgggcgctccgttgcggcttcctgcgtcaccgcgtaggcttctggtgacaactgttttttcaatttggcttttgatggccgatttattttatctgacataaaaaaacacctccacaactattgattatagccggagatgtttcgattgtcagcaattaaattgtttgacgttaaaagtgtcgatttactcggttaggttctcgtcgccttcatgttctttttccggatcaacatcagggcgaacttcaatccctaaatctttaagctgaatgtcagctaccggagatggtgcacttgtcattggttcgctggccttactgttcttcggaaaggcaatgacatcgcgaatattgtcgcgacccgtcagcaacatggtaaaccgatccagcccgattgccaaaccaccatgcggcggaaaaccgtaatcaagcgcgttgagcaggaagccgaaactcttttgcgcacgctcaggggtgaagccaagtgccttgagcattttttcctgaatgtcgcggttgtgaatacgaattgatccaccgcctagttcataaccattcagtacaatatcataactttgcgcatgtgccgcgtgcggatcggtgtcgagcagatgcacgtcttcttcatttggcatcgtaaatggatggtgcgccggaacccagcgttgaatgccttcatcatattcaaacaacggccagtcaaccacccagcagaatcggaattccttttcatcaatcaagccgagatcgtgaccaaaatgggttctgagataacccaaggcatcagcgacgacttttgctttatcggctacaaacaagaccaaatcgccagtgtgggcgcccacagcctgagttaatgctgccccatcaccaaagaacttcgcaatcggtccgctaatgccatcgtctgttaccttcaaccaagccagacccttagcaccaaaacgcttaatgtaatcttgttgggcgtcgatcattttgcgcgaatacttggctgccccgccaggcaatacaatggcgtgaacctggccgccattttgaaccgctccggcaaacaccttgaagtctgagtctttcacaaaatcggaaacatcttgaatctgcatgtcaaaccgcaaatcaggcttgtcagatccatacttgtccatcgcttcttgccaggtgatccgctgaaacggtaagtcaacgtcaatccccttaacatcatgcatcacctgcgcgattaagccttccgtgatatcctgaatttcttcagcggaaaggaagctggtttcaaggtcaatttgggtgaactccggttgccgatcgccacgcaagtcttcatcccggaagcagcgcgcaatctgataataccgatcaaatccggctcccatcaataattgcttgaacagctgtggggattgcggcaaggcgtaaaaactgcctgggtacacacgcgatggcaccagatagtcccgggccccttctggcgtgctagccgtcaaagtcggcgtctcaacgtcaataaaaccattgtcatccaaatagtgatgcacgctccgcataatatgagcgcgggtgaaaatgttcttttgcatttccgggcgacgtaaatcaagatagcgatactttaacttggtttcttcagtcacggccacgttgtcttcaatataaaatggcggcgtcttggctttgttcaaaattgtgatatcgtgcacttcaacttcaatatcaccggtcttcatttccggatttaccgcttgtggtttacgcttttttacgacgccttgaacttcaacgacatattcggaacgtaccgaattagctactgtcagtgcatcacgatcaattgcttcggaaaagactagttgaacaatgccttcacggtcacgcaagtcaataaagatcaagctacctaaactgcgccgcttttgtacccatccttttagtgtgacttcctgatcaagatagtcggtattgacgtcaccggcataacaggtgcgtttactcatattattttgcctccgttacttgtgtataaattttactaaagtctgccaatacatcggcttgaggaaaggccttctgctggccggtcgccatatttttaacttgcacggttcccgcttctcgttcgctttccccgatcgtcaacactaatttcgcgttggctttgttggcagctttgaactgtcccttggctttacggcccatgtaatccatctcacctgtaaagccttgttgccgaagcgcggttaacatctgtaaagcttcctgatccgcaccttggtcgatggtgacgatgtaggcatccggctgtaccggctgctggtcaccttgcatgagtaacatcaagcgctcaacccccatggcaaatccgatcccgggggtttccggcccgccaagttcctcaaccaagccgttataccgtccgcctgccaagatcgtggtatacccgccgccaaagaccttatcatccgacatcacttcaaaaatggtgtgattgtaataatccaagccgcgaaccattgtcgcatccacttcaaattcaatgcctaaacctgtgagcagacttttaacccgatcaaaatgctgttgcgcttccggagtcaaataatcaagaatcgacggcgcatccgctactatttcctggtcatgtttgtctttgctatcaagaatacgaagcggatttttaaccagccgaactttggaatcttctgaaagttcatctttaaacggcgtcagatagtcgaccaatgccgcatgaaaagccttgcgcgttgccggatcgcccaaagaattaatcacgaacttaaggtgtttggcgcctaacgcttctagcaactgttttgctaacgctagtgtttctgcatctaaaaccggcgaatcactcccaaaagcttcgacgccgatttggtggaattggcgttggcggccactttgcggacgttcatagcgaaacatcggacccatgtagtaaaccttgtatggcttcgcgtattcaggtccgtataatttgttttcaacataggcgcgaaccacgccggcagtgccttctggacgcaatgccatcatgcgatcgcctttgtcttcgaaggtgtacatttctttggtcacaatatcactggtatcgccggcactgcgcgaaaaaacatcaacattttcaaaaatcggggtgcggatttcgcggtactggtattgggcaaaaattttgcgggcaacagcttcaacctgctgccaacgttcactttggccaggtaaaatatcggctgtgccttttggacgttgataattcatgaggtgcctcctgtagtcttaagactgtgatgggtgggtggtgattgaaagcgctcggaaacttggtggtaggtggttgtgttggttgttgggctcggcaggcgagtatgtatgacacatccccgctgatactactgcgaaaacgcgcttacagtcgcggcaatctccgtgtaagggccttaagcctaaatggccaaagcccagccatttaggcttaaggccacttacactccgattgcttagcgctcctgttcgcgctctaaaaaaatgcacccctcgattgctcgaagggtgcggacacggtaccaccttgtgttttactttgccataacggtggcgttccggaacttgatcacctcaggagtgtcttttcgatcggtcccggctttcaccatctccgggtcgcttaaaattgatctatcctactccgtcacaggtcttagttattggttaaagcatacggtttgcagaaagttttgtcaacggcgtacgcctagattttcgaagtgatgcatttagtttttctagcggggcaggaacgcttttcgtaacttactgactaaacagctaactctaacccaaccaaacttgcagcgccaatcatcagatagccgacaccggtcagaataccggttgctgtggttgcgactggtaaaataccgctgagacccgcgacgacaaagaacaacagcacggttacgatcaattgcgtccactgtccggtcttggtaacaaacccaagcaacatcgccacaacgggtaacatcaacgcccaactcaacaacggccaggccgtgaccccaagccgtatacaggtcggcaacgctaacagaattgaaaagccgaccgctaccagcaatgtcacgtttaaatgtcgctttttggcaaaattgatggtcgtcaaccagttagctaaaccgtttcgctgttccggccatcctaattggctgaaaaataataaggcccataaatacgtgattggtaaaagcgtactccgaagacttgaagtcggtgcgatccagttggcgccccataagccagcaagaatcaaccaccaaccgactgaacgagatgccagcagttgtttcattgcttgacgccataaagccggccaactgaagtgctgaatcgaaaccgcattaaaatccgcttcattagcagccgcctcaggcaaagtaatccgcatcgcagaatgttgatgtgtcattctccgtgttaaaggccgccgctccaagaataagccagccaaaccaaccagcattaaacttaataggactgaaccaccgatacataaccattgcgttgaggttagcgtcaatgtctgaaagactaaatcatgggtgccggcacgactcagatggtcattgccccctaaaatcatcatgctcgtcaaacggtggcccgattcaagtgccgattgcttgaataatgcttgtaacaaaacgatgccggaaaagtcgactacttgtgcataccattttgcctcaatcatcatggcataaccgatgaagagtagcataatcaaaatgcttgtaccgaaccgaccgcgtaaaccgggaatcgtttcactgatcacagccaaggcactgatcaaccctacaccgggaatgagtatggcaaaagtcgcgataaattgacttatgtgaaggccttgaccagggtattgaatgaccatcatagctaatgtgcccatcatcacgaaaaccaagatcgttagcagcaaaaggcaatttgtcagaaactctccggcgacataccggatttttttaaacggtccggttaaaaaagccgacaaaatgccgctttcccgatcctgactcatgccttgccgtgccagtaccaagccaatgaagggaaagaaaaacgtcaagaccgcaacaactccgaccggtgcccacgtcgggttattcgcctgagcaaagtaatgcggatccaaaaccaaaacccgaaaactcccggtttgccggggtgcaagcaacactgctgaaaacaacgcaaaaactgccaatagccgaaaagaaaattggcgcgaacgttgccgatagtcggttaagatcatatgcatcatgcatcggtcaccgccttagcttcaaagttggctaaggtagcgtcttccaaacttggcgtgacattttgagcaccgctgactggcgccgttttagctatctgccgcacatgaatgccgtcagcttgctcttacatgttgctgatattaggactactcggcaacgcagcaccacgcggaagaacatactcccaaacgtgtccggctgctttttggagaaaatctgccggcgttccctgaaattgaaactggccgtctttgacgatgagcaggcgacttgcaatggcctcgacatcttgaatgatgtgggttgcgatcaggacgatgcgattttgggccaatgtgcttaacaggttacgtactgcaatccgctcgaccggatctaagcccacggtgggttcatcaaccatgataatttggggatcacctagcaaactggcggtcaatcccactcgttgccgcataccaccggaataatcccgcagccgtgtcggatttttaggatccagatgcagagttacaaacagatttgttatctgctgatcagcgtcttggggcttaatgccttttaaagccgcaatgtaacgtaggtaatccaacgcggtcacatttggttggtaagggacttgctgaggcaaatagcccaatacctggcgtaattttccgggatgggtgaccacatcaacatgatcaagttggatggaacctgcatcgggttttagctgagtggtcaatactttaagcaacgttgattttcccgctccgtttgggcccatgagtccgataacaccacctgactcaagcgttgccgtcatgccatttaaaactggctttttcccgaaatgcttatgaatgttttctatgtataatctcattgaaccaacctcctgtctctaatattataatctaacaataatcctatcatcattcaaaggttctaatccaggctcctaccaaagtctgattttctgctgttagtggtgaaagagcacaattgtcattgttttcaaaaatcagcaggtgtacgctgactttatgggtaagaacatgagtatttgatgaggagtgagcgttttgtggcaagatgatcgcattcaagcagccttggatggccaaaattcaatggtcatggccgaacttcccggtggctttgcagtttttggcgatgtccagtttctaccgggctacagcgtattactgccaaaacgcgaagtcggcagtttaaatgagctgtctaaaagagaacaaagtctatttttgcaaagcatggcaactttaggcgatgccattttgacggcgtgtgaaccattacgcgtcaattacgacattctgggcaatacggatcattttttacatgcccatgtcttcccgcgctaccagtcggaggtgccggaacgtttggccaagccagtatggttgtatgacccgagttattggcgtgatccccagtaccaatatgagcccagccagcatgatgcgatccgtcagcgcattaccgccgctttgaaaactacgaattaagcatcaggtcgcttttcttccccacccttttgccagcgggtttgctataataaacataacgatttttcagaatggtggggctttgtcatgaaacatatcggacaacttaagaaatggccgctggtgatcttattggcgctattgtttggcgttggtgccgcaacaaccagtgtgatggccaacacccaatacatgacagtcaaagccgagagcgtcaatgtacggctaggtcccggcttggcatatggcatcatgggtcaggtaaaatccggcaatgaattgaccattatcggttccaaaaattcctggtatcaagtgcgccttgccggcaataaaatcggttgggttgcttcatggttagtcgatcaaagcgaagccgcaaccacgagtgcgaaagttgccacggtgaatcaaccggttaacgttcgcgaatatgccagccaggatgccaagcagttaggaacgcttaatgccggcgatagtgtcaaagttgtgtatcaagaaggcgattggacccagattgcctataacaatacggcggcatggatcactagcagcagtgtccagctcactggtcagacaactaatctggcacaacctgcccaagccaatctgacgcaagccaaaagcggggccgcattgaaagtcaccaccaataccatgactaacctgcgcaatgcggcgggtatcaatgccccatccgtcgagaaactcgataaaggcactgaactgaccgttaccaaacaacaagacgattggtatcaagtcactgcccctgatggcaaatcgggttatgttgccagctggaccgtcaccgccccgaataatggtcaaacccaaaaagcggcaacgaaactatccgaagccacgattgttctggatcccggacatggtggtacagacacgggtgcgccagctaacaataatcatgattacgaaaaaacctataccttgaaaacggccgaactcgttgccaatgctttgcgggctgctggtgctaacgttatcatgacgcgaacgactgacacctttgtcgacctcgcgccacgtccgacaactgctaacaacgcccatgccgatgcatttatctccttccattttgactccagcccgtccaaaaactctgcctccgggttcaccacctattactacagcagcaaaaaggatctcgccttggctaaggcagttaacaacgcttttgatgacttaccactagaaaatcgtggggttgcatttggtaactatgaagttctacgcgataataaacagccggccatcctgaatgaaatgggttatatcaataacgacaaagactttaagtatattaaaaacccaacgtatcaatctaaaattgcgaccgatattgttaacggtttaaatgcttactttaaagccggtcatcatcaataatcggcggaaagtttgccgcggcaatagcgcaaatcgaatataaatagccgctcaatcaggcatgaaaaattgctgattgagcggctctttatttgaattttttacttgcggaacaacggcggaatttcaattaaatgatcgacttgataatctgcctgtggtgctgcattgaggccgtccacattaaagtagatcgttttaacatcagcgttgataccggcatccacatcaagcgagcgatcacctatcatcgccgttaccgcgggattgagttggaagcgtcgaagtaaatattgaatcgcatcaggtgctggcttacgcggtaacttcaaatcggcatccaccccgccaagaaataaggtgtcagcttgatcgtgagccaaaatttcccaggcactacgatcacgatgcgttaaaagcagattgtgtccaccttgggctttgatggctttcaatacggccagcgcttcaggatatggatgaatatcctgaagatacgcccgcgcccgctgatgataatccgcctctaaatcaacaacggatcggcctacctgttgcccaaagccggttaaaaattgtttgattgatgtttctttcacctggcgatagagcgtctttggtttaatctgaccgccattagccgttaccaacgccgctaacgccttcatcatcccgggataagaatcatacaaagtgccgtcaaaatcccaaattgcgttaactaacatcacttcgcctccgtatcaaataaaatcgtcaccggaccatcattggtaagactcacctgcatatcgccaccaaattcgccagttgcgaccgtcacgcctaaatcacgaagcttggcattaaaggtgtcataaagttgttcccctaaagccggcttggccgcacccgtaaagctggggcgattaccgtgacgtgtatctgcatacagtgtgaattgcgatattgataggacttgcccgccgacatctgctagcgccaagttcattttgccggcatcatcactgaaaacccgcaatttactgattttttcggcgagatagtcactatctgctgatgtgtcttcaggcccgacaccaagtaaaaccacaaatccatgatcaatggcaccgactgtctgaccggcaatcgtaactttagctgcaaggctgcgttgtaccactgcgcgcatatacttttctcctttatttatcaaatcttgtttgtgaatgttgttggcataaaaagacagcacccgatcgtgatcattgagatctatgcctttctgatcaccagtgctgtctaaataaaacggtcatcacccatttgctcgcttcacttcataaatatccggaacatttttaacagcatccattaatttatccaaatgggcaaggttgcggacgccgactttgacatggatatcagccattttatcgtggtcaacccggccattgatgttgtttaaagccttagtttgggcattaagaacctgtaaaacgtcatttaacagcccactgcgattgtaaccgtaaatttcaaggtcagtattaaagagctgcttttgtaccgcttcattttcccagcggacgtcaatcaaacgacccgacatttcccgtgaactttgaacgtttgggcaatccgcgcgatgaactgtgaccccacggcctttcgtcacatagccgacaattgcatccccaggcacaggcatgcagcacttagccaaatgaaccagcagattgtcaacaccttcaatcaccacaccatcttcggaatgggtttgtggctgatgtttctcactggaaacggttgtgactttctggttcttagataaaatggcagcctctttggccttacgatccttttcagcctttgcatgacggaacttttcggttagccggttagcaatgactttgggcgtatattccccgtaaccaatcgaactcattaattcgtcttcggtttgaaagttcagacgctgcataagtccggtcatgttttccttggtcataaaatcttttggtacatagccttcctcttgtagctcatgttcaagcatatcacggcctttttcagcgttttcgcttttatcggcttgcttaaaataacgtttgatcttgttacgggcgcgcgaggtgtacaccagtttgatccaatcgcggctaggcgcactaccgctagccgtcagcatttccacgatgtcgccattttttaacacgtaattaagcggcacaattttgccattcactttggcgccaacagtatgattgccgacttccgtatgaattaaatagccaaaatcaagcggattactgccttttggaagctcgtagacatcaccttttggggtaaagacgtaaacgcgatcggtgaaaatatcgcctttaacactttccatgaagtcggcggcatcgctactttcatcctgtagctcgagaatttcgcggaagatatccaattttttgccggctttatcgtactggactttactggtctggccttctttgtaagcccagtgtgctgcaaccccgtattcagccacgtgatgcatttcttcggtgcgaatctggacttctaggggcttgcccatcggtccgataacggtcgtatgaatactttgatacaagttggctttaggcatcgcaatgtaatccttaaaccggcccggcattggcttccacttagtatgaattgcacctaaaaccgcatagcaatccttaatcgtttcggtgatgacccggattgccaacaaatcatacagctcatcaaactgtttatgcttgtcgcgcatttttttataaatggaatagatgtgctttgggcggccatagatttcatatttaatatgcaaatccgctaaggcctttttgatttcttcgattgcttcttggatataagcttcacgttcggtgcgcttactgttcattaagtgtgcaattcgatagtactgttgcgggttaagataacgcagcgataggtcttcaagttcccatttgatggtgctaatccctaagcggtcggctagtggcgcataaatctccagggtttcattggcaatccgccgctgtttatccgggcgtaaatgttgaagtgtgcgcatattgtgcaagcggtctgccagtttcaccatgatgacacgtaagtcttttgccatcgccagcaacatttttcgatggttttcagccaactcatccttgtgggcaacataagtcactttgctaagcttcgtcaccccatcaacaatgaccgcaacatcatggccaaacacttcttcaatatcgcccagcgtgatatttgtatcttccacaacgtcatgcaggtagccggaagccactgtttcaggatccatttttaattcggcaagaatccccgctacctgaatgggatgaataatataaggctcgccggacttgcgaacttgatctttatgaacataagcggcaaacttataggccttttcaacgaatgccaagtgttcagggttcatgtaagctttacacaacttcatgacatccggctgggtaagttcaacttcttcggccatggtattcccctcctgagcgtgagccagcccggttagaaaccggagtgtaagtggccttgggcgtgatggccgggctttggccattgcgaccaaggtccttacatgcaggtttctgggctggcgaacgcgttatgattgagcgcgaaccggcgccgcgggtagaagtcggagtgtaagcggccttgggcgtgatggcccgctcttagccattgcgaccaaggtccttacacgcagacttctgcgccggtaagcgcgttatgattgagcgcgagccagcgcgggtagaagtccttccaatcgacttcttcgccagtgatcgcgtcgtattgaattttccgctcatagcggcatattgcgctgatattatgagaagggcgataaacgttctgttccgacttaatcgggacaacacgcttatcgccgcttcgttacgcttcattaatcgcgtcagttcgcgcataatggctgagtctcagcgcaagaagactgatacacagcttggtacaacttttcttagactacccttaaattataacgattctctgacaaaatgctagtcctttgccatcgccaagacgccgagcagaagataaatcggtgcaaagaagtaggcataccatttgtaacgtaaaaagaccattaaagtaaacagcactggcaagacgaacagccaccaccagcttaaatgatgccgtcgaattgttcggcctatccacaaagcactcagcatgttaattaaaatgaacagaacccctacccggacggcggtactaatatggaacaatggaaatacccatgggacgatcaaagttataagcacactccaacaaacaaccttattgcgaggtactttaacccaattcatgacacgactcatcagcgctagtctcctttataatcaattcagttttagtttaagcaagctcagtgagaaccgaaacggcactaagcaaatatagcggcgccgtttcggtacgtaagatccgcgggccaagaccggctggcgtaaacccgcgtgcttgcaataaggctaattcagctggcgatatgccgccttctggtccaaaaacaacacataatgaagcaggatgcggcactaaagccgaaaccaaagctgcatgttcgcctttcttggcactttcttcataagccactaacttaacggctgcatcgtcccctacatcactcagcttagcatacatcgtgacttccgggactaaattacgatgactttgctcagccgcattttgggcgatcgttgcaagccgatccatttttttagcaatccgctcagccggccaccgagcagttccccattgagcattgaaaaagccgattttggccgcgcctaattccgtcgccttttggacaatccactcagttttatcgcctttgctgacgccgcaaacaacctcaaccgcgatgggtaactccacatttttggtaatctccgggccaatctcaaccgtcagcggatctgttgtctgaaccgtagcctgataaacccggtgcttaggatcagccaattcaaaaacagcgccgacatcataacgcaacactttaatcgcatgtttagcaatcgccggttccaatgtgaaggtttgttggctatgtaaaagatgttcggtaaaaaatcgctgcacgcacgctccccttttctatgctggcaaacaagttatcgttaagctttcaataccgcatcaaatgctacccacccgcctgcatcccgccgttgcgcaatggtaaagccattatcctgcaacgtttgccgaatcaagtcggccttctcggcaataatccctgccagtaaaaaatggccatgcgggtttagccgtgacggtacttgcggaatcaatggtactaagacctcagccaaaatgttagcgacaatcaagtcagccgaaaccgttagtccttgcagtaaatcgttagccttcacggtaatgtgactaacgggatttaaggcaatgttagcttgggcatttttgacggcaatctcatcgacatcggttgctaggatctggctgacacccaaccgttcagccgcaatagccaagatgcctgaaccggttccgacatcaatcattgtttcgccgccgcgtaccaatgattccagtagtgacaacattaattgcgtagtcgggtgagtgccggttccaaacgccattcccggatccagtgtcaacaccaactcatcaggctgctgcggtgtatagtgctcccatttaggcacaatcgttaagaagcgcgaaacacgcaacggatgataatactttttccaaacgtccgcccaatcctgttggcgcacgtcagccagtgttactgttgccgcacccggatccaatccgaattgcgccagtgctttaacttgtgacgcaaggtgatcccgcttttcaattagtgacgtagccggttcaaaatagccgatgacctgtgcaccagttgccaaatgcggaacggtcgccggatcaaaccaagtaccatgtgcatcaatcgtctcttttttgaagtcggccgcatccttaatctgaatgcctaccgcgccagcctccatcaaaatgttgctcacagcttcaaccgcttcagtggaagtcgtcactgtcaatgcagtccaatcgttattcatatggtctcctaatacaattaaaataaaaagctagcttcgttttttaacctatcaatatctttttgcgttcgtaaaaatgactaatacttaggatacggcaaaaagatccgattatcggcatcgggctgttcagccaagatcgcttcataccgcgcttcatcgaaattcaaggcaaatgtatcgtcatcggaagtgccatccacgaaatccatcaagtcgctttgcccgtcatcaagcagatcctgtaaataaatgaacaaagcattaacagtcgccacgtcaatcccttttttgccgttaaatccaaaaatagccagataatcatctgcatagtcggcgccgtgcatccgcgtttcgtcataaaaaagaatggcatcttgataggtaaccaggccatcatcaacggttgttcccgtttggtcttccacttcaacgccggcttcactttcagccgtcattgtgatttcgagttcaatcacatgcgcgtccttatcccagttcaggctaagatcgccgtcaaaatctaattggtccattttgtcaccaattgcatctaacatattcatttggctcatgattgccatcctctcatttctaaatcctgatcacgccgcggtatttttgaaacaaacggattacctgcaacgtaaaaccgcaatggggcgcttgtccacggctccttgttaggaataccgattcgcggtccaacggcaatgttacgggggcgatgatcagttggtgccaagctcagcccgctctgattcaacacagtgccgtcaagctgtttatcaatcgctagtgcttggcataatttgcccggtccgttggttaagccgatgcctatttgcttgcggcgagtctgcatggtcgccagcccactgatcggttccagtgcccgaattaaaatacactctgggacatcaaccggctgagtcacaatgttcaacaagcagtattgtcgcattcgataaacataaacggtaccagccgccagaaaaaggctatggttacgcgtggtatggcgatggttaaatgcgtgggcagcctgatcgcgcgcaccaagataagcttcggtttcaacaatcaaaccgctacaagcgcctaaacttaatttcatgcccaacagttggcgcgcagaatctagcgtcgactgggtttctaaccaaggtaatatcatgcttattatattagcctaggtgccgccgaatgcaaagaggcgaaaaggctttgcctaaaaattgtggctaggtataatagtaatcaattagaaaggaagctgaacatggcagaaaacttggcattgcgagcactcatcagccaacaaaccgacgcactggtttctgaactttacaccgatgataaagtcaatgaacgactgcaaaagtggctggcaagggtacctgatcccggtgttgccgatacttacagttatttgctggcagaatcacgcgaattttccgaagagctgctttatcgcattttaagcaagcttgctgaagacggcgcacttaaattaccgactgaagcataaaaagagaggtggtcaaaattgcacaatgtaaagtgcagtttgaccgcctcttttatgacgcaaaggatctattttaattttgccttaactgtttgcggaagtgcctgctccgaaaccggttgaggtgtggtcagtacccgtttttgtgccaccttggctttcacgtaactgccaggtgttaacgccttgggattagctgattcttcagatgaatagcctaagttccgagtctgaccattcttcgtcacccattttaattcgtattcatatgtgtagtattgcttcccattgaccttgtaaagtgagccatcttcatttttcgaggccacttttttaccttcaattaccaccgcataagcatcaacaccattgtacgtactattccaatattgatagccgaaaaagccaataacaataagtacgagtacgccaactataccaaccacttttttcatcgaatcatcactccttttcgttaaacatattatgccgaatcaattaaaaccgctcaataatttgtgatgtctttatatttttcttaattcgtgacaaaaatgtcatgtgtgtaagataaaaacacaataacatcagtttcatttagatggcattcaaaaggtgacaatggccttcatgtcagcaattgccggaaagctggcagcatctccataacgcgctcgccagcccagaaaccgggctggctcgcgctcaaaaaaagtcctgcttctcagcaagactttagcttaacgtttaattgaacgcttgttatctttgcgcggactccgcttaagtcgatcaaaaacggattgcaccgccttaaatcgttgcggatcacgacgagcatttttgacaaactggctgaagtcatggtcaccaatgccaacttcgggttcgtcatcctttttatgcttcaaccaaggcatcatgacacctccgaatctttacgcatgcgttgagcgcgattcgcccctgccagcacgaacaccatggcaacaagcaaaccgattagcgcaaagacactgtagttcggaattaaaataaaagcaataaacgcacagattccgacaagattgccgactagcaacaatcgctgattatgactggaaaaatacgacaaaagatgaaaaataatacctggaattgtcagccaccacagatggttcgcccaagacatcaatgtcgctcccacgccggtgaatgaaaacccctttggcaatgtcgtaatgacagccgcaatcaacatgacaagtgcaaacgcaccataaagtaaatcataaagtgctggtacttttttaatggaaactttcaagtgtcgatcatcccttgctttagcagtacctgtattatacaagtttgcggaaatcattgcacgacagacagcgcctgtttatacaaaggttagtaactctgattttcttaacaagtaattttatcaagtaagaaattaaaaagcgttacgccagacttaagcccagcgtaacgcataaaaatgaacttatcttataaggagagtacaggatttgaacctgcgcgccggtattagccggttcgacggatttcgagtccgttgcattaccactctgccaactctccaaaacacaagttcaagtataacaaaatcaacaaactttgggaagcaattattttaagtatcgatgttgtggtttcaaaaagtgctttaagtgaacttgtcaaattgataatgctaagccgtcttttgtaaaactcaatatttaatcgtctcctcagtcacgtattccaagtatttctggcgctgttttagcgatgaatgcgtgatattaccaaagttctgccaatgagcacgcctgattccgagttgtctcaaagtatgttttataaaaaccccttgcaaagcattgccacaaaaaaggcgcaagtaaaaagttggcgaggttgacgttgttagtacataaacatgcttcagattggtgagcaatcccttaacaccacgcttagtaaccacatgacttaaccccggaccttccttcataactttatcgataaagccttttagcatcgcgggtatatcgttccaccaaactggcgtcacaatgataaggccatcgacttcctttaaggtattcaaatactttttaacgagaggatcgtgtgtctgcccagaatgaaataagcttagttcttcttgatcataagttggctgaaatccgtcatggtataaatctagaatcgtataaccaatagcgcgattcgataagttttgacaaactgccagcaaaatcgcgtggttgaaacttttgtcatatggatgacagtaaacaattgcaaattttgacatttttatgcctccaataagcgcagaagtgtttcgcgcaccaataccgcatcgtattctgttacatcactatcaagtaacagaccataaccttgaataaatgcccacaactgaataaataaatctttaggttgtacgctcaggtgacgtttttgaatcactgcttccaccatttgcatcatttgatcgtaaaatgcaaactctcctctatcaactttcaggacattgcgcgcaatcggattgaaaaatagaaaatgcatcaaattgggttcatctttaaattgtcgaagtaaaatcgaagcaacagtatgcagttgttcttcgggtttacgaactgtttgcagcttctttgccatccgtgattgttcctgacgtgataaaagaaccgtcaccgcttgaagtaattcttctttagtagagaagtgcgtataaaatgcacctgtggttaatccgattccttgtgctaattttcttaatgaaagtgattcttccccatgttcgttaatcatgctgatagctttgtccataattcgctggtctgtatcgatttttctgtcggccattctctcatcttctttcaaaataacagtgttatctcaatgatcgcctcgatcataacagtgttatctggaaaaaacaagctgcttcggtctttttttacccatcacgacatacaagatacctggctttttttgaaacagcttttcttcttcaagcttcggagcagccctctaatttggcaacactatgaaatctttcagttgatatacctaaataatactgcgaactatgtctttaaaatcattacaatcaacaatcgttttcctgagtaacaagattaaccaaaatttctattagaaaatggacttacatcaatgtttcctcgcttataatgcaattatcacagcaaacgatgctcttttctttattatcaaaaactccctagttataatgaaagaaataattcaacacgcggaggagattagcatgctgaaatacggcatcatcgggggtaatgagaatgcattggaattcattgacgccgcagacatttcagaaaagtggcaattaactgcagcgttcacagaaacagcgcgagaaatggcagcaatccgggaaaagcatccggaaaccgtctttttttccgatcttaatgcgtttttcaaaagtccaaatttcacaactgtcttcatcagttcaagctcgcctaacatgcgccattttccccaaattaaacaagcaatcctagccgggaaaaatgtcatcgttcaaccgccggcgctcacgaacccgactgaattcaaagaagtcgagcagttacttcgcactcacccagaagtacacttttttgaggctgcgtatccattacacatgcctaattttcaaaacatcctgactgcggtgcgcaaactgcctgccatccaaggagcaacatttaccgctatgcaggaatttcccggttatgatgatgttttggctggcaagcggcttcaagggtttacccccgagtcagcaggaggtgccctgcaaatgctgggcttgtatcctttgtatgctgcgttttcgctttttggtcacccgagtaacggaaactatttcgccaccgccatcaacactggtgcagacgggcttggcaccattttcttaacttatccggcgtttaatatcaccattcatattggtatcaccaccgactcgttcatgccttctgaaatttatggtttacgtgaaaagatcgtcatcgacaacattaccgaactgcggctgatcaatcattacgatgcagatcgtcaaaatcacttgcttaacacgatcacctatgaaaaccgattgacgggtgaggcacttgcttttgccgaaatactagaaacgccgaacgatccccaaaatcgccttcgctatcaaacatggttggaactggcacgtgacgtgaacacgaccctattccatttacgaacattagtggggctgaagtttccaactgatgtttaaagctcaaaaggcctccggagacacacctccagaggccctattttttattgctaacggtcaaactgagacgaccagacttcaacgcacgattttctacccaaattatgcgttatctttcacccgctgatcaccgataccactactgatttcttcagtgaatggcaggggcttcttttttgcatcttctaacaacgcttcccatgcgtgccaaacgtttgcttcagaataacgatctgacagttcataagagcgatctgacatctgctgcagcttatcaggatgcttgaataagtcgacaaacttagccgccatggccttgatatcatcaaatggcacaacaaagccattttcaccatcaacaattagctcattagggccatagttcacatcataagtgacgccaacgagcccattgctgatcgcttccatcaacgacaagttaaagccttccatcaccgacgccagcgcatacacttgtccttcgcgttgcaccgcgccaacatcctttacataatcatgcagtttaatcacgtcttgcagctgatacttttcaatggcggcattgatcttggtcattgcctcatcattgtcgcggtgatcgacgtacccataaacatctaatgagatattaggcacctcttttttagcaatgccaatcgcttcgataatatgatcaattcgcttttccggtgcaacccgggccgtgacaattactttaccttgctgccgatccgccatggcaatttttggacgtgcaaactgttcatccggaatgacaccgaccggaattgtgaagagtttactcttaggttggaagcgtgcacgaacgtctcgtgtttgcttttctgtggcggaaataatcgcatcataatcattagcgtgaatcaagccatactcataaaaattattcatgaccgagtgcatcggatcttgcgcgtcacctgcatgtgaattgtgtaaatgcaagacagtataagccggacgcctcaagtgcagcagttgccagtcaccaagatgcgatcgatcaacaataaagatattggcgcgtttattgttccaatattgctcattcaaacgattataaaaatgaactgtcaactcgtcgatattcgaaaagagatacaccgctccattgtcttcggtcagccgccagccggttttagtaaaagtctgtttggcatcatacttgttaaaggtttcaagcaccggccgcccgtcaaccttataccagacctccgtgccgactttattatcaggtgtataccattgcgacaaggacaagaaaccgcgaaaatcgtaaaaatcaacccggtacagattgccgaaagcatcgaattgctcaaccgaactgacccgttcagttggatcatcacgataataattaattcttgccacaaattgttgaccacgcagcacaagatagcgaaattgttccggttctttttggtaactaagctgatccaagccaaagtcaatatcctcggcatgcaaaatcttggttggcacttcttcagcagcttggaaatagtcaaacatccctaaagtttcgtcatcgctgacaccgtttgcctgtaaataatcgtgcagtcgtgggttccactcacgaaaaatcattttaaacggttcaccgtgatcacgaaataacccagcccgtttcaactgggcatgttcaattcccgagttgctttgattaaaactggaattaataaaaaatatcatcgttcggcactcctatctaagcgaagaaaaagatttgggacggtgctaagttgcgcttcccattgtttccaggcagcatcggcactaaatgtttgtgattgtcgataagctgcttgaaccatttccggccacgtgtgtcctgcttccgtgctcgtcaacaatttcaccagactgtcggcagcagctttactttcacctgttggtaccaggtaaccattgacaccattttcaaccaacagtttaggcccatattttacgttgtatccgatgaccggtacgccatagctcaatgcctgaagaatattcatgccaaacgcctcagatgatgagacactcaacatcgcggcggcggttccaagcgctttagcgagttcgtcttctgattgataaccatgataatggatcgcggtatcgacaccaagttccttactatacgcaaccatgctttcatttgttgcttcgtcagagacgtaaccataaaaatccagatgcaaatccggaagctttttacgtgctttggcaaatattttaatggcttcttgtggctctttttccggtgagatgcggccgagatagacaattttattgcgatcacgactttcaatcggcactaaatcatgtgcttctgcaaaactgtcaggcaccaccatgacatgtttaaagtggaagaatttttcaatttcttgcttttgctcgtcagtggccaccataatcccgtcaaaatcattggcgtgcgtggcaaacagcggcttcagataatcgacatagtttcttgaaccaccgacttgttccggattgtgagtatgaacgctgtgcaggtattgccacttagcattagcgcccgtcactgcggccacctcattaatcaacgatgggcggtcatttattaacacacttggctcggcagccacgacttcattcatgaagaaaacaaagagctcactttccgaattgaaccgccatgctcggcctttataatcaagcagctgatacatggtattcatgagcgtcccattcacattcatccggacaatctcaagcttaggagcaccttctggattataaaaaatctgtggtccgagctggccatcaggatgaaaatactgcgttgacgatttaaagccacgccgatcccaaacatctttagccacggttgcgttcatgtcattgtaatactccaatgaacccaccaaaccgactgtcgctggcgctaccaacgccttgcctacgactttgccatgatgaacaatctgggattcattagcatcaaccccaacgatatgataatcaaacttatcaattacttcggtatagcgaatatcaatatcacgcggttctacaaaagtcgcttcctgaaaataatcatacatgttcaaaacatctgactgggttaatttaacgcgttttaaatcgtcaattaacaacggattatagttgcgcgtcaaaattttagcaggtacatcatgatctttgaaaagtcgtaatcgttgcgctgctgaaaactcggttcctgagttcattgaaaaaatgttttcattcacaaaatagttcaccaatagtcccccatttcttaatggtcgtaccttgagtccaagatacgtaccttatgcctctggaaaatcactttcaaaaaccggcgcatcttctgacgggaacaccccggcttgatctagtgcggccacgttcttttgggtttcagcatcggcggcaactggctgactagcagataattcagatagccgcgccaccttagcttcagaatcagacaatgccgtttgcaactcctgctgggtttgctttgccgcggctaaatcggcctgaacatgcttaagatctgtttcggcaatttgagtggcaacgatttgcttacttaactcgttttgcaatgcttcttttgccgcttgggctttatcacgctcggacaccgctgcttccagatgactggacaaatcggcaacttgtgtctgtaacaattcattttgagccttgagttcttcatgctgctgatgcaaagtcgaaaattcgctgacaacctgctgatctttttcatgttcggccaggacagctttatatttagcagaaagttctttcaaataagccgtcgtttttgtgcgataagtttgccattgttcgatttgagaagccaggcgggtgttcattttttgaaggacggctatttgcgtaattaaagtactattttgtttctgcgcttcgtaataaggcccgcgggttaagttagtgttgtctgtcggcggattcatttgtgaagctgtattggcatcgtcatctttggctggtgcttttgcctgaagctgggatacacttgcccctgccgcagctggtgtttgccttgccgattcagcttgactggctgttgctgcatccgtattatcacttacaaccgttttgggatctgatagtgattctttatcagctttctcggccggctctggttgggctggcatagcggctgcttgtggctggcttgcgatggctttagatggggtggctggttgcagttgcgctgttgaagctgattcatctttgacataaacagtcagttgatcattggcaaaatttaattcagtcccgccagagatgttcatggaccaagtacggccgctgccggttgccggtttcagaatttcagtggctaaagaggccgcgctgttgagttgctcaagctgttctggcgacaaggttttgcccgttgtaggctcgtctttttgctgatcgccggtattttcctgctgaagttcctgatttcccccgcccagtttctgccgttgctggttttcgctcaggcgttcatttaatgagttgagcacatccggcgtctccggttgctcttttcgattaaaaattcccatgttgtcctcctctgtagatcataagtcgaataagaatcctctcacgcatatacttaactcgatcaattttttcgtgagaattatcaaaagaaaccgtatttgattactatcatcgttaaaatctctagaactgcgggcatcattataccttaatcttacaggaacgttctgcgactatgctattgataagctgggtttcgcattacttttcgcagtcgcatcaagttgtcccaaaggtgatgcattcagatagctgcggagttcggctagcaaagatgcattgacatacacaaaagaaatattaggtagcggtatactggtaggattcgttaacgagttggccattgcttttgctttaaggtaaaggcctaagtcggtgtaaataggcgcttcaaaggcataataatcgctaaactcagcgctacctgcagggggacggtaaaaactcacgcccattgacggcccgccataaattaaattcgcccgatgcccataatgtccgttaccaagcggctccgggttatcggtctcgtcataccaggccatcaccatgtaatatgcgatctcctgattagaccgcatatgatccgtaatgccagtgttcgtaccgatgttctccgttgcgtgactaacggcttcatgattaaaatcttcaacaatcgcccgcacgcgttgttgtgcccgacttgtatcgcgttccgaaagtgtcaacgccgactgtccgttcaaagcccgcaattcattgacatattgatgaaagtagctgacaatctcagcctcatccggtttgaagttcggatcatccagcagatacacatttttagcgcttggataattggatgttgacgggaaaaaagaggatagatttttcacctttaacatccccgaagcatccggattcggtttcgaggtcagactactgacaaccgttaccctcgccatgtttgcaatcagctgtttcagttttggatccataaaactaaagcggatgaaataagttccctcataagccggattaaccgtacctgttatcgaaatatcttcgagctgaaccgacgcaccatcgctattagtagcactcacaaaattgatgtccggtgtccatgatgattttttagctaacaaagtgtcttttgtcttgattgcagccactgtttctgaaggtgttggcggcaagacgtccccgcctatctgccgttcatcaattgcactagcttgattggtcacggtgacagaagaaaattgcgccacatctttgccggttggggcatcagtaaaagcatactgaacgaaataggtacctacgatcgctggatgaacggttccgatgacttgaatagcatcgattggtactgcctgtccgttcgagtcattggcattcagaaaattttcttccggtgtccaagaagatttttgggcgatggtaacgggtgctgttgcgatactgggcgactgattcgtatttgggtcagccgcagttaaatcgtgcttttcattttgatcacctgacaccggttccttggcttccgcctctgggttattcgcagtcgccgtcttcatggtttccaagggctgaaccgttttttgctgggcgccgttagcttcgaagctattagccggtggtgatgaatctttgctgccggaagctactgaggtgatgtcgggagaagcacgatccgatgcaactgaacttgtggctgtatgggttgctggctgctcttcattagccgttgtggaggcagtcacaggatgtagtgagctaaatgcgaccaaaacagaaaaagacaaaacaacctctgatgccatcatccattttccgcgaactttagctgtcttgaatttgccatggcggcccaacaacgcggactgcaactgtttctgcctactcatcatccataccctccagacttcagtgtcttgaatccgatcgtttttaaaaaaacgattgggacaattttatgtagaaaagaggccaatcgactttaaaaattgacctcttgtagtcttcagaaaaacgaactgatcagccttattgaataacagtgaccaatgctttgttttcaatttgctggttggattcaggatcagtaaagctgatgacaattggataaacgcctggaatccaaggctttacttcacctgacatgcggaaattttctaacggaacctgatgacctgaggaatcagtcgcctcaacaagaagtgcttctggctggaaactttcatttttcctcagggtcagatttttgagttcaatttttgcatgcatattttttacctcgtcacggtgacgtatacttgctgttcaacgatttcattattattagcggcattggtgaagtagtacttcaggatataagttcccggaatcgagacggtcacgcttccatcgatagaaagatcagaaatatcgaccgccttaccatcgccatccgtggcactgactaatgcctcgctaggatcaaaggattgtttagcccgaatgacaagatttttggtgaccagtttccctgctttagaagagatcttagcaatggtcccaatcaagtcggaaatacccggcaattgtgcaacccctttgaggacaccggcagcgtcaggtaagttaagtttcacgcctactaactggagcaaccaacctgcaataccgccgataatcccaccgattgcagcaccgattggcgaaccgatcaagctggcaatcgtgtcagtcaacggcgtcacccaaccaaggaggataaattccaacgggttgacaatgggtcccagtccgaggaacccggccgcaacaacgatgacgccggcaataccgaagacgatcatgccgatggtgtaagaaatcagccagtttgagagcgtgtgcccgataagaccgccaatggttgaccctaatgcaaccccactgacaacggcgtcaacttttccatctttagaaaggcctggcgccatggtcgcaccgtaataagcaccaactgttgagccgacaatcccggttagccaaccggtaatcccaccaacccaaccaagttcagcagcgttaccaccgttagcaatccaaccaacgatcgggataatcccgacaattgaatctagaaccgttgccggaacgccagcaataaaccatgccgcaaagccacctaccgccgttgtgacggttccataaaacgcactaccaacagttccgccgatcacggattcaatcaattcacccacttgcccaagtccggttaaattaggaattaaacgaattggattaatattggtagctaaccacgaaaccgcgttccatataaagttggtaatgccacctaaaaccccggttaagctaaacccagtgtccgctttaaccactgattgtgcggaagcgattaacgttgaccttaactgtttagccacactgtcttgagccactgagattgctgattgcatggctttataggaatttgttgcttcaaagcgtgccatatcctgagcaaaggccgatccaagcgaagtggcgaaaaaggatgtggccaaagactgagcaagacttgtgtttgaagcggcaacagcagaggatagtgccgtattaaaggcagcaaattcggaatttgttgcatacgaggacaaagcagcaatcatttgcttgccatcttcggtttgggcaaacgatgaaaccgcagccgcgcttgccaacgaacctgcaaaggcagcagatgatgcatcagccaagagtcgtttgccataagcagttgccatgaatgatgaagttgcactagcatcggcagcagatttcgcctctgcagttgacgatagcgatgacatcattgattgaagcgccggatcactagcaaccgaagcttcaaaactcgccaatgatgccaatgcactaccttcagctgtggcgttaaaagacgaaaccagcgatttttgcaaggcaacatcggacgtggcaacagcttcggaaagttgcgcctgaaacgcttttactttggggtcgttgctaagtgaagttgcggcactcaggaaattaacacccgatgtaattttatttgctgcttcgcttaacgcaatcctgccttgatcagttttagcaaatgacgtcaaggccgatttagcactggataacgcagcagcgtccaaagccagtgaaggagctgaagatgcggcatcactcaattcaagcggggtcgcagccaggctcgatgctgaggtctgattaacttgattttctagaggctgagctaacgtgtttggcttcacgataacgcggacattcttgccaagcttttcctgcgtgtaagggtcaatgtattcgtatcgtaaataataggtgcccgggataccggtgttaaccgtcccaacaagattaatatcatcaaggctcagcacattacctttactatcagttccaccaagcaaagcaacagctggatcaaagtgttcttttgcctgaacctgaatatcttgcgtctgtagcgactgcttgctgttctggttcgtttcttttgaagtcgtgaccgaagcgctagcaggcgagacggttggtgcatacgtggtggctgaggatggtgacgatacagcactggacgtagtgactgtctggtatatctgagtcggttcacgattggcgaccgattgaacgccaggcactgacgcgatggattgtggttgtgctgcttgtgagacagctggtgttgccgccgaactagctgccaccaccggcttacttaccgacgcttgactcacttgagcatgtgccggttcttgttgagcagccggcttttgttcatgcgttcccacttgatcaatcgcggctgccactcgaatcgtttccggtgtgactgaatcagccttaacagttttgcccgattctaaggcgccggcaccaatgaccgtgacaataagcgatgatgcaaagagccaccgttttccttttttccaagagcggaaatgtgtgcgcttcatctgaatccgattggtattatcaggcccacttccttgattgcttttcaaattaaaacacccctttttcatctacatctgcatcatcttgatgtcaccttcacgaattccaaaaaatgactcgattaatctttagttgtattagccaaacgcgtatcacccagaaaatcgctttagccggttgtctctagaattggtgaattgacgatgctcctgtagcaaagatcaaacttgttactttgcgcaatatttccaaatcaaaaaccgttcgacaattttttgattggagcattttccagcgctcccctttgttaacgatcaagttggcaaaagttttcttagcaacaccctaaggcgctgcacgggttggatgttgattagtcttcatattaatggcttcctttcagttaattaatcttcgcgatgcttctttttgcccatggctgctagtgtccccatcagtacaatacctgctagtgcaagcaaggcagcttcttcggtttcaccagtttgcggaagtgtgtgtccacttccatctttagtttgcccacttccgtttttagcgatgatgtcagcagttgtaccaggattgattttatccccaacgctggtgtcagtagcaactgtatgaacggtgttgtcctggctgcctgagtttgcacctagttcagaatgtcctacgtcttggcgtcctacgtcttggccttttggatttttagacgttccgtcaacatctttaacacccttggtatccacatcgtgactggcaatctgttcggcaagatcacgatcagtttgtgcccgggtagcagcactcttggccttatccgccgccgcagtcgctgatgaagcatattgtgcagcgtaggaaagtgcttgagctgctttattcggatcaacataatcgtgtgcaagctcttgcgcagccttactgagtgccgcaaaggaagcagcgtctttagccgcactggcagcaatgttcgccgcgttaatcgcgtcggacttcaagtaagctaacgaagaattcttaggtttaccatcagcaaaacttgccgtttcactggccgctttagctgcaactgaagcagctaagtcggctgcggtcgttgcggcatgagccgtgcttgcaaaatcgccttgagtcggtttcgcagtatcagaacctggcgtgtgcgctgcagcagcagttttagctttatcagcagctgactttgccaaatctgcagaactcttcgcaccggcagcggcactggacgcccgtgagtcgtcacccgacttcgctgcatccttagctgctgcggcagacttggcagcgtcatcagcagcggacttcgctagatctgccgcgctcttgattgcaggatcttctggatacttcgttgcggcagaacttgcttgatcggcactggagctggcttgcttggctgactggtcagctgcactggcataacttgatgcggcatcgcctttagcttttgcttcagcttgggctttggcatcatctttagccttcgcatctccagctgcctttgctgcagcagaacttgccagatcggctgagctcttagcaccggcagcggcactggatgcccgtgaatcgtcacctgacttagctacatccttggctgctgccgcggatttggccgcgtcatcagcagcggacttcgctaggtcagccgcgctcttgattgcaggatcttctggatacttcgttgcggcagaacccgcttgatcagcactggagctggcttgcttggctgactgatcagctgcagtagcatagcttgaggctgcttcacctttagctttggcgtcagcttgggctttggcatcatctttagccttcgcatctccagctgcctttgctgcagcagaacttgccagatcggctgagctcttcgcaccggcagcggcactggatgcccgtgaatcatcacctgacttcgctgcatccttggctgctgccgcagacttagccgcgtcatcagcagcggacttcgctagatctgccgagctcttgattgccggatcttccggatacttcgttgcggcagaacctgcttgatcagcactggagctggcctgcttggctgattgatcagctgcactagcatagcttgaggcggcttcacctttagctttggcgtcagcttgggctttagcatcatccttagccttcgcatcaccagctgcttttgctgcagcagagcttgccaaatcagcagaactcttcgcaccggcagcggcactggatgcccgtgaatcatcacctgacttagctgcatccttggctgctgccgcggatttggccgcgtcatcagcagcggacttcgctaggtcggtagcactcttaattgccggatcttctggatacttcgttgccgcagaacccgcttgatcagcactggagctggcctgcttggctgattgatcagctgcactagcatagcttgaggctgcttcacctttagctttggcgtcagcttgagctttggcatcgtccttagccttcgcatctccagccgcttttgctgcagcagagcttgccaaatcagcagaactcttcgcaccggcagcggcactggatgcccgtgaatcatcacctgacttagctgcgtccttggctgctgccgcggatttagccgcgtcatcagcagcagacttcgctaggtcagctgaactcttgattgccggatcttccggatacttcgctgccgcagaacccgcttgatcggcactggagctggcttgcttagctgattgatcagctgcactggcatagcttgatgcggcatcgcctttagcttttgctgctgcaatcacttttgcggcagcatcgctagcaacggttgcagctgactttgctacttctgctgcagacttcgccgcgtcatcttgaccgtctaacgccgcatacttggcatcattggcggcgcttgttgctgttgaagcagcagatcttgaaagactggttgctgctgcaatgccagcatcttcaggatagtttgccccagcactttcagctaactgagcgcttgagtttgctaaacttgcagattgagcagcatcagtagcatagtttgatgctgcgacattttttgccttggctgcatcgcttgttttggcagcagcggtgctggcaacaattgctgcgctcttagctgttgcagcggcagaagacgctttggcatcatcgccggcttgtgcagcactcttagcgtcagttgcagcactcttggcaatatcggctgcagacgtagcaacatccgtattggctttgatgtttggatcattaggatacttagtagcaacagatacggcaccatcagcgctggagcccgcctgaccagcggccttgacagcatcatcggcaaaacttgatgcagccgttgcttttgctttagccgcgtcactcgcttgtgaagcagcctgactggcaactatcgcggcactcttggcgctatctgcagcttgtgaagcagtcacatcatcgccggcttgggtggcacgcttagcatctgtagctgcactcgaagccgtatctgctgctgacttagccaattcagttgccgcgccaattgatgagtcattcgggtacttcgttgctgcttttccagctacattagcactggagcccgcttgactggcagccttagttgcttcattggcataactgcttgcagccgtgcttttcgcttttgcagcagcgcttgtcttagcagccgcggtgctggcttcggtagctgcggttttggcattagaagcagcaacagaagccgcaatatcatcaccggttcgagctgcacttctggctgtatctgcagcacttgaagctttagccgctgctgcagatgcactatctgttgcagtttgaatttctggctcatccggatatttggttgccgcagaagtagcaacatctgcacttgagcttgcctgactagccgcttgtgcagcatcaccagcaaaactagttgccgccgctttctttgcggccgcgatactatctgctgttttaagtgctgttttggcagcagcatccgcttggtcagcggcagatttggcaatatcagcggcacttgaggcacttgcgtcatcaccgcgagcggcagcatcttctgccgcatctgctgcaagtgatgcatcttttgcagcttgttgggctacggaactggcacgagaaattgtcggatcatcaggatattgactgcccactgccgttgcaacatcagcactggaactagctaaactagccgatttaacggcattcgctgcatagctcttagcgtctttgtcatgaaccaccgctaagcttgatgccaagtcagccgcaatacttgcctgactagcatgactcttagcttcggcagcggcacttgatgcagccggaatgtcaccgctttgtgcagccgacttagcactgtctgcactgtctgaagcctcgtcagctgcttgattagcgacattatttgcactcgtaatggctgtgtcacttggatatttgactgcagctgattcagcgatatcgccgcttgcttttgcccgatcagcggctttggtcgcatcactgacaagtcgatcacctagtgttgcgatgttgcccgccaaacgttttgaatcatctgcagcgcttgaggcgatagctgcttgacccttagcctgtagtgcagcgctcatggcgtcatcagctgtactacttgcagcatcggcggctgagctagcaattttggcaaagtttgaagcctgatttgcaaaggtcgaagcttgagacatattgccagctacaatagcgctgttagcttgggaagcagctttgctggcagcaagattggcactacttgttactttcgccagactgacagcagagccggcagtagctgaggcttgagtggcatagcttgatgcttgaatcgttgcatcattggcagtctttgcaaggctggccagagaatcattgccagggaaccggctggcagcacttgaagcaattgcatttgcagacttagccgtgtcagaagcagcactggcaatagcgctggcattatttgcagtggcggaagcttcttgagctacgacagaagcagataaagcactttcgctggcctgactagctttagatgaagcttgatcattggctgcggaaaccgtatccgcaatctgctttgcccgattatttgcgcttacggcttggctggctgcggagtctgctttgtttgcttcacttaatgctttaccggcggcatcatttgccttgtccgcgtattctgaagcaatgtcagctgcggcagatgcttgattattcaggttttgggcagccgtatgatcaccacgttgactggctgccgttgcctgagcagcggctgttttggcagtggcatttgctgaactgacttgatcggcaaagctacttgccgcagatgcatcagcgctagccgtcaaagcataactcgcggcaacactattagcgtctgaagcagttttagccagtgaggctaatgagttgtttgacggatagttacttgctttagccgaggcttcttgataagcagaatcagcgacactacttgcattgctggcgattgcgcttgcattgttcgcaatcgcggttgcagagctggcagtataagcagttgcactggcatcagctttagaagcgacatcacgcgccgtggcagcagcactaacggcaacttttgctttttcacttgccaagtttgcttcatttagtgcttgatctgcagccgagtttgccttgtcagccgccgaagaagctgtcacgcctgcaatcgatgcttggtccgctaaacttgaggcattggaaaggtcgccagcatcaagcgcagtattagctcttgaagccgcagaagcagctttactgttcgccgcactggcaatcgctgcataactacttgcagcagatgcatccgaacttgctgatttagctaagtcagcagtttcactatttgcagaagatgccacggtggcaagactggttagtgaaggattgccaggataacgtgttgcaatgtttgaagcatcttgatagccggatgctgcgacactacttgcagtgctggcgatagcattggccgagtttgctttaacagaggctgtacttgccacgaccgacgccgaccgcgctgcatcactggctgcactcgctttatcactagccgcagtattgccgctggtaatggatgaagcaagactcgaagccgcggtgctagctgcaactgcaatgcttgcagcgtcattggccgcagaactggctgcgtatgcctcactcaatgctttggtagccgcatttttacctttgtcagcggcagaagaagcctctgtagcggcctttgaagcacttgctgcatatgacgaagcttccgaaatattgccattcacataggcactatttgcaagggatgcagtttcacttgcaacgccatttgcttgtgaagcggcagtggcataactacttgccaatgaggcatcttcaattgcgcctgccgcataactggaagccaagctaaccgcattgccagctgctgtcgctagagaggcaactgactgatccttcgggaagcgtgttgcaacactagccgcaacgtcaccagcagactttgctttatttgacgcagcgactgcaattgacttagccgaattagccgtgattgatgcagcgcttgcaacaacagaggctgaagtggcaacactagaagctttttcggctgtatcggatgtggctttggcaaggctcccggctaattcaatcgcactacttgcagcttgtgaagcaatcgcagcagtcgaattagcctgatctgcctctgtcgaagcctgattagccaaaccgtttgcttgactggcaagatcagctgcactagacgcagcagtcacagcttgtgctttaaagcttgatgcggcttgtaaatcaccaccggcaatggcactgttcgcctgtgaagctgccaagctcgcctctttgtttgccgcgactactttttgagccaaactgcttgcggcagcggcatcagctgctgcacttttggcaaatccagcggttgtgctatttgcacttgaagccactgcagaaaggctggtcaatgacggatctttaggataggtggcggttaacgaagcggttacattgtttgctgaactagccacactgatggcggtacttgcaacggtgcttgcattattagcaacagttgaagcagattttgccgccacacttgccgcgctggccttgtcactggctgcacttgtatctttagttgtgtctgacgccagcgttgcaacccgaccttgagctgaaagtgcggctttagaagcttcgtcagctgcagacttagcttgtaaggcctcgctttgggcaagacttgccgctgtatttgcattgtctgccagtgagctagccaaatttccagcatcttttgcctggctaccaaaccttgcggcagcatcattttgccctgccgttagcgcttcatttgctaaggaagcagcacgtttggcaccttcattggcagaacttgtttggcctgcgtaactacttgcggcaaaagcagccgaactggcttttgcagcgtaatccgaagcaacagcttgtgcgctagaagccgttgtcgataaagccgccaacgagctgtcttgtgggaaactacttgcagcacttgaagttaaatttttagcagaaagcgctacggcactggcattacttgcaatggtgctggcattgttagcaacagtcgatgcagtgcttgcgacaaccgatgctgaccgtgcgacggtactacccactcccgcatcacctgctgcggcagacttcaagttgccagcaatccctgaagcaacagttgctgcgtcagaggcaatggctgcctgagattttgcctgcaatgcataggacattgctgaactagcagctgattttgtctggtttgccaaatctgtcgcgttcgaagctgctgttgatgcttgccccgagtacaaagcaacgccagcggcatcaccggcattggcagcgctagttaccttattcgctgcttcctgtgcttgtgagtttgcatcacttactcgggttgcaagatcgctagcctgacttgcaaaagcactggcagatgtagcaaagcttgaagttaagctagctgcctgtcctactttaactgccaaactagcaagagaagcattatcagggaatgaagatgcaaaaccggaagccgcagcattagcagaacttgcagtcgtgctggctgttttggctattgcactagcattatttgcttcagtcgaagccgacgttgctgctgtataagccaggctggcatttttactgtcagctgcagtgctgccggtagtcgtgcctaaacttgcggagagtttggcagcttcacttgctgccgaggtgacaattttggcattttcactagctgcaagtgctgatgctaatgcattggatgctgcagtactcgtttggtctgctagttgacttgccaatgatgcagcactagaggcgatcgtagcgtaagaactggcatctggtaaattcttcgcggccagagcagcattagtctgcgcaaccgctgaaatgaccgtatcatttgccgattttactttacctgctaagtcacttgcttgtgagttgctagcaaaagcagatgcagcgtaactagcggtcatcgatgttgcagtcgaagcggttgcagaaagctttgcaagcgattcgtttgttggataagcacttgcagctttgtcaaccacggctttggccgaagttgcggtctcaattgcagtgcttgcaatggcactggcgctattggcaaccgtcgatgcaaggttagctttgtcatatgccttgcttcctgtgtccgcagctagactggcattactctttgcagctgcagtgctactggttgagccagcaatcgttgccgctgattttgccgcatttaaagcgtcttctgctgctgaagaggcagcgtttgcttcagatagcgctttatcagcggcggagtttgcaattggtgcttgttgactggcggtagcggcagcatcagcagcctgcttggcaagtgaggttgcttcatcggtttttcctgcagcactggcagctttggcggcggccgctgctgaagacgcagttgtgttggcagcattgacagtcgcaacggcctgtttggcaaaggcagcatctgaacttgcagcaactgcataacttgaggctactgccgttgcactagaggcggtttttgaaagatatgcaagtgattggttgtcaggatttgccgtagcaagactggcaacttgatcacttgcgccattagcagcaccgcttgctgagctggcgatactgctggcggaattcgcctttgttaatgcgccactggcagtaacagccgcactggcagcaatagcagcatcggaatcaggattgagcgcggactttaccgttaccaggaaatacgaaaatagtgtcccattgaaaggtccaactaagggttttgtctgattcgtattaatactgtattggacagcgtaaacgcctggtgttttatacgaagagcctgcgatccagattggaacattcgcatcattgggtctgccaacttgactggcgagcatatcgccgaccgtcccggcactgttttggaaggtcaagaaaggtcctaaaagaccatcagaggcaaaaggattaagtggatgcgtatagtcaatattatttgccgcggtactacccgtaatgacccaattaggtgcaagtgtaaaggttgccaaactaccattaccaaatgcggtaaagtttgaatcgacaactttatcaatggaagtatccccagcaaaaatggaaacattgggcgccgtaactgtagctgtaccgcgaggatttgttttcgtaaaaacaacggtgctaggcgttcccgcatcatccaccactggcatcgcagcaagtgtttttgatacaaccacgtttttggtgtggttgttttcggtttcggagcttgcaggcgcagcagcttgagttacagcaattgaagtggcactactagtagaactgcttgctgcaacggtaataccggcagctgccgaagtagtcgcattgctggactgaaccgctgccttagcaactggtgccgcacttgatggcgctgcagacgaaacaactgagtttgtggcagaactgctcgcttcagtcttggcaaccggtatttccgcggacgcaaccgcttgttgtgtctgctgttgcttttctacctttggctgtgttgttatggtcgtttcagccggcgtagcattagtaaccgtcgcggcggcagtggccggtgttgcggtagttgctgaacttgaagctgtactaggtgctgttggagcagtatgaatcgacgcggccgtttgtgcactggcagcatcaattacccgttgattgtcatttgaatcggcatgaacggcctgattcccggaaaagacaaatccggcaccaccggcaagaaacgttaaggtactgaaggtgaaaagccagtgtttcccagctttatacatcttgaaattagccgttttagtcgatggttttttcttaatgaactttcccatgtgttcaccccatttaaagagaaaaaataaactaacgatactttgctcatcattttttgatgctgggtgctgatagcatcaactgtcgcaaaaacttttttgccggattagcagtactatgccgacaaatgttataagctcgttattcccttgtcatcccccttatgattaaaagtgatattattaactcgaagtaccaattttatgataggcattaaaatggtcctcgaattgattctaaatatatatcatgatgattgttataacaagcccacacttttattaaattattttctaaataatgacaatccctttataccggtctttaaaacggtaacattagctttgggcttcgtactaataaggtattaaaataaccattatatcattttttctaaaatagtttataataaatcgagtacaattaaagttcaccagtcttaaacttttttagcatctataatgttctaatataatagtttcagttttatttcctcctttataatcaaccaattaactccatctacttattaaagactctcttgctgtaaaatttttattgaacataaattcaactttatgataaccaaagaaggggtaaactaatgacaaacaaaaagcccgaatccttaatttacgggattcaggcttgtgacaattatcaaatcgatcatttttcttaaaacgttaaccaatatgccatgcatcacgatactgcttttttaatgataacaggctgttttgttaactaatgatgcttaactcatgaattgataccagctttcaataaccttaacgtctcgcgattgttgcaactgcttggcaacacttgaaaattgttggcttattaagaacgcgctggtgctcattgtctgcaacgcttttgcatctgcgccatcatggacaatcggtataaggtgagattgcatttcaggtagttgcactaaggcaggaaagatctcacttgaaacatcgacgtaaagtttgcggtcggtatgcacaaaattgttaaccagccaccaaactaggatctcattcatatctgtaaaaagtttgattggctcgcccgcagaattgtttaaccaatattgttgcgtcaacggtaatccgttaacaacggcgacaccgcttcgatttaggatcagtccctgaatgctcgtcgtttgaaaaagcggttcagtcaaggtcatgcgttgcagatttggcatttgcgcataatagtccgatacgaataagcgctcatgatcatcatactgatcttcgcgcgttaaccgaccatctttaaaatagctgatttgccgaacccgctttttccgatcacgctcgatttttaacacaacttgattctcggcatccatgtagcgggtgttcttgctgccaggaactgttttggccgttaagtgtgcttgtagttgacttgccagattcgcgtgggaactgttaccacttccacggtgatgcagttcatcataaaagttatgataggatgtcggtgccaaaaatagctgcttcttgtcgcggtaattcaagaatcgcgccgtggcatcaagttcaagatcgccggttataacagcgggactgtgatggttagttttgaagaagttcatcatcactttgatcttagcccattgttcatcaggcatttcttctggcaacaaatccagataaagataatcgtttttagcgtcatcgaatctaatgtcattcgtcccatccgcaatcacttcatcccctgaaggacttccttgtttcttcccaaaaaagttcatgaagctttcccccactcgttttgaaaatgtttcaagtacaatcgcaagtagagtatcgcataatcattaaattggcagctattattttgacccgttcacagaagatttccttttggtgatgcttaataactgcgactcaatccccttaaaatgccgaatgtaccatgccgtggctcagcgcaagcgacctaaaaacgccgtcaaaaactgcaatttctgctgtgcctgcttgaacacctctgattgatacgttgtcagcgcttcttcgccaaaagatcggtgggcaatatattggtcatagcgcaactcaatctggatcgcggtgacaccttgcttatgaccatagtagcgggtaatgtcaccaccacgaaaaggaaaattgtcttcaaccgtccaaccatatgtcatgaactgatccgccaacgccaagcgaaatcttttgctagccgtccgatcatgatcattgccgagaacaatcgtcttgggcttcacgttcggataataagggtattgggcaaagctgtgtaaatcaactaaatacgcatacccaaattcagcttttttctggttcagcaaggtcgtcaacatttgacgataaggccgataatacgagcgaacccgcgcctgtatttggggaatcgtcagtggctgtgcatacaggtcatgatcaaacgtgttacgctgataaacggttgccgagcgatagtcatgctgcggatcataagtcaccgcccgatttggatcagcgacataccggttaacatgattgattaaagtcgtcaatccggcagcaggcaaaaagtcatacaattccggtaaaaaccaatccgtgttggctaaaacggcatttggcaacaaagcttttttcatcgccaccggtagccaggttccgctgtgaggcaaactaatcacgactggagaatgttgctccgaattcagcacggtataaaactggttgctaatatccatctacctcggctccttttaaaacagtccgatcatttgactgccttcacctctgtgacaacctcgcaggtgccatcatgactaccactaccgcataaaaacagcaccgaacaaccacggtccgatgctgactttctttttttcttgacgagtgtcacccgccaattaaagttaagattcacgatgcccttcttcaggcaaaaggatcgtctgactctccccatcatcgtaggccataaccgtatccggaaaactgggatcatatggaaacggtaaatccacggacatctcggtttgagcgccttcttcactgaaatgaatcgtcagtttgccttgatggttctgaagatcaaaacgcaacaaattattgagcggaacgacgccttgtaagttgcgatcaatgatgagccaaatactgtcgatgatctcgcccggcaggtttgaaataacgccaaaagtcgcgaatcgactatgatttgctgcaaacatatgcgactcctttcttcagtcctgcgtggcaatatccgcaaactcagcatcaacaaactttgctaaaaccttaggatcaacgccaacggaacgaccgattttaccggctgacacaatgattgacgactgactttcggcttcttgactgatgtaaatcggatacttgtgacgctcatgaatgccaataggtgtgttggcgccgtgttcataccctgtcgttttcatgagatctttcagcggtaccatgccgactttgcgattgccggaaaccttactcagctttttataatcaacatgccgatctaacggcacaacgccaatcaccggtcccgtcttgttccccgttagtaccagggttttataaatctggtgttccggaacatcaagatgatcaaccgtcaactgcgccacatcgccaacttcttcagtcggaaattcataaggcacataggcaatacccgctttgtccaacattttttcgaccaaggttttatctgtcttatgatgtttagccattgcgatccctccttacgaaatttccattcagacgctttcacttaaaagtctagaacaaggcttgcgaaaatgccaccatcatgcgccggtgtaagacattaacgtgaacatatcataatctttgatcttgtcgcgcccatgcaaatcgctgagctcgatcaaaaaggctgtcccgaccacgacgccgcctaattgctcgactaggcgaattgttgctgcaatcgtgccgccagttgccagtaagtcatcgcataccagtacccgttgtcccggtttaatggcgtccttgtgtaagtaaagtgtggcctcaccatattcaagatcatagctggctttaacggttggccgcggtaatttgccttttttacgtgccggtgcaaagccgattcccagcttatacgccacaggacaaccaacaataaatccgcgggcttccgggccgacaatcatttcgacccctttgtcttgggcataggcggcaatttcgtctgtcgcagccgcataagctttaccgtcagccatcaaaggcgaaatatcgcggaaaataatccccggttccggaaaatctttcacactggcgatgtaatctttaaaattgatggtcatgatcctacctcactgtctgaatgctctgtcaccaacatcgtttcaagctgaacccgcggcatggtttgcagttggcgagcaagcgttaaaaatgcctcgcgcgcaacataagctttggcggtttgcaatggctttttagccggtgccgtgacgggagaaataaaagcaccctctattgtaacaaaatcaagctcgaaaaacacctgaatcgccaagatcacttgatggacagtcaaatggacggccttggcaatcgccggaatatgatgcttatcgaagccgggatgtgcttttagaaaatgcagaacagcaccaaattcacttcgcgtcggcattgccactaaccgactgggtgcaccataaaacatgaccgtcaccggcagttgaatgtgctgcataaccgtcaccaattggccacgatctttaggcaagtcaaccaaaaccgcatcagccagtgacgttgtgacttgctcagctagcatggtcggcccaccaaacgaaaattgatgttcgaattgttgtttgacctttgcatcaaagaagacgtaattccgttgcgccttgaattggctcccatcaactgtcggcatccgccagtcaacgacttgaggctgcttgaccgcataatccttcagcatgagttgtaagctggtattgccttgccaggtgttctgatccagttgaacggctaatttaatagcttgagcctcagctaatgttgccgctgcagacccaaaaccaaacccgatgacattgacgccttgatcaatttgaaatctaagatgggcattttccttaccgatcggcttcacattctgaaccacttggggccgcacggaaaaagtcggttccggattaccttgtccaaatggtgctagctggcgaattaattcataatgctctagcgttaagtcgccaacttccaggcgcgcagcaatcggaagcgctggcttaggcacggtcttgagcatggttgacgcggctgcttccatttgcgcatggatggctgatagttcagcggttttagccgttaacccaactgccatatgatgcccgccaaaatgaaccattttgtctttagccggttctagcgcgttaaacaagtgatacgcttcaatcgaacggccagaacctttagccgtgacgccattatcggcaatgttcataatcaaagttggtttaccggtagcttccaccactttactggcaacgatcccaacaaccccttcatgccatcccttactggcaagcagcagcgttttggccgcttgattttccggcgtctgggccatggtgagggcctcttgggcaattttgctgaccaacccttgccgctcctgatttaacttgccgacttgttgcgccaattcggcagcgacatcctcttcaaaggtagtcaacaatgtcaccccgggattcgcatcacccattcgtcccaaagcattcagccgcggaccaatcacaaagccaaccgtggtttcattgactgtttccggtgccacgccggcttcttttaaaatggcggcgagtccgacgcgcggttgtgtttggatcattttcaaccctaactgggcaatgatccgattctcatcggttagcttaaccaaatcggcaatcgtgcctaatgctgccagatcaatgctctctagcggcggctcgccaagtaaggccgttgccactttgaaagcaacgcctgcacccgaaagatcgccaaacggatagtggccctcgggatggcggggatggacgaccgctacggcatgcggaagcgtttcaggcaactcatggtgatccgtaaccacaacatccatgccggctgcttgggcaggatcaatgacggctgcaccggcaaccccgttatcgactgtaatgaccaattgcgtgccggttttttgcaagtaggtgtaaacttccgcattgggaccatacccgtcagtaaaccgatccggaataaaaacatcaggctcggcgcccaagctttgcagtgtctccaacatgatcgagctgctggttaagccatcaacgtcatagtcaccataaatcgtaattttttgatcttgctcaattgcttccaaaatcctggcaaccgccttgtccatatcgtgtaaggcaaacggatcgtgcaaccgactaatgtccgggtgcacaaaggcctcatagtctggcttatttttaatgccacgttgccacaacaacgtcgccagaaacggcgggactgccaatgtctggctcaattgttgtgtcgttgccggatccggttgttctgcaagttgccattgatactgcgtcatatgttttcgttcctttctaaccgattcagtataccaaacaaacccgtttgaattaaccgcttgcgccaagttttcgtcaacttagcaaaaagggcagccgtttccgctaaccaacccgttcaggtcatcaaaagcgtgatataattaagttgttaacaagcccaactccagtcagcgacttcaaacaggcaagcagttaccgctgtattgccgttattagacaaagcgttaccgtgtgatcttagtccgcttgactgtgaccggtcatggtggattagctctttttcgcgataacgacttaaggaggaagtaccatggcaaaatctcaagaccaattcaatgaaaaggcgggcaagaagattacagtttccgatgaggctgtcgataaggccgccaaaaaaattgaacaggttggctatgtaaccgaaaaagacgttccggaaatgatcgatcgcgattatacgcgggcattgtcaaaaaaggtttccgctaaactgcaccaagacaaagacgatgactacttctacgaggaaccttttgattatgaaaatggccgcattgccaacatcatctgggatatggataaaattaaaacccgtgaagaagcaatgaagaccttagcaaatgaacttggcttgactgttccaaagattgtcatgcgcaaagtcgatgaacaggttttctaaagcaaattctaaaaaatcggcgctgtttatcagtgtcgattttttattttagcttgcttgtttgctagcagcagcagtctttgtgtccatgacatcaattgcctccaaaaagcacctaaccaagccaggttaatttttttagtgtgacaaccatgcagacacgtactaattatgtgataatgatgataaagaaaggacgtggaagccatggctgaccaacaagtacttgacgatttttttgcgacggcgaaagcggcattggatttacccgcggccacttacgaggatgcctatcaacttggcagtcctgaattggcagatgaacttgctgacctggttaaagcgggcaagaaaactgcgacttcaagtgggtttgagctttataccatcgagcaggacccattaccgatagccggcgtctacaacattatccttgatcgtcatgatcgaccagtggcgctgactttcacggataatgtctttgtcacgccatttgaaaaagtcgatgctgtcattgccaaacgtgaaggtgaaggctcccagtcgttagcaagttggcgccgcgcccatgaagccttcttccgccgtgaatatcaggcaaatggccttcaattcgatcccgaatcctcgatggtcgttatcgaagaatttcataccgtttatccggttgttcaaacgaggtgacaagcatgcggctcaaacaacgaacaacattagctgaaaagaaagtaaccggaaaactcgaagacattccgcatccgacactagatgccaccatctatgtcctcgtttttggtctcaccgcaattggcgggctggtctcttatggcgcatatcaactgtttaagcctgagcgccaactcgcccacaaagcaaaggacatggttcaggagcatcgcaaaaattgagccaggcaacccaatcagaaacaggcacccaagagactgactattttgtctcttgagtgcctgttttgtagcaagtggaatattcaccataaaataacaatttagatgtaaaactgcctacatttaaagctcatgttggcaagaagccgctgatgattaaaatttcactagtcaaagcttctcgatagcgctatttaccgcgactttcttcgtcgttcattttaagaatgctcataaaggcctcttgtggaacctcgacagaaccaaccgccttcatccgcttcttaccggccttttgcttctcgagtaacttgcgcttccgggtgatatcgccaccgtaacacttggccaagacgtttttacgataagctttaaccgtactacgggcgataattttattcccgatagcagcctggatcgggatttcaaactgttgccgcggaatggtagttttcaggcgcgcaacaatcgctttgccgcgttcaaaggcgaaatctttatgaacaatggtgcttaatgcatcaactggatcaccattcagtaaaatgtccattttaaccagatcactttgccgatacccgatgatctcataatcgagacttgcatagcctttggtactgctttttagatcatcaaagaaatcgtaaataatttcggacaatggcaattcgtagatgacattcacgcgatacttgtctaaataatccattgtcacaaattcgccccgtttacgttgtgacagctccataaccggtccgacataatcgttaggtaccatgattgatgctttcacataaggttcgcggatctctttaatttcacttgcatcgggcatttcagccgggttgtcgatcgttttttccgaaccatctgttaacgctacctgataatccacgctcggtgcggtcatgatcaaatcgaggccgtaatcgcgttccagccgttcctgaaccacatccatatgcaagaggcccaagaatccacaacggaacccaaaaccgagcgcttgggacgtttccggctcaaattcaagcgcagcatcgttgagttgcaacttttccaatgcctcgcgcaagtcattgaatttcgcgttatctactggaaacaggcctgaatagaccattggcgtgattttacgataccctttcagcggggctgctgccgggcggtctgccagcgtcaccgtgtcccccacgcgcgtatcctgaatcgtcttaattgaggccgtgatataaccgacatccccgaccattagaaaatcgcgtttcactgctttaggtgacatcacgccgacttcagtaacctgaaactgcttgccattgctcatcagctggatcgtatcgccgaccttaacttgtccttctttaacccgaacatcaaggacaacaccgcgataatcatcatagaccgaatcaaagatcaacgcttgcaacggcgcgttaacatcgccagaaggagccggaatgtctgagacgatgcgctcaagaatttcaggaactcccaagccggttttaccactggccaaaatggcgtcagaagcgtctaagccgatcatctcttcaatctcttctttaacaacatcaggctgggcactaggcaagtcaaccttattgatcaccggaatgatttcaaggtcgtcatcaatcgccaagtacacattagcaagcgtctgagcttcaacaccttgcgtggcatccaccacaagcaaggccccttcacaggcagcaagactgcgactaacctcataactaaaatcgacatgccccggcgtatcaatcaaatggaaaatatacgtttcgccatttttagctttatagtgcagttcgaccgcattgagcttaatcgtaatcccgcgttcccgctcaagtgccatatcgtccagaacttgcgcctgcatatcccgcttggcaatggtgtctgtcaactccagaatgcgatccgcaagcgtggatttgccatgatcaatatgggcaataattgaaaaattgcggatatgcttttgccgttccagcatttcttcatgattcatataaatagtgcctactttctaagcgatcgtttggttcttattatagcagagcgtatcggacacgggtagaagctggtatttaacgaatcaagcggttaaggcctcatgcacttgcaagcctagccgtttaagttggcatcgttataaggttcacttaaaccctgatacgtcaaaagttctcaccacattaaaaaaatcggccttaacttctaagaccgatttttcgatatttggatcaagttttgtgcaattggtagtgactaagcgtctaacctacttgccgcccttaaacgcttctttaacacggtcaaacagcgtcccgttgtgtggcgtgacatcttcaccgctagctgctgcaaattgcatcaaagcagctttttgcttttcgtttaagtgctttggcgtttgaatctcaacggtcacaatttcatcaccggtaccgttaccgcgcagacgtggagcacccttgccgcggagtcggaatttggtttgactttgcgtgccggctggaatttttaactcaaccggtccgtgaaccgtgtcaactttgatttcatcacccaaagctgcctgagcaaaacttaacggaatcgtcaggtagatctcggcgccatcacgttgatacttcttgcttggcgcgacccggaaaacgatgtacaagtccccgtatggtccgccattggtgcctgcttcgccagcttgttgcaagcgcatttgctgaccgtcttcaacgccggccggaactttgacatcaatcgtatgccgttcctgttcgtgaccagtaccatggcaggttgggcacttttctttaatttctttaccggttccaccgcagacatcacaaacttggcgggtcatcattgcgccaaatgccgtattgcgttgtacctgaatataaccgctaccatgacacttgtggcaggttaccggactggttcccggtttggcaccactaccatgacaagtatgacaaacagcttcacgatcataggaaatcttggtatcttttccaaaaatcgcttcttcaaaagtcaaatccatccgatactgtaaatcggctccttgccgcggtgcagaaggattcgcctgtgcaccaccgccagcgccgccaaagaattgactgaaaatgtcgtcaaagccgccgaaaccgccttgaccgccaccgaagtcactaaacccgccggcttgaccaccattgccgaatccctgcggaccatcagcagacccatattggtcatatgcggcacgcttttggggatcagacaggacctgataggcttcattgacttccttaaacttttgctcggcaccgggtgcgtgattaagatcgggatgatatttttttgaaagcttgcgaaacgctttacgaattgtatcatcatcggcatccctgctcacaccgagcgtctcataataatctttctgatccgccatagttcctcctcgattcagatcgtgactgaaaatgccaacttagcatagcataattcaaacaaaaagccaaaaccgcgccgcggcttcggctttttgctaatgaactgatgccttatttcttatcgtcgtcggaaacatccttgtagtcaccattaatggtgtcatcatccgacttcttgtcatcagccgtgccttgggctgcgccactcgttgcgccaccctgggcttgttgattcttttgggcattttcatacaacttaacggtcatatcctgaaccagcttgttcaagtcgtcccgcttttgcttcatgtcatcaagattgttttcctgttgcgccttcttcagtgcttcttgcgcatccttgactttcttgacatcctcttccggaaccttgccgtcaacatccttcagggtcttatctgtctggaagagtaattggtcgacatcgttcttcaaatcgacttcttctttgcgcttctcgtcggcttcagcattttcttcagcttccttcttcatgcgctcgatttcttcgtcagacaagccgctggaactcttgatcgtgatgttttgtgacttgccagtgccaaggtcctttgccgatacctgaacgatcccgttcttatcaatgtcaaacttgacttcgatttgcggaacgccacgtggtgctggcggaatgtcggttagttcaaagcgaccaagcgtcttgtcatctgccgccattggacgttcaccttgaagtacgtgaatatcgacagctggttgattgtccgcagcagttgagaatacctgactcttagaggttggaatggtggtgttgcggtcgatcagcttggtgaagacaccgcccatggtttcaatccctaatgatagcggcgtaacatccagcaaaacaacatccttcacgtcaccggaaatgacaccaccctgaacggcagcacctagcgcaaccgcttcgtctgggttgatgctgtggtccggatctttgccagtccattccttaactgcttgttgaacagcagggatccgtgttgaaccaccatttaagattactttgtcaatatctgcattcgtcaatttagcatctttcagcgcattttcaactggcaccttggtcttagcaaccaagtcggcggtcatttcgtcaaattgtgcacgggttaaagtgcgttccaagtgcaatgggccgttggggccggcagaaataaatggcaagctgatttgcgtctgggtcacaccggaaagatccttcttggctttttcggctgcatccttcaggcgttgcattgccattttgtctttagacaggtcaatgttgttatcctttttgaattcggaaacaagccagtcgatgatcttgttatcaaaatcatccccgcctaaatgagtatcgccattggttgacagcacttcgaagaccccatcacctaactgcaggatggaaacatcaaatgtcccgccgccaaggtcgtaaaccaaaatcttttcgtctttgtcacctttatccagaccataagccaaggctgacgcggttggttcgttgataatccgttgaacattcaaaccagcgatcttaccggcatccttggttgcctgacgctgactgtcgttaaagtaagccggaactgtgataaccgcatctttaaccggttcgcccagatagtcttcagaaaatttcttgatgtactgtagaatcatcgctgaaatttcttgcggggtgtattctttatcgccaaccttaaccttatagttagcttcgcccatgtgacgcttaattgacacgatggtatccgggttagtgattgcctggcgttttgccacttcaccgacttggatttcaccatctttaaatgcgacaacagatggcgtggtgcgattgccttccgggttggtgatgatttttggctgattgccttccaaaaccgcaactgcagagttggtggttcctaagtcaataccaataactttactcatatttttataccttctttatttcagattaattatttagcgacaacgaccatagcagggcgcagaacccgatccttgagataataccctttttgtagtacctgcgcgaccgtgtcagcgggatgttggtcatccgccgccacggtttgtactgcctgttgggtattcggatcgaacttgtcgccagcaccatcaatcgcagtgatgccattttccttcaaggcgcgttccagatgatcgtaaaccatctgcacaccttttttgagtgaggccgcactgtcatctttggcttcggttgcaagcgcacgctctaaattgtcaactaccggcaaaatcgccttggctaacttctggccgtcgtacttcaacattttttgctgctctttttcaaaccgcgcattcatgttttgaatctctgcagccgcgcgcaaatacttgtcttcgaatgcatcacgctcttgcttcagttgttcaccatcatgcttgctggttttcaattgctcattaagatcagcaatgctttcctgcagaatttcttcttttagcgaagtctcaggcgtgtcagcagcgtgcttggcgtctttggcggtatctgcagcagtttgctttgctttttgttctgccatggtatcctcccttttaaccacatctattcgcgcaattggttaacgttaacagatgcttgttatcatctatcattgatcaaagttggcgtaatagtccgtcaaccgtttagccagctcctctcggaaaacatccaacagtccgatcatcttggaatacggcatctgggttggccctaataaggcaatcattcccgtgccgtggtcaccgacatcataactggcggtaatcaagctgagattggccagatcaattggctttaactccggacctagacgaaccgtgaccggtgtttggcgaaccggtccgccaagcagttcggtaagatcaccgtgatcagcatcaatcaaggacataatctttttcaactcgtgaatatccgagtcgccgagatagtccattaaatttaagcgcccacccacatagaaacgctctgaagcggcggactttaagacattaccgaagatatccaggaagccttcaggactggtcagatactgcatcagcatcgacggaacatcagtctttagccgctgagcaacttgaataagcggcaaaccgaccagctgatcattgacaatgcgaatcgccttttccagctcgtcagatgagatgctttcaggaacggtgaaaacctgattttcaacattgccgttgttcgtcactaaaatcgccataacttggtgattgcccaacggtacaagtcgaaatccggtcaatttaatgttattcacttctggccctaagctgatcgccgtgtaactggtcagattggataaaatctgcgcactttgcgccacaatttcatccatcttattgtagcgttgaccgaatgcttgcttgatcgtggctagttcacggtgggaaacacgcactggctcgaccagatgatcaagatagtagcgatagccttgagtcgagggtactcgaccggaactgctatgggtcttggtgatcaaaccggcgtcttccagcgatgccatatcattgcggatcgtggcggaactgacatgaaccggcagttcctgcattaacgtcttggaaccgaccggctgcccactttcagtaaacaggcggatgatttcttttaagacgagcaattgccgtttcgtcaacattttctcacctcacctttagcactcgtttcacatgagtgctaatacactaaataatataccaagcgccgttagcaaagtcaaggtaggattgctaaaatgttccatcaacagccaactgcggttagatcttttgtcatatccgaagcatgattcatcattagaccagtggctcatcaagtaggaattgttggaaaacctcatttcccaaaaatttgccgcgattcgtcagtcggatatagccattttggcgctcgattaacccttggctttccagctccggaaccgtctcgccgtaaaccgcatcgaccgtcatatgatagcggcgataaaaacgatcttcattgacgcctgccatggtgcgtaagccaagaaacatttcttcctcaatttgctcagaaaccggtactaaatgatgggccagaaccggtaaatggtcggcatgcaacggtgccagatactgtttgatcggcccataattatgataccggtcacgaccgagatagccaaatgcgcctgccccgaagccaaaatatttatcattttgccaataaagtagattgtgccgacattgataccctgttttggcaaaattactaatttcatattgatgccgtccgtgagcttccattaagtcgatggcatcttggtacatatcagcttcaacgtcttgcgtcggcaaccgcagctttccttgacgcatgagattataaaaaatcgtcttgcgctccaggatcaatgaataggtcgagtaatgtggcaagtccaatgccaaagctttttgaaggctgttcaaaaagtcatcgcggctttgatcaggcaggcgaaaaatcaaatcaatcgataagttgtcaaacccgacttttctagcattgccgatcgctgtataaacatcttttgctcggtgaatccgaccaatgcgcttcaagacgtcatcattaaacgattgcacgccaatcgacaaccggttaaccccaaagtcgtgtaagacctgtaacttgtcggtggtcagtaagtcattgggattggcttcaaaggtaaattcaccgtgatcaaaatgaagaatatcgcgaataccttggcacaaaacggcaagctgttgcggtgtcagcgttgttggggtgccaccgccaacataaaccgtttcaattttttcttctggatgctctgccatcaccatgcgcatttctttgagcaacatggcgacataatcatcgaccggctgaccttcaataaacaccttattaaaatcgcaatagtaacaaatatgctcgcaaaacggtatgtggatatatgcgcctgccatgttaatccttcctcacccgaaaatattggcgaacggtttgttcatctgtctttaactgcgcaatcaaagcatcggcaccggcaaacttgacctcaccgcgtaagtagtggtaccaacggacttgaaccgttttaccatagatcatctggttaaaatcaagcaggttaatttcaagcgttaccgcccgatcatctccaaatgtgacattgcggccaattgaagccattcctaagtaccaagtatcatcaactttgacggtcacagcatagatgccaatacctggaagccgctgttggcccaatgtggttaaattaatcgtcgggaaaccaagcaagcggccacgcgcctcaccatgaactaccttgcctgttgtcagatagacataacctaataattcgttggcggtgtcaatatcgccacggtctaatgcatcgcgaatacgggtcgaactgatcttcttgccgtcctcagccagcttagggacactgacgacttcaaagcgaccgcgcgcatattccggcaataatgccatattggccacagcgcgtttgccatacgtatagtcaaaaccggccacaaccgcagccgcttttagcccgaccaaataatcatcaacaaatgcttgcggcgataaagcagcaaatgctggtgtaaagtggacaaaatacaatagatccacgccaaattgctgcattaaggcaattttttcttcccgggtcgataaataccgaatcgccgttttggcaacgccacggtacacgatcgccggatgcatatcaaatgtcatcacagcaagtggcagtttttttgcaagggcaactcgtttacccgcttgaatcaccgcttgatggccacgatggaccccgtcaaagaagcccagtgttaggacaatgggctgcggtggtgccgctgatgcctgcagtggcggttgaatatcaatgactttcattcaattatcactcattcttttcattcgttaaaaacatcatatcaggtcgatactgatcgtgatccaagcgataaatcgcctttaaaaccccggcataatgcaaccgaatccgtggggcttgcaatttaagcgttaaaaaccgaccatgcgtcacatcttcgtattgctccggcgtcaaatctacttgcggtaacgccgcaaatgcgatgtcaatcggttgaataacagcagacagtgtcccgatttttgcgtgttgttccagatccgcaagactcactgcctgcgcgagggtgaagccgccacttttaatccgcgtcaactgactcatcacggcagcgactcccagcgtgcggccaacatcaacggctaaagtgcgaatgtaagtcccttttgaaaccgcagcctcaaatttaaatcgctgcgttccctgctttggatcgaatattggctcactggttcgtttgaattgcttaactgtcacttgtcgttttggacgctcaacggtttcccctctccgggcatactcgtacaaccgtttgccattaactttgactgccgaaaacattggcggtatctgggtaatttcgcctgtccattgcctcaatgcttggtcaagttctgcttgcgtaatcgggttagctaaaggtgtgcgcgttaccacatcgccgtcaagatcttcggttgttgtcgcaaagccgagtgtaatttcgccggtatagacctttccactggccatcaattgtgggactgctttggttgccgcaccaatcgccagtggcaacaccccatcaacacttggatcaagcgtgcctgaatgcccgatttttttgatgtgcagaatcttgcgcgcatgatagacagcatccgcgctggtcatgccgactggtttatataacggaagaatgccgttcatgaacccggctcctttcaaattttaaaattaagagacaaccgtgcgtgacgatcgcttagccgcaatccatcagtttcacgacttcggtttggtgtacatactgtgatgatgcctggcgtgaacggcatgccgccaccccgcccagataaagatcaccactaccagaaccgaaaacagccagtcaggagtttcaacatggatcatgggaaggctcaatccaagtttgatggcaattaacccaaccaacacataagccgccgtttccagctccggaactcggtcaatgaaagtggtaatcacctgtgcaacgatccgcatcgccagaatacccaagcaacctccgatcaagacaatcaccgggttaggcgatacagctaaagcagctaaaatcgaatcaactgaaaacacaatgtccagactttcaatttgcaaaatggttccccataaaccatgcgttttgtgcttgtgagtggccgtattgcttttagggtgacgcactgcataaaaataactgccgctcatccaaacaagatacaaagctccgactgctttaatcggccaaaactgcagtaagtaagttccgagtccaatggcgatgaaccgaaacaagtacgcgccacccattccgtacattaaggctttcttacgttccgattctactttaagctgctcggtctgcgcggctagaaccaccgcattatcaaccgacaacatacattccagaagaattaaactgaaaatcgtcatcagcccgccaatcgaaaatgctgactgccaattgtgcgcggaaaaaaatggcccgtataagtcacctagaaacgcgatcgtaatccttcctttctcaatggttatcattataccgttctaaatgggaaagctaaaggtgttgagaagaaaggaagctagcaaaaagtagcctcttaaaaagaatgcggtaaattttcggattaaattcgtcaaaaaaaagaacccccatcacttgagacggggattctttaacactactattcgagattcttacggcgtacttcattaatcaactgatcaatccgcgcaccatattggacggatttgtcctgagcaaactcaatttccggtactttaaacaaccgaatacgctgcccaacctcacgccgaatcaacccgctggctttatccaaaccagtttgcgctgcttcgactttatcaggcgcatcatcgagaatgctatagaaaatggtggcatgctgcagatcaccggtcagtttgactccggtaatcgtcacgcctttaacccgcggatcattgacatctttcagcaaaatatcgtcaacttcccgttggatctgagtctcaactcgaccgatacgatgtttcatctgcactaacctcctgtgagcgtgagctggcgcgcttagaagtcggagtgtaagcggcctcagacgtgatggccgggctttggccattgcggctgaggtccttacacgcagacttctgcgccagcgaacgcgttaatgtgagcgtgagccagcccgggtagaaaccggagtgtaagcggccttgggcgtgatggccgctctttggcattgcgaccaaggtccttacacgcaggtttctgggctggcgaacgcgttaatatgagcgtgagctagcgcgcttagaagtcggagtgtaagcggcctcagacgtgatggccgctctttggccattgcggctgaggtccttacacgcagacttctgcgccagcgaacgcgttaatatgagcgtgagctggcgcgcttagaagtcgaagtgtaagcggcctcagacgtgatgaccgctctttggccattgcggctgaggttcttacacgcagacttctgcgccagcgaacgcgttaatgtgagcgtaaaccagcccactgatgaaccggcaaacgcactaaaactacttaactggcacttcttccatcgtgaaggcttcgatttcgtcaccaactttaatgtcattgtagttctcaatggttaaaccaagctcaaacccttgacgaacctgcttgacatcatccttaaaccggcgtaatgaaccaagcttgccttcatacttaacaatgccatcacgaatcaggcgaacacctgcatcacgggtaatataaccggaatcgacatagccgccgacaaccgtcccgacttttgagaccggaatcgtttcacgcacggtgacggttccaatgaccttctcttcataagtcggttccaacatacccttcatcgcagcttcaacttcttcgattgccttatagatgacactgtgcaaacgaatgtcgacatcgtcttgttctgcttgcgctttagccatcgcagtcggacgaacattgaagccgataatgatcgcgttacttgctgcagctagggtaacatcactttcgttaatcgcccctactgcctgatgaataatattcacgcgaacccctttgacttcgatcttcttaaggctgcctgccagtgcttcgacagagccttgaacatcggccttgatgatgacgtcaacttctttaagctgaccttctttcatcgtttcaaagaggttgtctaacgtaacgtgcgtcgtgttcttacgttcttcttcctgagcacgttttgcccgctcttcaccggctgcccgtgctgtccgttcatccgcaaagacgacaaacttatctgcagattgcggcacatcatttaacccagtaatctcaactggcatggatggtaaggcatccttaacgcggcggccatgatcgttggtcatagcccgaacccggccaaaggtgttcccgacaacaatcggatcccccgtatgcagcgtcccttgttgaaccagaaccgttgcgaccggacctttgcccttatccaaacgtgcttcaataacagtaccgactgcacgttgatccgggttggccttcaattcaagcacatctgcttccagcaagatcatttccaataattcatcgatattcttgccaaacttagccgagattttaacgaaaatagtgtcgccaccccagtcttcagggatgagaccatattcagtcaactgttccatcacgtgttccggattagcacccggcttatcaatcttgttgacagcaacaatgatcggagccttggccgcctgcgcatggtgaatcgcttcaatggtctgtggcattacgccgtcatcagcagcaactaccagtacaacgatatcagtaatatcggcaccgcgcgcccgcatgttggtaaaggcggcgtgcccaggggtatcgaggaacgtaatcaaacgatcgcgcaatttaacctgatacgccccgatatgctgtgtaattccgccggcttcaccttcagtcacgtgcgtatgccgcaacttgtccagtaaagtggttttaccatggtcaacgtgacccatgatggtgacaactggcggccgtggctgcaagttatcctgattcttattttcttcctcgaacactttgtccagatcggaaatatcttcgtgaaccttttctttagcatcaataccataatccgttgccagaagctcaatcgtatctttatccagactctggttttggttaaccatgacgcctaacatgaagagtttcttaattaactctgctggttcgcgatgcagaatcttacccagctcctgagcgttcatccctacttcatagttcagaacttccggtaatggccgctctttacgctgtggcatctcttttttcggttggctctgctggcgacgcttgttcttcttgttgcgccggttgctgttgcggttaaacccgttacgattcccaaagctgttgccacggccaaaattgttattcccgccgccacgccggctattacggttgtcttggctaccggcactggctggtttagctgtcgtgttggccacagccggttttgtaaagcgttgattggtttgtgcagcaggctgctcggttcgtggccgctgctcagtccgcgctggtttctgttcggtttgcggacgttgttgggcacgagtcgcttgcgggcgctgttcagtagattccgaacgtttactcgctgcagctggtttagccgtctgttgacgcttaggttgctggcgctcggattccggtttaacaaacttgccaccatttccggctaccggacgcggattgccattggcagcggtcggacgcccagcacgcggcatcgggccagtcacacgctgattgtcaaaacgccggttacgatcccgccgattacgatcgtttgagcgattactattgttattggcggagcgattgttattattgccgcggttattgttacggttaccggcattagcgtttgcagtctgctgattgctgtggttaccagccttatgcgcggtctgagtgccccgtggacgtaaaatcgttgacttacttaaaatgatttttccatcagcagttttgttagacttagcaggcttgttttcatgcttgaccggcttttcggattggttctgagcatgatcttttgcacttgccgcctttgatttggctggttttgccgctgctgatgttgcaggtgccttagctgcggcagacttgcccagcacccctttgatcttagcttcctgatcctgatcgatcgaggacatatggttttttacttcgatacccaaattcttggcaatatcgagcacgtctttattatcaacgtgcatttctttggcaaattcataaacgcgttttttgcccatttcttcacgctccctgcaatttaggtgagcagctcttgcatcttcttagcgaagcctgcatcggttacggcaatcatcgcgcgatcactgccgatggcttgcgataagtccattttggaaaacattgtgaccaaaggaacttgatagtagctgcttttatcggaaaacttcttgcgggtattggcacttgcatcactggcaacaaagaccagttttgcctcgcctgagcgaatcgcacttaacaccaactgatccccagtggtgagacgactagcgcggcgggccaatcccaataaattcaatacggcttgtttttgcatggttacttgccgaataattcttgacgtgccttttgatgatctacataagcaaaaaggtcatcataaaaggccggatcaatcgtaatgccaaacgcggcgtcaatcaattttttaccttttgcccgtttaaccgcatcaggatcaagcgctacatacgcgcctcgtcctgcagctttaccggtaggatcgattgcgaccacatcttccttgttcttaacgattcggacaagttctttttttggcatcatcgtgttgctcagcaagtccttgcgcattggtatcttacgctttttcatggctcgcctccttatgcctgtggctggtcgtgggtgcttggcgtcacaggggtttcatcggcttcatcatttgcctgatcaacctcagcactatcgctaggtgcttgactggcgttgtcctggtcatctgctgctgcggctgcggctgcctcaacctctgcttcggataattcatcatcgtcaacgaattcgacttctgattccggcttgatgtcgatcttgtaaccggtcaacttcgctgcaaggcgcgcattttggccttttttaccaattgccagtgacagttgataatcaggaacaatgactgtcgccgaacgatcgttgtcttcatcattaaactgaaccgcgatcacttgtgccggatttaaggcattagcgatgtaatcagccggatcttcttcccactgtaccacatccatattctcgccagaaagctcattgaccactgcctgtacccgtgcacctcgcggacccactgttgtaccgacagcatcaaccgcatcgttggttgcccgcaccgcgatcttcgtccgatcaccggcttcacgcgcaatgttgacaatttccaccgtgccatcgaaaatttccggaacttcctgttcaaacaggcgctttactaaaccaggatgggtccgactcacaaacacttgcgggcctttgctggtattttcgactttggtgacataaaccttaatgcgatcgtgagcttcatacttttcatttggcatctgatcttgacggcctaataccgcttcgatcttgcctaagttgacgtagatgaaccgattgtcccgacgctcaacgacaccttgaagaatctcatcttcgtactgtgagtattcgtcataaacgatactgcgttcagcttcacgcactcgttgcataatgacttgttttgcggtctgggcagcaatacggccgaagtctttgggcgtcacttcaaacttgatttgatcgccgatttcataagctttattgatcgccaaggcgtctttgagactgacttccagacgcgaatcaaaaacttcatccgtcacttctttgaccgcataaacatgaatgtcgccttgtttaggatcaaatttcacatcgacattttgggcctggttgtaattacgcttataagcagaaaccagtgcggcttccaaggcttcaatcacaacctctttcttaacccccttttcttgctcaagggcatcaagtgcttggatcatttcctttgacatgcttttcttacctccactaaaactcgatcgccaaccgtgcagaagcgatcaattttcggtcaatgacctgatcgaacttgcggcttttatctttgaccgttaatgtcagctggtcaggcttcaaatctttcaaagtaccttcgaaaactttcttaccatccagcttcttaaataacgagacatgaatgtagtcgccgattgcctgttcataatcggtctcgcgttttaacggccgttcagctccaggactggagacctcaaggaaatattgttgcggaatgggatccggattgatagcgtccaattgctcggacaacgcttcgctaaccagcacacattcatctaatgtaatgccgcctggcttgtcaatatacacccgcagataccagccgccgccttccttcacaaattcgacatccgtgaggtaaaaatgatggtcgtccaaaatcggtttaaccaaagcggtcacggtttcaacaaccgattgcgtactcaagccaccgcctcctttattgttcattcaagactatagattctgacggcacgctaaacggacgccagaaatgacgttcgccaataaaaagagtgagcatcgctgctcactcaccgccagaaccttactttactattgttacaataccatagataggcaccacttgcaaacaagcaggtcagtgtggtaataggcttaccggccatttaatatctctgcacgataagcatcaagcaaaaacatttctgtggccgaattaaaataagccatcaaaaagtgataattggttttcatctggaagatcatctaaaacatggttggtcgtcatgtaatcaatcaaagttttagaaacctttccgcgattagccaggtcttcttttgataagaatggtttttcttcacgggcagcgacaatctgcttggcaacgttatcgcccaaaccaggaaccgcacggaatggcgctagaatggtgtgatcatcctgaatcaggaaatcatgggaatctgacttggtgacatcaatcattttgatcttaaagccacgttccaggcattcgttagcaatttccaaaacggttaacaattgcttttctttagcggaagcatccatgcccttgtccgtaatctccttcattgcggctttaacggcttctttgccgtgactcatggcagctaaatcaaaatcttcggcccgcacggaaaagtaagcagtgtaatacaccagcggataatggaccttgaaccaggcgatccgcaatgccatcagaatatacgccgtcgcatgggctttagggaacatgtatttaatcttcaggcaggaatcaatataccaatccggcacattttcattttcgcgcatcgctttttgccagtcatccgggataccccggcctttacgaacgtgttccatgatattaaacgccatggaatcgtccatcccccagtgaatcaagtccatcatgatgttatcacgacaaccgatgacttccttcaaggtgacaatgccttgcttgattaactcttccgcattgcctaaccacacatccgtcccgtgagacaatccggaaatctgtaataattcgctgaaggtcgttggcttggtttcttcaagcatgccgcggacaaaacgggtcccaaattcgggaatgccaagcgtgcccattttggaattgatttgttcaggcgtcacacctaaactctcggttccggaaaaaagcgccatgactccgggatcgtcagttggaattgatttcggctcaacccctgacaagtcctgcaacatacgaatcatcgttgggtcatcatggcccagtacatccattttcaaaatattgtcgtgaattgaatggaaatcaaagtgggtggtcatccaagcagcattttgatcatccgccgggtattgaatcggtgtgaaatcataaatatccatatctgccgggacaatcaagatccccgccggatgctgaccagtggtacgtttaacgccagtatcgccttgtgccagtcgatcaatttcagcaccgcgcaactgttgaccggtgtcgcgctcgtaagctttcacataaccataagcggttttatcggccaccgttccaattgtcccggcacggaaactatgatcttcgccgaacatcactttgatatagttatgcgccacaggctgatagtcaccggaaaagttcaagtcaatatccggcaccttatcgccgtggaagcctaagaacgtctcaaatggaatgtcatggccgtctttatgcagctcggttccacatttcgggcaggtcttatccggaagatcaaagcccgatccgacttcgccatgcgtaaagaattcactgtactggcatttcggacaccgataatgtggcggcaatgggttcacctcggtaatctcggccatcgtcgcagctaaactcgaaccaaccgaccctcgggaaccaaccaagtacccgtctttgttcgactttaataccagccgttgcgcaatgttataaatgactgagaatccattcccgataatacttttaagttctttatccaagcgttgtgcgacgatttctggcaacggattgccgtaaagctcataggccgtcgccatcacatcatgtttgagcttttcttccaccccgggcacttccggcgtgtaaagcttatctttaaccggtgtgatatcatcatcaatcaagtcggcaattaaattcgagttggtgacgaccagtttctgcgccttttctgcgcctaaccagctaaaatcatccagcatttcccgggttgagcgaaaatgaacatcaggcagactatgacgattaagcggattggccccaccttgactgtgaatgagaatctttcgataaatcgcatcgtgttgatccagataatgaacatcaccggtaacgacaaccggtttctctagatcatcaccgattttgacaattttttgcaaaatatcttttaaatgcgactcgcctttaataagatcggcttctagtaatggctggtaaacggctggcggttgaatttcgagataatcataaaatgctgccttggcgcgcgcttcagcctcacccttttgcatcatagcggtgaaaacttcgccgcttgagcaagccgaaccgacgagcaaaccttctcgcaatttctgcaactgactgcgtggtactcgcggcacccgatagaagtatttgacatttgacaaggacaccagcttgaaaagattcttcaagccggcttgcgttttggcaaatacaatcgcatgactcgggcgggcagccttataagcctcaccggcacccacgcgatcatttaattggttgagtttggtcatgttgtacatcttagcagcttctttttccaaggcgtatagcaaataaccggtcgcctcagcatccgcgttggcgcggtgatggtgttccaggctaactttgtattgcttagccaaggtatccagtttgtgatttttgcgttcgggatggagcatgcgcgataactcaagcgtatcaatgaccggattatcaatatcagccagcccgtgccgctcataaccattatccaagaagcccacatcaaacgtgacattatgtccgaccatgatcgcaccgtcacagaactgctggaaaagccgaaacacttcttcttcagacttggaaccgtgaaccatgtcgtcggtgatatgcgtgaggttaatggttaattctgacagcggaaaaccgggatcgatcatttcttcaaactgatcaatcacctgaccgtctttcattttaacggcagctaactcgatgaccttatcgtagactgctgaaagaccggttgtttccacgtcaaaaacaacatattccgcgtctgccaacacgcgcggctcttcagctcgataagcgactggggtcccatcatcgactaaattgatttcgacaccgtatagcatttttaaaccagctttatcagcagcagtatgggcttctggataagcttgcagcccagcatgatcggttacagcgatcgccttgtgtccccaagctttagcgcggttcacgaaatcggtaattgagttggtcgcatccatctggctcatgtttgtatgcagatgcagctcaacccgtttttcgccttcaacgtcatcggttggatcaggatgggaaacggtttgaatatcttgtgcattgatcgtgagttcgcgcgaatagttgtcctcttgcacactgccgcgtacacgcaaccactggccttttttaatgcgggcaaacatcgcctcatcgtcagcaccattgctgaatttcttggcaataaaactggagctgtaatcggttattttgaaaatcagtaattgccgtttcgagcgtaattcccgtacttcgacatcaaacacatagccttcaacggtcactgaacgttcttcttgggtaatcgtgaccatttgctgcggcggatcactcattttcaactgccgacccatttgaaccgggccattcgtaggctcttgcttttgcttagccgcttgccgcttcaccacttcagcagctgcttgggccatcttcgccgtttgcgctgctttttgcgcttcaaatgccgccacagactgcgccgcttgctcttcgtctacttgggcctgcatccgtaatccggaaaagccaacttgctgataggtttcttcaagtttgcctaatccttgattaaccaggtattgccgaatttgttcattttccgctgttatcaccgcgcgattattcaccagcgtcggtacctgtttttcgcacagttcacgaacgatcccagtaccgatttctgaattttgcaccacatattgccaatattgcgccaatagttcgtcagtaatcgtcggctgagcaaccgcaatggtcaatcgcgtcgccgcaatttgcttgaacgcaattggcagttgcgtggcgacggtattaaaaatctgaaatggcaaaatcgtcggaaacgccaaggtgaagtcatagcgttgtgactgctcatgaatcgtgacttcctgaaccgacccatctgccagtgatggatcatgtcgcacatctgctggtaaatcgagctgatccattaatttttcaaacatctcatgttgggataaagccaaatcgtgcacccctcttagatggcagaaactgggacaaaatgctgccaactcttcagaccacaaactcgcagccaaaaagaggatgggattagcaattttgccccagcgccttagttatcaattatgcttttgcctgttcttgtttatgcaactgggccatgaggatcttgatcgaactgatcaactcttctttcttgacttcaatggtttcgccagtcttacgtaacttaagctcaacaatctcatcgaccgcttttttaccaaccgtcacgcgcaacggaatcccgattaaatcggaatcggcaaatttcacacccggccgttcgttacggtcatccaccagcacactgtagccggcatcttcaagcatcgtgccaatcgcagcagtcagcgtcttttgttcctcacgcttcagattaaccggaatcagatgaatgtcaaaaggagcgatcgtggtcggccaaatcaagccgtgatcgtctgcctgctgttcagcaattgccgaaagcagtcgcgatacgccaataccatatgatcccatgataatcggctgactacggccattttcatcaaggaaatctgcgcccatggtttcagaataacgggtaccgagtttgaaaatatggccaatttcgatcccgcgcgtaaacttaagcacaccctggccatccggtgacacttcgccttccttaacaaaacgaatatcggcaaaagtttccggattcacatcgcgctcaaagttcacgttcagtaaatgtgtgtgcgctttattggcacctgccaccaaattcgtcaagccgctcagactattatccgcaataatccgcacatctttatcgacgtttaccgggccgatattaccgacttctgcgtgcatgaccgattcaacctgttcaggagtcgccatttcgaggaagtcagcgcctaagatgttcttaagcttggtatcattgatttcataatcaccacgcaccagtgccagcaccggagcaccatctgccataaataaaacggctttaattaacttttgttccggaattttcaacaaagcagcaacttcagcgatcgtttttgcatctttggtatccaccggggttaattccgcttgggcttcaacgccttgcttcggcagcgccatgcttgtcgccatctctaagttagcggcatagtcggaactatcggaataaacaatggtatcttcaccaattgacgcaatagcggaaaattctttcgagtcttttccgcccatcgcgccgccatcaccgataatcgtccgataacgcaggcctagacgatcaaaaatattggtgtaggcatgttccatttgccgataaatggtattgagatcctgatcattactggtaaatgaataagcatcctgcataatgaactcacgcccacgtaaaacaccatagcgtggccgatcttcatcacggaatttatcctggatttgatacaacactaacggcatccgcttgtaagatttcaattcattgcgaaccagatccgtaaaggtttcttcatgagtagggcccaagatcattttacgatcctgacgatttttcaacttaaataaattgggtccgtaagtttcataccgtccggattcttcccagagctcggctggcaataacgccggcatcttcatcttaaccgcatcaatcttcgtcatttcatcgtcaatgatcgcttcgattcgactcaagacgcgttctgctagtggtaaataggcataaacaccggcttgcacctgacgcacaaagccagagcgcaacatcattttatatgacttcgcctctgctgaactgggtacttctttttctgtaggaataaacatccgtgattgtttcatgtcagcctccaaagctagattatttaaaagtaacgcataatatcattaatcgtcacggcgagcatcaggagcaccatcaacccgaggccaaccatggtgacaacaccttctgtttcaggcttcaagggtttgcgccgaatcagttcaatgagattcagtaaaattttaccaccatccagaaccgggattggcaacaaattgctgattcccaagccgagacttaagtatcccataaagaatagcaatccctgcaatccgcctttagcactttgactggtcatagtataaattccgaccggcccggctagcttattaagcgaaaagccgccagttaccatggatttgaggacatcccaagtgcgcacagctaaatcccaggtttgggtgaaaccatacgtaaacgcccgtgccggtgatttttcgatgagtgcttccacgccgatcttgccatccttgttaggcttgatgaccacattttgcgttttgccatgctctttaactgtaaacgtcaccgacttaccggcctgtttgctgactttgctggaaagatcagtaaaagaatggattttttcaccatcaatcgcctgaattgtggcattggacttaagcccggcttgagcagcaggataaccgggcagtaccgttccgatttgattggtatttaagacctgcacgccaaacatcaaaccgtaaataataaaggtcaaaatggcaagaataaaattattcatcggaccggcaaagttaacaattagacgccgccaaaccggggcattttgaaattggacatcttctggcgcaatttgaacttcggtgccatcttcttcaataatcgtggcatcatggtcaaccgaccaacgctccagtttctcttcgtcgccattagggtagccttcaatcaccaagtctttaacgaggtctacgcggcttacttgtaccggcatgccacctgccagcgtcgttttatcactggcattaatccgcgtcactttaccggcatcattcaggataatactcagcatggtcccgggcttgatttcatcttcctcatcttgccagccagccatacgtacatatccgcccagtggcaacaagcgcaaggtataggtcgtattattcttatgtgacgcccatagcttaggccccatgccaatcgaaaactcacgtactaatattccgctgcgcttggcaaaataaaaatggccaaactcgtgaaccaccacaagaatgcagaagataacaataaaggcaatgattgtggtcatatgtgctccttaatggtcagacaatgccaaacaaatgcagcattggcaataccagtagtaaactgtcaaaccgatctaaaataccgccgtgccctggcagaattttaccggaatccttaaccccgtaaaatcgcttcaaagcggattcgattaggtcaccgatttggccgataaccgacaggcacaaggcgatccccatcattggccaaaaagtataatattgcgggaagaacattaagtaaatcgcagccgttactaaggcaagtacaaccccaccgacactgccttcgatggttttgttcgggctgatcgccggccacaatttatggcggccaagtttgcgaccgatcatataggcaccggtatccgtcaaccagacaatcagcagcgcaaacatcaacgtatccagccccgcatcgttgcgcacactgatcaaataatgaaaccctgtaccgatataaaagaatgacaacaccgatacaccaatatcatcaaacgtcgtgcgattcttggttgtcacggttatacaaagcaacaaagcaaccgcaatgtaaatcagatcaatccgccctaaaaaggcaggcagccaacggaaaaagctattcggcaaaaccaccgccaagataccaagcgatgcaatcagaaaatctggcgaaagaatgatgcgcttccgcatgatatacacttctgataacgcaattagcgctaagactgctccggctgtatcgatccaaccgccaccggcaattagaattggaataaaaattgccaaagcaacgacagccgttatgacccgttgtttcatgataacaaatcctccatcaccatttatttagttgattatttttttaaaccgccaaaacgccggtctctagcctgataggttgcgatcgccgcctccaatgcagcaggcgagaaatccggccaataatcatcgacaaacaccagctcactataagcgatctgccagagcaaaaagttggaaatccgtaactcaccacttgtacgaatcaataaatccggatcggctaaatcaccaaggaaccccgtcatcagtgcatcagaaaagcgctgatcatcaatatcttcaggatctaattgaccatcacgcaccgcgcttgccagttttcgggcagcgtgaaccagttcgtcacgaccaccataattcagcgcaaagttaagaatcatgccggtgttgttggccgtatccgccatagctttttcactcgccttgcgtgtcggctcaggtaagtcggttaactcacccataacttcaactttaacattttctttgattaaatcaggcataaaatcgttaaaaaagtcaaccggtaagcgcatgaggtaattcacctcagaaccggggcgcttccaattttcagttgaaaaagcatacaaagtcaaaactttaaccccgagacgacttgctgccttggtaatcgttttaacattttgcatgccttgtttgtgtccggcaacccgcggcaacaaccgccgctttgcccaccgaccgttaccgtccatgataatcgcaatatgcgcgggaatccgtgccggatcaagtttcactttcgaacccttggctatggccaaactggcgcctcctcacaacgtctacggtgcctcatgcaccaaatgtctttaacgattgtagcagaaaaaaaggcagagcgcgaataggcgcggttagaaaccagagtgtaagcggcctaaaagtgaaatgaccgggctttggtcattttgctttaaggtccttacacgcaggtttctgcgcctattcgcgcgttttaaaaccgaggccaagcgcagttagaagtgaagttgcaaaactaatgcaaccatctaacaggacgacttttaccactagtttcatttgatcgcatgactgcatggtgccaaaaagtttattaaaccagaaaaaccccagatatactctgaggttttcattcaccaactaaaataccacgctaaacttcggtaatttccttttccttagctgcagcaatttcatcgatgcgtttggttgcatcgtcagtggctttttgcatatctttttcaagtcgatgcaattcgtcttcggtgatgtcaccgtctttttcctgtcgctttaacttatcaagtccttcacggcggatattacgaattgcgattttggcgttttcagagaacttgccgacttctttggcaatttccttacgccgttcacccgtcagctgaggaatgaccaaacgaatcacatcgccgtcattggcagggttaatgccaagatcactggcgttgatagccgtttcgatgttcttaagtgatgatttgtcatatggactaatctgcaaaacacgtgcttccggaaccgtgattgccgccatttggttcaatggcgttggcgcaccataataatcgaccgtaatctgattaagcaagctggcattagcacggcctgcacggatgttgcctagttcacgctgtaatgattcttcggttttacccatattgacttttgcttgttcaataatttgatttgccattagcttctcccttcgattgtggtgccgattttttgaccttccacaacccgtttgatattgccgggctcgtttaagttaaagacaactaagtcgatatcgttgtccattgacaaggtgctggcagtcgagtccatgacttttagatccttgttgatgatgtccatgtgtgtcagactctcatatttgacagcattggtgtccttgtttggatcggctgaataaacgccgtcaacgttattctttgccatcaggataacttcagcgccgatttctgctgcccgtaacgctgcagtcgtgtcagtgctgaagtatgggttaccggtgccgccagcgaaaataacgacgcgccctttctccagatggcgaatggctttacgccgaatataaggttcggcgatttgccgcatctcaattgacgtctgaacccgagtcggtacaccttggctctccaggttatcttgcaaagccaacgcattcattaccgtagccagcatccccatatagtcggcttgggcgcgttccattcccatctcggcgttggtttcaccgcgccagatgttgccgccaccgcacacaatggcaatttgtacacccagttcgtgcacctctttgatctgttgggcaattttggcaatgactggtggcttaatgccaaacccagcctcacctgccaatgcctcaccgctgatctttaaaatgatccgtttatatttgaccatgtatcttatacctccgttggttgctggcactattttaccatagtcgcagagtttctgcggcaagaagctgttgctagccgctaagttttaccggcaattcggctgaacatcaaaaacattcatagactgtcactgtcaactttttctcagttttactctataggtaaattctaatattctgagctggctattcgtcctcacataacgcgctcccccgacgcagaagtctgcgtgtaaggaccctcagttgcaatggccaaagcccagccatcacgcctgaggccgcttacactccgacttctaaccacgccggctcgcgctcagcaaaaaaaagacgctgccacagagacagtgcccttttcttgtcattaacctttgatctggtccatgacttcatctgcgaagttttcttgtttcttttcaatgccttcgccgacttcataacgaacgtagcctttaaccttgccgcctttagccgcaacgtacttggcaactgtctgatccggatccttaacgaattcctgatcaaccagtgagatttcactcaaccacttgttaacgcgaccttcaacgatccgcggaacaattttttccggcttgccttcgtttttggtttcttcagtgaaaatatcggtctgatgttgcaattcatcagccggcactttactacgatccaaatattcaggattgatcgcagcaacatgcatagcaacgtctttggcagtggcatcatcggcgccatccaaaaccgtcagcgctgcaatttggccgccattatgcaagtaagcaccaaaatgttcattgtcggtcttggtcacaatctggaagcgtcgcaagctgatcttttcaccaataacactggtcaaggcgatggcaccttcatcaatggtctggccgtcgctcatcttggtggccttggcagcatcaagatcagctggcttattagcagcaatcgcagcagctaccttgttaacatagtctttgaattgatcgtttgaagcaacaaaatcggtctcagagttaacttcaacaattgcggcagtattgccgtcaactgcgatttccgctaagccttcagcggcgatgttgccactcttcttagccgcttttgccaagcctttttcacgtaagacatcaattgccttatccatatcgccatcagctgcaaccaatgccttcttagcatccatcatgccgacttgggtacgatcacgtaattctttaacttgtgcagcagtaatttgagccatggatctgatcctccttgattgtaaaaaagctgcctgcagatcttgcagtatgcgaaaccctcagacagcttaatgtttaattaattagttagcgcgcttgttgtcgccttcgacagcttccacgatatcttccatggaatcagccttcttgtcggcagcaggttgttgttcctgatcatcttcttgatcttcgccttggttaccttcaataatcgcatctgccatcttggaagtaatcaaacgaacggcacgaatcgcgtcatcgtttgaagggataatcacgtcaatgtcatcaggatcggtgttggtatcaaccatcgcaacgatcggaatgttcagcttttgggcttcctgaacggcaatcttttctttgcgtgggtcaacaatgaacaatacgtcaggaatccgtggcatatcttcaatcccgccaaggaacttctcaagcttgtcttgttgcttcttcagaagagaaacttctttcttaggaaggacatcaaaagtgccatcggttgccatcttcttgatgtctttaagccgcttgattcgagtctgaatcgtgttccagttggtcaaagtgccgccaagccagcgatggttgacgtaaaattggccggcacgggttgcttcttcggcaatcgcatcctgagcctgtttcttggtcccaacgaacaggaaaaccccgccgttttgtgcttcttctttaacgaaattgtaagcatcgtcaatcatcttaacggtcttttgcagatcgatgatgtagataccgtttctttccgtaaagatatatggcttcatcttagggttccaacgacgggtttgatgcccgaaatgtacaccagcttcaagaagctgtttcatgcttaatactgccatgtgtttgttcctccatttggttttattcctcttgacgacgtcgcctcgcagatggacttcaacagaagcaccccactcacgatcagtcagtcaatgtggtttgtgcataccgcactcgataaagtataccgacttttcatcactttgacaagccctgccacttgacatgatgcgccgacaaaaaaagttctttacgacggcggctctgatgtttaaaatgccattccgccgacagcgcttcgtgtttgtccgcaaacgcttcatgatacagtaagcgcacggggcggcgagaagctgtatacttggcccctttgccagcgttatgtgttgccacccgggctgccacgtcatccgtaaacccgccataaaacgtcccatccgcacatagtaaaacataaaagtaatacggtttagtcgccatgtaacagcctcctgacaaacggcgtataaccgccatcagcttcatgaacaatcagcggtggcataatccgcaaaccatccggacgaccggctttaatcgcagcaatcaagaccatattggcttcccggtcttcacgcggatgaatgaattgcagctgtttaggtgccaacccgaccgcggtcagcgttgccaatagctcagccagccgatccggacgatgcacaaagtaggctttcccttgatatttcaacaaatcagcgcttactctcgccaccgttgcaaaatctgtcgtcaactcatggcgcgcgatggccagatgatcattaggattcgttatactccgagcactgatcttgaaatatggcggattacaggtcactacatccactgaatccttggccacaaacttggtagtgtccgccaaatcaccttcgtggacgtcaacattagccaatgcattcaatgccacactgcgacgcgccatgtcggccagccgcggctgcaactcaaccatggtcacgcggttatccgttttacgcgccaagaaaagccctaccgcaccattgccggcagccaagtcaaccacccgactgtgccgtttaatctgggcaaaatttgccaacagcaccgcatccaatgaaaaagaaaaaacggccccgctttgaataattttaatgtgccgactagcaagcacatcaacccgctcaccaggcaataatgacatctccaacacctttttcctaaaaagctaaaattcggcaaacagccttccgtgaatcgcgataacagatgaaatcatagcacacaaaaaccgccactagctacagcttttcagtctggtggttcgcgctccattataaaacgggaggaagccaatgctaaccgattaatggtataatctacatcaaaagtttaaccacgaaggaagaataagccatgttttatagttttctgcgttacgtcgttgccgggttaatctggctcataaacggacactctcaaacccaggagaaacaggaattgccggatgggccgtttgttctggtcgcgccacatcgttcctggctcgatccggttttcctcgcactagccgcttggccgcaccatttttcatttatggctaaaagtgaactgtttaaaaatccattgctccgctggctgttggtgaaagtcggggcctttccggttgatcgggcgcatcccgggccgagtgcgatcaaggttccggttcgcgcactgaaacaggaaggcaaagcgttgatgatctttccaaccggttcgcgttattcggcagatatgaaaggcggcgcaattttaatcgccaaactggcaaaggcaccgattgttccagcagtttatcaaggtcccgggacgttttggtctctgtttaaacgcaaaccgattatcgttcggttcggcaaacctgttgatccgccaaaaggaaggctgactgatgaagcgcttgctgctttcagcgacgagctacaggaaaattttgctgctttggatcatgcgattaatccccattacaaatacgttcctgataagaaaaagtatctagaagaaaaagaacacggagaagtataaggttcgcttgtcgagcctttttcctttgttaccaaataaaagaaagcgagtaagttaatgaagctttggaaacaaatgacccgcaaaccggatttgcaagctgctcttaaagccgatgacttgttgacccgcagcctgacaacccgcgatttgattgcacttggcattggcgccgttattagtaccggtatttttattttacccggcaccgtggccgcaaccaccagtggcccggcaatcacgattgcctttattttggccgccatcgtatgctcactggctgccatgtgttatgccgaatttgcttcggcgctgcctgttgcaggttcggcttatgcatatggcaatattgtgtttggtcaggtattcggctggattatcggctgggcattgattcttgaatatatgttggcagtagctgctgtctcgactagtttctcagcttattttgccagtttgctttccggatttcacatcacgctgccgactgctattgctggtccattttcacctagtcacggtacgtacattaatctcattgcggtgatcgttgttttgctgattggcatgatgctctcgcgcggcatgcagtcatcaatggcgattaaccggttaatggtactggtcaaattgcttatcatcctaattttcgttgtcgttgggttcttttatgtgcagcccgccaattggcacccttatatgccgttcggggcaaaaggggttcttgccggagcggccttggttttctttgcttatctcggctttgatgcggtatcggcctcggcacctgaggttaaacagccgcagaaaacgttaccccgtggcatcatcggcaccttaatcatcgcgacaattttgtatgttttggtcgccattgtcttgacaggcatggtgccgtttaccaaactggacgtagccgatccagttgcctttgcgctcggcgttgttcatctacgcggtctcggcgggttcatttcggtaggcgcgctggctggcatgttcactatgatggtcaccatgatttatagctcatcccgcctgatttatgcgatcgggcgtgacggcttgttgccacgctggttcggccatgtcagtgggcatttaccggaaaatgcgctgtggacagtggttacggtgattgctttgatgggtggtttggtgccgctaaatcagcttgtcaacttagttaatattggaacgttaattgcctttgcgtttgtttcaatcggcatcatcccccttcgtcgccacgaagccattaacaatcagggctttcaggttcccggctatccggtgacgccaattgtctcatttctcttttgcctgttgctgatgacccaactaagcgccgagacgtggctgatgagtctggcttggtttgcgtttggattagtcatctatttcagctacggcattcgtcacggtcacgtgtctgaagccaaaatccggtaaacgttaaagaaaggataatgaacagtggtcaataatcaaacggcaacctgccttgttgatggtcaagtttacgcgatcagtgatggccttttcttaagcgatcttgaaaccaaactggtcaatatcattaaaaacgactatccgcgcgcgaccaaaaacagcttcatttgcaatgcgcacctattaaattaccgccttgagcgcatgcgccggcaacaacgacaggatgaacgggcgcatgaaaagattaatcgtaaaatgtcgcaagctttggttaaagatgattttcagctgactgatgtttacgacaatatggagtccacgatcacatttggcgaacggattgccgatgcggttgccaaatatgccggttcatggccattcatcattatcttttccagttttatgattgtctggatgattctcaatacagtcgggattttcggtaaacggtttgatccgttcccgtttattctgttaaacttatttttgagtatggtcgcggccttacaagcaccgttaatcatgatgagccaaaatcgggcagcagagtatgatcgcctggaagccaaaaacgattaccatgtgaatcttaagtccgaagaagaaattcgtctgttgcattcaaaattggatcatatcattgctgacgataatcctaatctgttcgaaagccagcgcctaaccgtcgaagtgttaggcgaaatggtcaatcagcttagcgaaacgcggcagcagctggccttacttaaagccagccaagacgaggcaaaccgtacgcaacttgacacgaagataaaaaaatagaacatccgctactttttgcaaaagccaaaaagtagcggatgttcttttatatctaagctgccattaccgcgatgcttcctcaccctcgccaacttgcaggtgatacatttcgtaataccgcccatgctgtgcaagtagcgattcatgtgtgccgcgctcgacaatgcgaccggcatctaagaccaaaatcaaattggcatcctgaatcgtggacaatcggtgggcaatggcgatggtggtacgaccttgacgaatccgccgcagcccttcctggatcacggattcggtttcggtatcaatgtttgccgttgcttcatcaagcaccagaattttaggatcggtgaccactgtgcgggcaaatgaaatcagttggcgctcaccactcgagaattcacttccgccttcaataacccgcgcgtgataagtgtcgggcaatttattgatgaagcgatcagcctgtacaaattccgccgctgctttgacttgatgatcggtaatctgatcattaaataggcgaatgttgctgctgatatcgccgtaaaacataaacgaatcctgcaagactaagccgagctttttgcgcaactccggcatcggataatcgcgaatatctacatcgtcaatcaaaatctgtccttgaccaaactcgtaaaaacgcatcatcacattgataatcgagcttttcccggaaccggtatgaccgactaacgccaccgtttcgccaggattggccacaaagctaatatcgtgcaagatgtcatgttcaccatcataggcaaaactgacatggcgaaattcgattttgccttgctgaatgacggcatgtgcatccggatgttgtgcgggcgcgtattccttgctatcaagaatccggaaaatgcgactgccggcaacaacgccatcctgcagaaacgacaggttatccatcatgttaaccatgggattgaagaaattggcagtgtaagtggtgaacgcatacaccaagccggcctcgacatagctatgcatggaaatcaggccaaatgcccacaaaaccgcaatcagcgctagtgaatataaaaggttaatcaccgaggacagcaacagcgagtttacgcggatcatcgctttgcgagcatcgagatactcctgattcgttgcttcaaattcccgactaatgcgattctcctgccgaaattgctgaataatcgcaatgccttcaatcgattcattcagttgggtattcagctcagacaatttttcacgcatgtggcggtataccttggaactataagtgctgtaataccagaccactactaacagaatcggtaagaacgccgcaaccaacaaggcaattttaggattagccgcaaacataatcgcaaagctgctgatgaccgagaataacccgacaatgacggccaaaatcacattccaaaagtcggaaaaagtcatggtatcgttggtaacccgtgatacgatcgagccagccggcgtttgatcgaaataacgcatccccaatgtgtgcaatttagcaaacagttgccggcgcgcatcttccagtccacgttcagcgcccatgttgaacaagaaggtttggaagaactgaaatacggccttaaccagagtaccaaatgcataaagcaccgcaaacagcagcagaatctgaaccgttgcactttgatttgccaaataacgatccatgaaaacctgcagaatctttggcaacagaacattcatccctgccagtaacgcggctgcgacaattgcgccgataaattgacgcttatacggccgcgtataacccatcaaccgccgcataatttttagctgttgccgaaccggaatgctttttgaccaagcgctttcgtatcctttacttgccacgcatttcaccttcttccgctgcttccatttcctgcttagcccacatttccgcataccagccatgcttggctaataactgtgcatgagtgccgcgttcgatcacttggccattttccaacacaataatttcgtcagcatgcatcacggagctcaagcggtgagctgcaatgatcgtggttttgtgcgcccggtcacgtttcatgttggcgaggatctcttcttcggttttggcatcgaccgccgacagcgcatcatccaaaatcaacaattcaggtgcattaatgaccgcccgtgcaattgccaaccgctgcttttgcccgccggataaactgacccctttttctccgaccagcgtttcatagccggctgtaaatttctgaatatcatcgtgcacggcactttccttggccgccttttccacttccggctgccccttttcaaacgccgaaaagcggatgttgtccgcgaccgtggttgaaaaaagaaaattatcctgcggtacgtacccaattgaatccagcaatgcatccagcgagtaatctttgatgttgtgaccgccaaactcgatgaagccgtcatagttatcgaattcccgcaacaaaagcttaaaaatcgtgcttttaccggcaccgactttacccacaatgcccagcgtattgccttctaataaggtaaaatgcacgcggctcaaggccacttgctgatcattagggtagctgaatttgttaatctgataccgaatatcaccatgcgccggtgtcgtaatggcatctttggcttccaaaatcgtggaacgttctttaagcaagtcgtccacgcgatcatagctggcattaccacgttcaagaatattaaatagtcggccaattgcaaacatcggccacaccagagcggaaacgtacgtcacaaacgaaaccaactgcccgatcgaaatttggctgtgcaccacttgccaaccgccataaataatcgtaatcacgtaagtcagtcccatgatcaaactggtcgtcggatcaaataacgcatcaataaagttaacccgccgattaatctgaaccgtatgatcgacaatgcgattgaaatcagccgtgtcctcagcctcttgcccaaatgtcttaatgaccttgatgccactgacactttcttgggttttatcatttaaccgcgaaaaagcagcctgcgactccgaaaacgcagcatgcaaccgcgttcccagtttacgagccatcaccgccaacaatggcatcggcaaaatggcaatcaacgtcaagcgccagtccactaccaaaatcatggcaataatcgtggtaccgccagtaataaacgaatcaaataaagtcaaaatgccggcgcccgcgacattttggaccgcatttaaatcgttagtcgcatgcgccattaaatcgccagtacggtgtttttgatagaaggtggcatccattttcataaaatgccaaaacagccgggtacgcaacgtccgctccagcttggccgctccgccccaaatagcgttacgccaaccgtagcgaaacagatactgcgaaatcccggaaaagagcaataaacccaacataagtgctaagtgactgctagttaatcgcgatttgctcatcgcatcaactaaatcaccaatcacttttggcggaatcaaattaaccaatgcaactaacagcagaaaagtcacacctagcaaatatcgccgccattcctgcttaaaataccaccctaattttttgaaaattcccacaacacttgctccttaaatcaacgttttgatccgggtttaacgaaccggatcagctgtttatgaaataaatggcttacaatttctcataagcttcggtaataatgaacatcttctcatgatagcacaaacatcgctaggacgcgaaaacgcgacgacaaaaaagaattctgtcatcgcgttttcttagtaattacttagcattacgttgggcttgtttcatttgcgccatcatctggttgagtttcttagcagatggtttttgtcccatttgcatcatcatggtacgcagcatctcttcgttcacaggcggattatcttgaaaatacttcttcatatatgcccgtgcgccgaagaatccgcctgctaagccgaccagtaacgcaatgatccccacaagtattgtgactaacaatgtgcggcctccttcaagtttcatttctcattgtactaaagcgcttcgatgttgaaaagactaatcttcgcgccaaccgtgttcgcgttgaattttttgaacctttttgctcgtgatctcatggccttttttatcaaagacctgggtatgctcgatttgatcacgtaagcccgcgcgaaaatcttttaaataagcttcacgcaatttttgccgctcgattttttcttcaggcgtcaaacccacgctccgatcttttttggcgagttcattaattcgatccaatcgttcttttggttgttctgccatcgtgctacctcctataaacgtctaaacggcaaccggtactattagaaattagcactgaattaattgccggactttggcctcgacactatctgcgtatttccgaccggtaaaacgttcgatcatcagttttggtgcatcctgcttagttcagttgaaccgcggtgtagtgataatgtgcggcctcatgattaggataaggcgcattttgcaacatcgcaacatattctgcggcacgccgctgggatgagaaggcttttaacaactcaatcggcgctgactgatccgcatagtagacaacgtatatccattgatcatccataagccttcacctcgagtctgtagctgggtggcttgaatgatgggagtttgaaaaggtgttcaggcgagtttatttgtgtttcaccagcgcgggagcttgcatgtaaggacctagaaccccaatggccgcgccctacattccagctgaaccggggggggatcctgtgatactcccataacgcgctcaccagcccagaaacctgcacataagggccttggtcgcaatggccaaaagcgggccattgcgaccaaggccgcttatgctccggtttctaaacgggctggttcgcgcttcccaaaaaaaaagaccgtttccggccttttccatattaacgacgcttttcgcggatacgtgctgctttgccgcggagtgcgcgtaggtagtagagttttgcccgacgaacttggccgtgacgggttacttcgatcttttcgacccgtggtgagtgtaacgggaaggttcgttcgacgccgacaccgttagagatcttacggacggtgtaagtagctgaaatgccaacaccgtgacgcttgataacaacgccttcgaacaactgaatacgttcgcgttcgccttcaacgatcttggcgtgaacacggacattgtcacctgcgcgaaaatcaggaatgtcgtcgcgtaactgtttcttagtaatttcttgaatcaatgggttcattggtctttctcctttgccgacattcataatcatcccgaccagcggaatgccgttgatatgtgacgtatcacaatcaataagtttagcatgtccgtcttggcgtgtaaaggtaaaattctttacctactcgcaaagtatcgatcgcaaagaaatggctgccttatcaaccttcactctttttattggctaaagacacgccactccttaatcaacgtcttgattgcttattgttccttttaaccgctcttccgcagcttttgtcgcttcttccgtcttgacttcacgtaacaagcgcatcgcatcctgatcaaggtgggcagcttgtaaaagatcgggtcgccgcaaataagttcggcgcagactttcctttaaccgccagcgggcaatgagttgatgattgccgttttgcaacacttctggcaccttcatcccgcgatattcaggtggtcgcgtgtactgcgggtattccaacaagccattctcaaaactgtcggtatgggcactttcgtcgttacctaaaactcccggcagcaggcgcacgatggcatcaatcatcaccatcgctggcagctcgccacccgtcaagacatagtcgccaagtgaatattcatcggtcaccaaggtgcgaatccgctcatcatacccttcataatgcccacaaataaatacaagatgctctgcttgcgaaagttcccgtgcggcttgctgatcaaacttcttgccagccggatccatgagaatcacccgctttggtccgggatgccgctgattaacgccatccatcgcctcaaaaagcggttccggcttcaacaacattccggccccgccgccataaggggtatcatcaacatggtggtgtttatcgtgactatagctgcgataatcaaccacatcaaaatcaagcagatggcgttcaagtgctttaccaatcatgctttcccgcaatggttcaaacatattcggaaataggcttaaaacgtcaatctgcatcgtcaatcaacccttccggtacgatgacatgtgcctctttttgctcaaggtcaattgtttgtaccactgattttaggaatggtaaaagcaactcacttttgccaggacgcggaatcacccaaacatcattagggccgggacttaagatttcgctgactttgcctaacgtctggccatgttcatcaatcaccgttaacccaataatgtccttataatagtaactgccttcttcaagtggcttcaatgccgcctcggtcacttgtaacttcttgcctttaaacggtaacacctgattaatatcggtatagtctttaaacgtcagcatcgtgagtcctttatgctggcgaaccgagttaatcgtcaaggctgtcttcggcgtggttgcaacatagaccttgttgccaactttaaaccgctgttccggaaaatcagtcgtcaccaatacgcggacctcaccccgaatgccgtgcgtatttacaatcgtaccaatatcatagtaatctggcattttctcacctctgtgtgctgtcgtttctttcaaaataaaaagaccagcgcaatatgcgccagtctttttattttgcatgcggcgcgtccaaaatattgagccgcacccgtttgctatacgggctttttacactgtatacaatggttcgaattgcctgggcaactcgcccctgtttaccgatgacgcggccgacatcttcaggcgcaacagccaaatcgaaggccatatactcgtctgtttcgtgtgccgtcaccgccacggcttctggtttggtaaccaacggggtaacgatggctttaattaagctgccgatatccaccattaataaccgcctttatttcttggcaaagcgcgcttcgtgatacttctgcatgatgcccttgctaccaagcaagttacgtacagtatctgaaggctgtgcgcctttttgaagccagttcaaaatatcttcttcatttaactttaaatcgactggattagtcaacgggttgtaatagcccacggcctcgatgaaacgaccgtcacgcggcgaacgtgagtctgctacaacgatccggtagaaaggcttacgctttgaacccatccgctttaaacgaattttaactgccactaagtccacctcctgctcatttatcaaccttgatagcatagcaaaaatattttaagctgtaaagccttttttctttacacaggaaattgttctgattatgaatggaatcgcttggcctttttaagccgttttttcttgttccgcttttgcttgcgaaccatggaattcatggccattttgcctagtttgccggaaacaccgccacccataagtccatcaaggcctttcatattgcctttgctcatttggttcatcatttgcttactttggttgaactgtttaatcatgcggttaacttcaacaaccggacgaccggaaccagcagcaatccggcgccgacgactgggattgagcagatcgggatcttcgcgctctttgggggtcatggaataaacaatagccttcatatgcgcaatatctttgggatccattttgacgtttgctaaggccttgttattggccattccgggaatcatcttcatgatgtcttccagcgggcccattttgctgatctgatccatttgatcgagaaagtcgttgaagtcaaacgaattttcgcggattttctcagccatttcctgagcttgtttctcatcgtaggtcttttgcgccttgtcaatcagcgtcagcatgtcacccatgccaagaatacggttcgccatgcggtcgggataaaagacatctaaggcgtccatcttttcgccttgcccaatgaacttaatcggtttacccgttaccgcgcgaattgacagcgccgccccaccacgggtatcgccgtctaatttggttaaaacaacaccggtaatatcaagctgctcattgaaccctttggccacatcaactgcggcttgaccggtcattgcgtcaaccacgagtaagatatcatttgggtgcgcaagttctttgatgtttttcagctcggtcatgagtttttcatcaatttgcaaccggcccgcagtatcaatcaggacataatcgtttttgttttctttggcagtcgccagcccttgacgcacaatttcaacgggatccgtgtccgtgcccatttcaaaaaccggaacattgagttgtttaccaatggtttgcaactgatcaatggcggcaggccggtagacgtcagccgcgatgagcaacggccgcgccttttcattctccatcaaatacttggaaagcttgccgactgtggtggttttcccggccccttgcaacccggccatcatgataacggtcggaatgtgcggtgccttgttgagcggaactgccgcctcgcccatcgttttgactaactcatcattaacaatttttataatctgttgcgccggcgtcagactttcaagcacttccgagccgactgccttggtccgaacattcttgatgaaggttttgaccacatcaaaattgacatcggcttccagcaatgccagtcggatctcacgcatggcatcgcgcacatcgctttcactgaccttgcctttacgtctcagtccgctaaaggctttttgtaaccgttctgataatccttcaaatgccatagtatccccctgttatttcgcagtttgatccgcgactcgttctaataatgtacttaaattcttgtcacttggataatgcgtgcggacatagccgaccagggcatccaccgcctcattttgtgcctggtagttggcaaaaagatgcagtttctgctcatactcttccaaactggcttccgtgcggcgaatattgtcatacaccgcctgacgtgacacgttaaactccgtggcaatctcgcctagcgaataatcatcaccatagtacaaggcaagataagcatgctgtttatcagtcaataacgggccataaaactcaaacaacgagttcattcgataatttttttcgatttccatgatgtcattcctttaatcccatgattgccggtctatcaactacccggccactcgaacatggtccttgtataaggataccggtatcatttgaaatggtcaattaacgtttttattttgtgagcgtgagccggcgcgcttagaagtcggagtgtaagtgacctcggacgtaatggccgggctttggccattgcggctgaggtccttacacgcaggcttctgcgccggggaacgcgttatagcgtgcatgtcgtggcaactgaacccgctaccgctccgccagctcttgctttttataagtgccgtgcaaaaaggtgacttgtaggaaatctaatcaggcgcatactcgctaaactatgaaaccgattccatcatatgctattatacctttaaaaaggagcaacctttatgccaaaaacaacactaaccttaacaagctcagattcacaaaatattgatgacctaatcgcagcagtaacgcagaagcttgatcaaaccgggtacggattcttggcgattgcttttgctcaagagttggcttaccaccaaagtgatgccgacaagttggcgttgatcaaggaatacgtaacaatccaataattcgcgatttccagttttcccctatttcgtggtacactgaacatgtgaaaaattggagggaagaatatggtcgcaacctttatttactgggccgtgtttgctgttcttgctgcttggggattgtggagtttggttttctcatgtgtttacctgagcaaccacgaaaacggcaacttatggttctttgctattatcaatgccatctttggccttttgggctggttgttcgcatggatcatgagtaacaccgcatggcagcaatactggtttgcaagtaaggttcagccatctgcatggtttacttacctgctgatcggttaccttgtcttgattgtcttgcaggtcgtacttggccgggaaaagcaagtccagacagcttaatcattggttcacgaaacgcaaaaatcgtcacaccttagacctaggtgtgacgatttttatatgcacgccatttaggcatcaatttgaattaaacccttaaaaagcccagcgacaaatttagtcggatcaaaggcttgtaaatcatccatcttttcacctaagccgaccagcttgaccggaacatgcaactcattccggatcgcaagcacaatgccgcctttaccagaaccatctagcttggtcaaaacgataccggtaatttgggttgtttgattgaactccttggcctgattcaacgcattttgccctgtcgttgcgtccagaaccagcaagacttcctgcggtgcatcaggcaactcgcggacaatcacccgcttgatcttgtttagctcgttcattaagttgactttgttttgcaagcggccggcagtgtctaccagcacaacatcataaccttcatctttagcccgtttaaccccgtcaaagacaactgcggctggatcaccgcctggattcgttgccacaaccggcacttcaacccggcggccccattcctgcaactgttggatggcaccggcacgaaaagtatcagcagccactaacaaaacgcgtttaccttcttctttgagttgatgagccaatttgccgactgttgtggttttacccgcaccgttgacaccgacaaataggaaaacggttggcccttcttcggcaaaatgcagctgattgtcctcacctttgcctgcttcaccatacatatcgaccaacttttcgacgatcacccgcgaaaccgccttgggatctttagcatttttgagtttcacttcttcgcgcaactcatcactaagccgcaccgccgtttcaaacccgacatcggattcgatcagcatttcttcaagatcatcgaaaaaatcttcatcaaccgtgcgaaagttggcaaacagtgcattcagcttttcaccaaaactactacggcttttttccaggccttcatcgtatttattttcttcaggcgtctccggctcagtaccggtgaacgcttttttaatcgcatcaaaaagtctcattaacttgtcgcctctttctgtgattggtccaaactaacggccataattcgactcacacccgactcctgcatggtcaccccatataagacattggctgcaaccatcgtaccatgacggtgagtaatgacaataaactgagttgcactggcataatggcgtaggaattcgccaaaccggttcacattaacgtcatccagtgaggcttcaacttcatccagaatggaaaatggcaccggccggactttgagaatcgcaaataacaacacgattgccgtcaatgcccgttcgcctccagacaacagcgataggcgggttaacttcttgccaggcggctgtgcagaaatctcaatgcccgtcgtcaacagatcatccggattggtcaggcttaaatgcgcgtgaccgccaccaaacatctgcgggaagatagcttcaaatgcactatttgtctgatcaaacatggctttgaatctggtcttgaccgtttcatccaattcatgcatcgtagcgactagctgttgtttagccgctaaaagatcatcctgctgcttggtgagaaattcgtaccgttcattaacttctttaaattggtcaatcgcatttaaattaaccggacctaattcatctattcctcgcttcaacagtttcaatttgctcttaagctcaggaatcggggcatgatccgccgcaactgctgctttagctgcttcataagttaactgataatcttcagccaaagtattcagccgcgcatccagccccagtttcacgcgattaagcgcaaccgcttgctgttcagaagtcgccatcgcctgatgctgctgatcataagtggtcgtgatcctggctgagatgtcgcttaattttccgcgattagccgctttttcctgcgtcagcttagtttgatcggctttaagctgcgtcagttcttttttcaagctggcaattgttgcggtccggctttccttttccgcggcagtttccttggcggttgccgtaatgtgcgcaattcgttgttgaagctcagttgactgggtttgcgcatcggtcgcttgcgcctgccattgctgctgctgatcgtggagcgtttgcagatcattcgcgatgacggctaacttggtctttaaaccattaacggctgctgcttgcttagaactcgagtcagctgcagcaacagcggcttccttaagctgctcaatcttggcctgtgcatcggcaatttctttggcaatcttttgacctgcttgatgtaaatcagccaacttggtactcaaatcagcctgcgcggtattggcctgttgtgcggctgccaattgccgctgcgcctgccgcaatgtctcggcttgggcattatgctgactggtaatggcagtaagatcggctgctaatgcttgcgcttgagcagtagcagtttgccaggcttcctgcgccgcgttttcctgtttggtcaaggtcgtcaaatccgcttgcttttgcttcaaatctgcaaccagatcctgcaattgcgttttgaggtggcgcgcttcttgattacgcgccagtggtgaggcttgccggccttgcttaacctggccacccgtcagcgagccgcctgggtttaaaatatccccagcggttgtgacgatgcgataccgatgatgcgttgtattggcaatgacaatcgcatgtggcaaggtgtccacaattaacacactacccagcaagttcgccatcacggctttcaaatcagctggatactgtgccagttgcaaccctgttcctaaaaagccgtctgcaccttcaactaactgcaaaaccgcacttggcaattcccgcggccgcatcaccgcagccggcaggaaggttgcccgaccagcacgctgttgtttcaaaagactgatagcgcgttgtgcagctgcctcatcacgcgtcacaatggcttgtaaattactgcctaacgctaaatcaaacgcttgctggtaagcagatggcacctcaagtaattccgcgaccgccccgatgacacctggtaaggaagctttatgtttcaacaccacccgcacaccattataaaaaccggcataatcttcatttaattcggacaaggtttcatatcgagcccgcgcgcgctgataagtcgccatctcatcttgataagtctgctgctgatcagttcgtactttttgaatttgtgtcagcttgtctttggcttcttctgccgccgcttgttgttgatcgactttggtttgaagctgctgctgttgattcaatagtatattaactttggcttcctgatcctgagcctgtttactcagctcataaatccggcgatcatgcgcggcattttgactcgctgccagttgctgatctttttgtaaagcggcctgcgcatttttgttatccgcctgggcttttaacaaatcaatgtaatgattctgcaccgtttccaattgccgattaatggctgccggatcttggctggcttgcttttgttgggccaattgcgttttgagctcaagttgtttggcttgagccgtcttggcttgcttagccaaatccgctagccgctggttggcttcggttaacgattgctgcgtatgggccagacgttctttcaaatcagccagagtcgttgctgcattagccgaccgttcactggataaattagcctcaccgctgagattctccagtttcatcgaccgacttaagacttgatcgttaaggtgattcagctgttcttcatactggtgatcaaccgcactcagctgttcggattgatgctccaagtccttaaccttagccgtcaatgccgcaattgttgctttggtaaccttggcctcaccttgcgttttctcctgttcagccgccagctgctcaatttcaagtgccaacaaggtttgatggatccggtgataatcagctgattgctgttggtaatccttggccaacgaggcttgttcccgcaacggttcaacctgatgtttcaactcgacaataatatcgttgatccgcgccagattgtcgtcattgttagctaactcgcgctctgctttggttttttgctgcttatatttataaacgccagcggcttcttcaatgatgccccggcgttcttctggtttactattaaaaatggcttcaacccggccttgcgaaataaatgaaaaactttcgcgtcccaagccggaatccataaacagatccacaatgtctttcaggcgcacatcctggttatttaataaaaactccgaagtgccgtcgcggtatagtcgccgcgtcactgaaacttctgccggttgatttttaagataaccgtcactgttgtcaaaagtcattgtgactgctgcccgatttaaagcaggccgactatccgtacctgcaaagataacatcacccattcgttcgcctcgcaaactcttggcactctgttcacccagcgcccagcgaatcgcctcggtgatgttacttttcccgcttccatttggcccgacaattccggttaagccggaaacaaaatcaatttcggttttatctgcaaatgatttgaagccattaatgatcaaacgctttaattccatgatgactccattctaaatctcactttttaagacgggccaaagccgccttagctgcagcttgttccgctgcttttttgttcttgccaaaccccgtgcccaaaacgcggccttcaacttcaacatcaacgtgaaattgacgctcatgcgcgggtcctttttcgtctaacaggtgataaacaatcgcgacgtcaccattttgctgcaaagtttcctgcaaggctgttttatgatcctgatcggccgaaaactcacccgcatcgattttagggaaaataatctgcttggcaaacttaatattagcttcccgcccttgatcgaggtacaaggcgccgttaaaagcttcaaacaaatcctcaagcagcgtcaaccgttgtcgggcaccggctttttcctcgcctttacctaatttaatataacgatcaaaatgagcttcttttgaaaaagcggaaaatgccgcggtttgaactgctgctgctcggattcgggtcaagtcgccttccggtttatccggaaatttgcgatataaatagtctgaaaccgttaattcgagcacggcatcacctaaaaattcaagtcgttcgttatcttttagtcctaattctttatgttcattgacatacgaagaatgcgtgaatgcttcatccagtaagctgagatcatgaaactcaatcccatagcgttgacgcaattcgctcacaaactctgaggcaaccatgaagagccctcctttttatcgcactatctaattatactagagcgcaccaaaaaagacacctgcgattgcagatgccttaatggtttaacttttaaaccgaattactttgttgcacggctattacttgtaaccgtcattttactccagttcaggtacttcgctgaagcatagtcaacactcgcattcttcacacgtttattaacagggaagatttcctgacgataaagcgtagggatgacaaatgcttcatcgttagcatatttctgccatgccttcaaagccttagcacggtaggcaggatccattgctttttgactatcaatatcattcagcaacttggtgtttttagcagaaacgaaccgagtgtagttaaacggtgctttctgtgagaacaagtccattggtgaaggatcagaagagaggctccaagcagcagcataaacatcaatacccttggaatcattttgaaccttgtcatagaaggaattaaactcgattggacgaccggttgtcagcttgacgcgcagaccgatcttcttccactgctggatataatcctgtgccaatggttgcgccgttgaaccgccagccatggttgcaaagtaaatcgttaacttcttgcctttaggatcggttcgatagccatctttgcccttcttataacctgctttatccagcaagctattagccttgtcaatgttcaaatcatagccatcgatatcagcgtgaacatctttaccaaaaacaggtgggatcaatgtcgttgcacgagaccgcgtaccgttatagaacttggccgcgacttgatcgttgttcaacgcatagcccattgcctgacgaagactcttgttggccatcttcgaatttggatcataaacgttttcgctcttcttatcatcccatttaccgagtttgaaaccaaggtaattataagcaaggctttgatgacccagattcgtgtaaccactaatgttcttccagtcactataactgtcggaaggcatgccataaacgatatcatacttgtggttctttaaagctgaggtgattgaagcagatgaaacattttcaaatgtaatctttgaaagactcggcttgcccttccaatagtattggttcggtgtgtattcaacgctttgtccagcgacaactttactgatcttataaggaccaaagaacaatggttgtttacgaaccttatcactggattccagtttgtcaaacgcaacatcatgtaagtaatgatatggcgcagcacttttaaggaagtacccgttcccagaagtgttaaatgacggcttcatctgcttaaagtgaatcaccatggtattaccattatcacccttaggcatcgttaaaccagaaatagtatccgctttgccgtcatgatactcggtcaacccctcaatattctgaagcgactcggtgtaccgctgactcttagtcgctttgttagccatgatttcataagcataaaccaaatcacgggcaacaaccggctgaccatccgaccacttaacatttggtttgatagtcaccgtgattgttttcgcactgttatcttgcttgagagtcgcagcaccctgattgttaaacttaaaggtactgttggtgccaaacaaagactcagctgcaggtgtcatgtaatcataatcgtattgatcagtgtacaactcttcgttaaagacccccttaaatggagagtcattgacgacagccacattgacattaccgcctttgattgcctttgcagtgttattataagaaactgggaacttcacactcttattagctgtacttgagctggagttcgagctcttattgccacaggctaccaaggtgattgataaagcggtagcgagcgtgatcattccgagcacagaacgctttttcatactttttcccccttccgcgtcgtcatcgcgatatgtagcgaagcaacgcttcatgtgagttaaatgatagcataattagaacaaaataaccaatgtttcgtcatattttttacattttttcttcaaaaaaaagagccactctgatttctctgagtagctcttcattattttcaggaaattgtcaatgtttcaaccacgccgttgccgcgaatcggctgcccgtcgcatcgcttgaccgacaaaattaattgataacgacaaagttaacagaaccaatactgctggaaaccaaacccaccagcgattaaaaatcaaatccgggtttgacgcgtatccaatcagtgtccctaaactaggagtttccatgggcaaaccaaagcccaagaaagacaacgccgtttcgatcccgatggaactggcaattgtcagcgtcaagtccgtaataatcaaagaactgatatttggcaagacaccggtaaacataattttaagattcgatgtccctgacgtttttgacgccataacatattcacttcgcgcttcagacaacactagtgaccgcattaatcgcgttgtcgtcatccaataaaaggccgccatgatgagaataatggtgatgacgttgtattgcggaataatagtaaccaaaacaatgatgaccaataaagatggaatgatcatcataaagtcaacaaaccgcatgatgacagcatcaaccaggccgccaaagtacccggagattgttcccagcacaaccccgacaaactcaataatcaaagcaaccgaaatcccgatggtaatcgagttacgggcagcgaagaaaagatatttgaacatatcgcgtccgccttcatcggtaccgagaatatagccgcctgtccccggagccatgtaccgatccaaaatgttgacctcagtagcgccaccaacattaaagagcatcgagccaataaacgcagcaagtataatcgttacagcgagaaaaagcgaaaccacagcaactttatcttttcggaattcattcagaatcaccttgaagttagaaggtgattgttcaattttggtggtatctgtcgccacctcattcgcattattttgcataagctttccccaccttctattcaatccgaatccgcggatccacgatactcatgatgatatcagataacaaattaccaagtaacgtcaagaatccgaatagcaacactaacgatataacgaccggatagtcacggctggtcatagatgatacaaaaagctgtcccattcccggataactaaagaccgtttccaaaataaccgacccgccaagtaacatcgtgatttggttacccataaacgccgcaatcggcaataaggaattacgcaaaatatgtttattgaagataacgcggtctggaaccccttttgatcttgcggttcgaacaaaatcctgatgggtgttatcaataacgccggtccgcagatactgaatcgtactcgatgtcgtgataatcccggaaaccagcgcaggtaaaatcatatgatatatccgatcccagacatagcccaaagtaccgggattataagtggacgacacgctaccaccggtcgggaaccactgaaggaagaacccgaagaaaataaggcccaaaagatagaaaacaaacggcggaaccgccatcaagatgaaggaagcaatcgagatagcagagtcgcgtttgcttccttcataacgacctgcaatcacgcctgcagggattgcaatgacgtatagaatgacggttgataacaaagccagccaaaacgtgttcgccgcacgttcgccgatcaaaccagtcaccgaacgtttgtaaacaaaactttgacctaaatcaccatggaacatattaccgatccacttcacatactgaatgtaccatggatcatttaatccatactgttgccgtaatgccgccatctgagcagcactttgtccttgcgaaaaattacctgccaatggatcgcccggcatcattttggataggacaaagactaacacactcagtaaaatcaactgcgggatcatgattaagatccggcgtagaattgttttccacattaatcatgcactcccttcatggatgaatctggcagcgcaacgtaatgtgtatcggaaatcttctggagatccaaaacgcggccttctttggaataatatttagattcttcttctttgaaaatgcgttccacttcccggcgatgttccttgttttgcgcacgatcatcaggattaacatccggaatggctgacaaaagacgcttggtataaatatgttgcgggtgctgataaatgtcttcccgagtaccgatttcgacaaagcgaccacgatgcataatcgccatcttcttacacatatgcttaacaacgcctaagtcatgggaaatgaacaagtaagaaatattatattcttcctgaatccgcttcatgaagttgagaacttgagcttgaaccgacaaatctagcgctgataccggttcatcggcaataatcagcttaggattcgttgccatcgcccgagcaacaccgattcgttgccgctgtccaccagaaaactcatgagggtatttatacaatgcatcgcttggcatgccgacaatatcaagtagttcctgaacccgatgccgttcctcatctttagtcaaattctggaaattacgaatcggctcggcgataatgtcctcaattcgtttgcgcggatttaaactagacaaggagtcctgaaaaatcatctgcacgtctttattatattgcagccgttttcgcacgctgcgtttggtaatatcttcacctttgtagataatcgatccggaagtaaccggttcaagcccgacaatcgctttaccagtggttgacttacccgagcccgattcgccgattaagccatatgtttcgccttgctcaatatcgaaattgataccatcaacggctaacacatgatcagttacacgattaaaaaaacccgaacggatcggatagtggatttttaaattttttacctcaatcattgccattattactcaccttttccagccgcttgtttgtcatccgggaaatagaagtccttgtagcaagtacactgaacaaaatgatccggtgcgacttcatgcatggtcggatgttcttcgtgtgccgattccggaatccatggaattcgaggagcaaagcggcatccttccatctgcatattcttcagtgacggcaccacgccttggatcacgtgcaattcgtcatcatcagaatccgcttgaggcatggagcgcaaaagactgcgcgtatacgggtgagtcgggtgcttgaaaacatccatcaccgagccgctttcgacaatctgcccggcatacatcacggcaactcgatcagccgtttctgccaccacacctaaatcatgggtaattaaaataatgcctgaatgcatttcccgctgaatatcttcaagcagatcaagaatttgagcctgaatcgtcacgtccaatgcggtggttggttcatcagcaatgataatcggcggcttgcaggcaatcgcaattgcaatgacaatccgctgacgcatcccgccggacagttcatgcggataggagcgtgctgtccgctccggattaggaatgccgacttgactcagcaattccaaaacccgttgttcgcgttgttccttgttcatcttggtgtggtagacaagcgtctcttcaatctgctcgccaatacgcatcaatgggttcaaagcagccaagggatcctggaaaatcatgccaatatctttaccacgaattcgatcaaaaagcgtttcgtttaagccaactaggtttaggttattgtacaaaatatcaccagtgacctttgtgttacgtggatcatgcaggccaatgatactggttgccaaggtactcttaccagaacccgactcacctacgatcgccaaaatctcatcttttcgtaacgtgatgctgacatcatcgacagcatcgtaaaaagcatctccaagtctgaatccggtgtgcaaatgttgcacatccaataataagtcttcaggtttatccaagcgaactcctcctttgcgccctaaacgcaagattaaaacaagatgagattttcgaaataattgtctctaagtataaagaaattatagtagttatgcaagcgaaaattgcgttcctgcgcgatttatccgtgaattctcccgaaaagccccttcatgttttgcttacaagaacatgcttgcttgacgaaaagaaaaaaggcttagaagtcattttaaaggctcattttgcagttttggaacgccttcaggcaaaataaaaaagccgccatgaatgacagctctttgtacattatttttgatgcgccttgatataatcgacggcatcttgaactgtcttgatattttctgcatcgtcatccggaatttctgaaccaaaggcatcctctagttccaaaacgaattccacaatgtcaatcgaatctgcatcaagatcttctttaaagttcaaactcgggctgatcttatcaggacttagttgaaagtgatcctgaatcaagccggcaatcttttgataaatttcgtcttcactcatactgctcctccattcatctgccaattcagtttacttgtttgctcaaagaatgtctacgctttctcagtagttttcgcttcgacaatttccgggtgggcatcaaagtaatcggcaagtttagcaacggtgccgtttttaaccatcgttgctgtttgcaataacgtgtagtagacggtgtcggcatcagcagcgccatgggctttaattaagggtgctttgagacccagcaaaactgcccctccatatgacgaaatatcaaatgttttggccatggatttcagattgtttttcaggaacaaaccgcctaatttgccggaaacgccgccgtcataaatcgcgccctttagcatatgcatgaccgtgcgtacggtgccttcgatcgcttttaaggtcgcatttccagtaaagccatcggtcaccaccacgtcagccgggccgttcaaaatgttactggattcaacattcccgacaaagttaatccccggagcggcggccaaaagatcatgcgcctcctgatgcaacttatcgcctttgtttgcctccgtaccgttattgagcaggccaacgcgcggattggccacgccccgcacgtctttggcatagtagctacccataatggcatattgcaatagatgatacggacggttttcggcattggcgccaacatcgagcatgacaaagccttttccatcgactgtcggcagcgttggcagcaagcccggacgttcaatggcgcggattcgaccgatgataaacagtccggctgcaagcagcgccccggtggatccgagcgaaaccatcgccgctgcttcaccttgtttgactgcctgagctgccagcaccatcgaggcttgtttctttcggcgaatggcgcgcaccggttcatcatcactattgattttttcggcagtgtgaataatcgttagccgatcttgattgtgaatcagcggcttaatcttagcttcatcaccgtaaagcaggaattctaaattggcatcatggtcacgcgctttttcaacgccggcaatcacaacttcgggggcatgatcgccgcccattgcatctactgcaattttcatggagtttatcggtcctttcgagtttaatccaaactgccttgcatcatgcgactcgcagctaagtatgccgctaacggttgatgctccggtgccagcaagtgaggatcagttttaaaaattttagcaacaatctgttgagccacttccagagtcggaaagtctccgaccggatcggccactttaaattccggcaagcctgattgcttatcaccaaaaatatcaccggaaccacgcatttccaagtctttttgagctaataaaaagccgtcattggtcttggtcatgatttgcattcgtgcaatcccctgttcattttttggatcggcaatcaacaaacattgggcggccttattgccacgccctactcgacccctgagctgatgcagttgggataagccaaaacgatcagcgtcaaaaatcgccatcaccgttgcgttcggcacatccacgcccacttcgacaacggttgtggaaactaacactgcaatgtcgccatggctaaaagcgcgcatgatttgatctttctcatccggcttcattttgccgtgaagcaaggcaacttgccccacatcccccacggctttttgcatatccgcaaagagctgctcggcgttttgcaaatcgaccttttcagattcggcaatcagcggcgtgatggcaaaaacctgactgccggcttgcacctgactgcgaatcagtcgataaacctgtcctacctgattcttacgcagccaagtggtcgtaatcggcttccgtccggcgggtagttcgtcaatcgttgaaacgtccatttcaccataagccgtgattgctaacgttcgcggaatgggcgtcgctgtcattgacaggagatccggcttttgccctttctcctgcagaatttttcgttggttaaccccaaaacggtgctgttcatcaatgacaactaagccaagcgctttaaaatcaacgcctttttgaatcaaagcatgcgtgccaatgattaaattcaaggtgccatcgcgcaattctgccaacatttcccgccgtttttttgccgtggtcgatcctgttagcaatcccaacttgacaggaaaatcagcaaataatgcctccagtttggcaaaatgctgttctgcaagcacttcagtgggtaccatcagtgctgcttgatagcccgcagtcaccgcagcgtataaaacgatggcggcaacaatggttttcccgctaccgacatctccttgtaataggcgattcatgtgattgggtcggcgcatatcggcacagatttcgttaaccacacgcttttgggcattcgtcagcgaaaatggcaaggttgcaatcaacgcccgcaacgcctggttatcatacggaatcgccaggccgttattggcattgtcgttcaactgtttcaacgcctgaatctgtagctgaaacaggaagaactcccggaaaacaccgctgcgccgggctgctttggcttcctgctgcgtatccggaaaatgcatgccatggaccagttgttcgtcagacatcagacgatagtgcgcgcggatactagccggaatcaagtcatggatattttgatgatcccgtgcccacgccgccttgattagctccagcaaggtgcccatacgaacatttttattcaccgtataaatcgccgccattgacggttgatcctgagactgagtcgccagaatcttcatcccggtaagactgcgccgctgagcatcccacttaccaaaaaccgcagcttcatcgcccatttggaaccgatcttttaaccatggctgattatagaaggtcaccaaaatcacgctgcgttcgacttgcaatttaacgttcacccggctgcgatgcggaccaaagcggctgataaccggatcagccaccacgacacctttaatcgtcagtttttcctgatcagctgcctcagcaagatctttgactttaagatcgtcgtagcgaaacggaaaataaaaaaggacgtcgcccacggtatgaataccgagactggccaatccttcttctcgttttggccctacaccaggtaaaacccgaaccggatccgtgagcgccatcttctacctcctttcgcgttgatgccttgacctcatcacggcatagattttctgtcagtctcgtaaaaaagtgccccgcatgcgggacaccttgacaagtgaggcaaacgctttattcaaccgaaacaaaataaggataaaccggttgatccccttgatgaatttcaaattcaaggtctgggtgctgatcgcccaccgcagccgcaattgctttggcttcgctttggctggcatctgccccaacaataatggtgacgatttcactgtcagcgttaatcatcttattcaccatcgcaatcgccgcaacttcacgattctgatcggtcacactgatcgttccgtcaatgatacccatccagtcgtggttcttaatagcaagtccattgatggtcgtatcccgaatagcctgggtgatggaaccactgacaacatttggcaattgcgcggtcatttcactttgattcgtcgccaaatcggcatccggattatagccaagcatcgcggtcatgccttggttaatcgtcttacttttgacaacggccacttcaacatctgtggcggccttggctgcggcttcagcggccatgaaaatattaccgttattcggtagcacgataacatgcttggcatgggctgacttgaccgcatccaaaatatcattggtgcttggattcattgtctgaccaccgttaagcacatacgtgacgcctaaactcttgaatagctcaccaagcccctgtccggctgcaatggcaaccacgcccatttcagctaacggttgcgtatcggccttagcatccaaagccccttcacgttcgatgatactttcttgttgcaaacgcatgttatcgactttgatctttaacagatcgccaaactgttgcccgtatcgaaaaaccgttcctggatgttcggtatggacatgcactttaacgacttcttcatcggccacgaccagcgttgaatcacccaaagtattcaggtaattacggaatggttcgtaatcaaagtgtttaaactgatcgccatgacctagctcgaccatcatttcggtacagtagccgtacacgatatcagccggatcaagttgggtctgagcgctttgatgatgcacggcgttgatcatttccgtcatttcttcatcggtcacatcatgtacatctgaactgatttcaccggacaagccttcacggaaaccttcataaatgaaaaccaatccttgaccgcctgaatcaaccaccccgacttcttttaataccgcaagaagatcgggagttttggctaaagcacgtttggcgcctttaaccaccgcggtcatcacgactaaagcatcgtccgagccgttagccgccttcagccccgctttggctgcttcacgcgcaaccgtcaagatcgtgccttcgaccggcttcatgaccgctttgtaggcagtctccaccccgtgggcaaaagcatcggccaaatcctgtgcgctcagattcttcttaccttcaacgcttttggcgaatcctcggaaaagctgcgaactgatcacgcccgaattaccacgagcacccatcagcaagcctttcccgagacgtttagccagcgcaccgacagcgtcttcatttgactccaatactgctttggcaccggtctgaaaagtcagattcatgttagttccggtatcaccatccggaaccggaaaaacgtttagtgaattcacaaattcagcatttttattaatacgatgtgcggctacccggatcatgtcctggaatttagtcgccgtaatttcggttactgccacgaaacatcctcctcgaagaacttcattatctgatcaccgtcgcaaaacggtgcgttaacgtcagtcgcctaataccttgacgccttggacgatgacggtcacttcatcggttgtgacccccaacatcgtttcgaggttgtattttactttgtcttggacatttcggcaaacttcggatattttggtgccataactgacaatgatattcacttcgattttcacgccattgtcggtttggcgtaccacaacaccgcgcgcataattctcgcgcttcaaaatatcattgagattatcccggatctggttacgactggccatcccgacaatgccatagattgacgttgccgcaccgccaaccactgttgcaatgacactattggaaatgtcgataatcccatatttggttttgatcttgaccgccatgctgtatcctcctagccattcacgatgctattttcaccgcatacaattctaacagatagtttagcatagggaagaagtcattaaaagcgcgcacgattcgaaaccacggtcgactaagctaatcatgctgcctgtcattgcttccctgatgacctgacacaaaaagatcctgacaatgaaggatgcatcacattcattgtcaggatctttttaatcgttatgggatcaaacccgggtcactttacctgatttaagggcacgtgcagaaacccatacccgctttggtttaccatcaacaaggatccgaaccttgtgcaggttggctttccattggcgccggcttgaattcaaagcgtgagaacgcttgttgccaaacgtggtatgacgaccagtaataacatctttagccacaatatgacctcctttttttcaaggtcaccctcgaatttttcactcaactaacttatcataggcccgcggtgaatgcaagaagttttgcaaagtaaaaatacttgacaggcttaaaacaacagctcaatctgctcttttttccgaccttaccgcgttaattatcgactttttgtccgcggcgatcgcggctatagacaatcgcaacgacaccctttgtccagctcaccgtaaatggtttagtcccgacaaattcattggaagcccacgaaaatggcgaagcattgtcccacgcctttaacgggtacttggcgccagtaatcgtcaagtcggtgataggggttaaattgacaactgccacatagcgataacctggcagcggttgaatttcatggacacccggggcatagtaatcgacccgattctgcacatccaaaaggtgaatgcgttcaatcgcgggtagaaatcgcgactggagcggcaaaaacaaattggacaagaaatgatccagtcgcccaccggttgcccccagtatgatcacgtcaccagtcgaaaaacattgtaaagcagctttgacggcgagctctgtgtcggtatcatctttttctgaagggacttgctgaattttcttgacgtgttcacggacgtcgcgtaactcgctcaaggttaatgagtcaaaatcgccaactgccagatccggctgaatgcccgcttcaacaagatgcaaggttccccgatcgacgccaatccatacccccagcaactgttgccagtcagtcggtaaatcatcatgcgggccgccagccatgatattgatagttgtcattgaaccgcctcacgtaaagacgagatggccgcaccgacatcactggcactaaagacgtatgaaccggccacaaaaatatcggtccccgcatctgctgcagctttcacggttttggcattaatgccgccgtctacttcaatatcaaaatgcaacccgcgatcctggcgcaattgatgcaatcgggcaactttatccaccatggcagtcaaaaacttctggccgccaaatcccggattaacggtcatgaccaatacctgatcgacaagcggtaaaacttcttccaaactgcttaaaggcgtgcccggattcaccacgacccccgcacgaaccccggtcgctgcgatatgctgaagaacgccatataagtgatcagtcgcttcctcatgcaccaaaatcgtatcggctccggcttcggcaaaggcaggcgcccacgctgctggatcactgaccattagatgaacctctaacggtaagttggtaaccgggcgtaatgcctgcacgactaatggaccaaatgtcagattagcgacaaaatgaccgtccataacatcaacatgcagcaagtcggcacctgcctgctccactttttcaacatcacgggctaaatgagcaaagtcggcgcttagaatcgacggggcaattttcatgagaatccctccattttaaaagatgaactactttttcttatacactgggcgcttgccacttaattcttctcgaaactgtaaataattttcatagcgactggccatgatctttccggcatccaatgcggctttgacggcacattgcggctcgctgacatgctgacagccccggaatttacagtgcggggccaaggcaacaaattcaggaaagcgatcccgcaagtcatcaagcgtcacgtccaacaaaccgagtgaggaaaaccccggcgtgtcagcaactagcccgccatgaatcggatatagatcggttgtgcgcgtggtatgcttaccgcgatttaacgcccgactaatggttccggtagccaaatccaaccccggcaccaaatgattgatcaaggtcgacttccctgcaccggtttgacccgtaaaaatagtcagcttgtcagcaaaactagcctgaacttgattcaacgtggcaggatcaaaggctgcttcgggcatgaaaaccgcatatccaatagcctgataaccggctaaagcttcttcaatttgcttcaacagccgatcaggcgccaagtcggttttggtgaggtaaatttcggcatgaatcgcatgcccttccagataaaccaaaaaccgatcgagcagattcaacgaaaaatccggttcaacggctgagacaatcaacaaagcctgatccacattggctactggtgggcgcaccaacgcattgtgccgtggcagcagccgcaacaaatagccttcatcatcaccttgacccggctgaaatacggcaaaatcgccaactagtggcgtgatcttgtcattccgcaggcttccgcgaccacgagtgcgataaattgcaccatcaactgcaagatcataatacccgctgatttgtttgataattcttccggttaattcttcactcattgtgtaatattgtactcctgtgcgacaacggtgccatctcgtaccacccgataactacccggatacgtcttgttgacttgcaaggtaatggtgacctgattatccgcggtaatattaaacgtcttgtcaaccgagtcaatgttatgtgtcttatcgccgatgaacacctgaaccccgtttggcgtcggtccactgctgctagcactgccactactgcttccgctgccactggttgtgctagatgatgctggcgcctgataaggaattgaaatggttttggtaacggttttgagttcatcaggatccgggccttgagaaatcgtcacattgaccgtatcgcctgcgtgaacctgcgtgccagcagccggattctggctaattaccatgccggtatcaacggtgtcggaatgactctgagcaatcacaatcttaagtccgacctcatttgcgtagtcacgcagactcttttccgtataaccggtaagatcccgcagtgcaaaggccgtattgactttcttaatcggctctgcaacatcaaacgtaatcgtggttttacttgcaatgacttttttgccgggtttaatgctttgtgccgtgatttttccggctgcgaccgaatttgttcgaaccactttttccttgacggtaacaccgcgtttttgcaaatcggattttgcatccgtataatcctgaccgacataattatccaaggtaatgcgcggctgtccgcgactcagtatcagatcaaccgccgatccttctttgacactgacctgccgcttaggactagagtctataaccagatccctatcgactttggttgagtaagtatagcgatactttccgaccttcaatcgcgaactggttagtgccgttttggcttgcgtcttggtcatcccgcgcaaatcaggtaccgtcacatcggctttttgattggccgtcaccaatccaattcctaccagtattaacatcacgatcaaggcgctcaggccgatcatcaaccatcgccgtcgtttcttcttagcctggccatctggtgagtggtgttcagcaggttggtttgcgtgatcgtcatcatcatgcggtggcttggggccgttgggaatgaccggtacaatgcgcgtctcatccaaatcatcttttggaatcacatacttggcttcgtgagcccgggcaggactgagtgccgtgctgagatcgcttgccatggcatcggcacttgtataccgattagccggattcttcgccgtggctttaaaaacaacattctccagtgcctgaggaatatggggatcaaaagcgcgcacggatggaatttcttcttgaaaatgtttcaacgcaatcgaaaccgccgagtcgccttcaaacggcaccgaaccggttaacatttcaaataaaataataccaagtgcataaatatcgctttgccgtgtgggcatactgccgcgtgcctgctccggtgataagtaatggacagagcctaacagagagttggtcatcgtcattgaattttccgataacgctaccgcaatgccaaaatcggtaatcttggcgttaccatccggatcaatcaaaatattttgcggttttaaatcacgatggataatattgtggtcatgcgcggtctgaacggctgacaagatctgttccatcatatcgacaacgcgttgataaggaatcgggaagtgttcaacgatatagtgtttcaaatcagagcctttgacatactccatcaccaaaaactgctggccgtgactttcacccacatcataaatcgacacaatattgggatggaccaattcacttgtcgcaatggcttcacgctgaaatcggcgcaccgtatccgggtcattttgaagatcaagccgtaaaactttgaccgcaacatcacggtcaaggatcagatcgcgtgccaaataaacgttggccataccgccttcgcctaacgttttgatgagcttatagcgttcatttaaaatcgtccccggctcgatcatgacggttccctccgatcctgatgaatgatcaaagcagtgatattgtccggacccccggcagcattagcccgtagaattagctcctgggccttgcttccaattggcatatcctgacgtaaaactgccgcaatggcttcattatcgaccatattcgttaacccatccgagcacagcagcaaataatcatcaaattccatatcataaattgtcacatctgcgtcaacatcgctgctaactcccagcgaacgggtgatcacgttgcgttggggaaaacgtttggcttcttcaggggttaattcaccatgtttgaccaattcgttaaccaaactatgatcctcggtaatctgaaccagatgcccgttgcgatataaatacccgcgcgaatccccgatattggcaacgacaaaacgggtaccgctaatgatcactgctacaaccgttgtacccataccagataagtcagtatattgtttagccttttgcagaatcatgtcattttcctgctgcaactcaaaaataagccagcggacgatggactcaatctcggcagtgtcggttttttcaaaagcatagccgagatgggagacggccatttcactcgccacgtccccgccgcgatggcctcccattccatcagccactaaagcaagcgtggcctcagactgattcttaaagatgccaacataatcctggttatttggccggcgccgaccaatatcggtgcgataagcaaactccatacatacccctcatttacggcgaatcagactggcgatgaaaaagccatcggtatcataatcgtcgggaaataattgcaaagctggtgcgccatgcgttttggcaagtggttttagcgtcaaaacaggtacctgttcgaactcgggatgcgttgctaagaagtgggccaccacatcctgattttcctcttttaccattgtacatgtactatacgtcaagcggccaccgatttttaaagtaggtgcaacactatcgagaatcgccaactgaattttttgcaggtgttgcaagtcttcaggctgttttgtgtacttgatctcgggtttacgccgaatgagccctaacccggaacaaggtgcatctactaaaattttatcgaaagactcagcagcaaagttagccgcaacctgacgcgcatccatcacctgtgccgccacgcgatcatcaaggtctaaccgcttagcattttgttgaatcaagcggactttattggcgtgcagatccaaggcagtgacccgcccgccttggtcaggatccagatactgggcaatgtgcgtggttttgccgccaggagctgcacacgcatcaagaacctgatcgcctggttgtacatccagactcggcgccacaagcatcgagctttcatcctgcatggtatacagaccgtccgcaaattcccgggtgccagctaaatgaccgcccggcgcaactaggccaactggcgtgagcggactttcttttaacgctggaaattgaggctgcaacgccttcaacaaagctgccgccgttgttttcgttgtgttgacgcgaatcgaagcatgggccggctggttaatggctgctagaatcttggcggtctttgtctcgcctagctgtgcttgcagcttttttaccagccaaaccggcgtactgctggtaatcgccaagcgttgaatcggatcagcaattgtcatcggatcggggtaaccactgcgctgtgcctgccgtaaaacaccggtcacaaatttagccaccccttgatggcctaattttttagcgatttccgtactgtcaaagaaaaccgctcgtgccggcaccttatctaaatactgcagctgatacactgacgtctgcaacagacaacgcacccaagtatctaattgtcgtgttttaacaaacggcgccaaaagataatccagcgtcaattggtgctgaatcacgccatagacaatgtttgtcagtaaaccggcgtcacgcgaatccagctgatatttggtgatcacgtgatcgagcgtcaggttggaatagccgcctttacccatgacgcgggttaaggtttgaacggctaacagtcgcggattattcggggtcatcggtgatcacctgctgtcccacggttaaatcgcggccagggccgttcaaatagtccgcaatatgctgtttgcttttcccggctggctggagctcatcaatttgaaaggtactctgtttgcccgccgcgatgacgagttgatgcttgctgcgtgcgaccacgctgccagcaggcaagtttgtggtcgcagttaatggtgtgatggcccaaagcttggttcgttggccgttcatataaacatacccgccgacttctggccgcaaaccacgtacccattgatccaatgctcgcgccgacaagtgaatatcaaggtgctcctgctctttggtgatggtcggggcaaacgtgactttctcgggatcctgtggtgtacggatggcggtttggtcaataatcttcggcaaggttgccaataacaaatcacggcccaataaagataactttgcaaacacagtgccagtatcgtcttggcgggttaacggcaacttcgcctgcgcaaacatatcgccagcatccatcttcttaaccatttcgataatggtgacgccggtttcagcatccccgttgataatgctgtactgaatcggtgccccaccgcgatacttcggcagcaacgaaccatggacattcacagcagcaattttggctgcttgtaaaaatttggtcggcaaaaattgcccgtacgccgccgtcacaataagatccggcgctaaggcaatcgcctgcgccagctcaggactgccgctaagcttttctggctgtaaaaccggaatgttatgagcgacagctgcttgcttgaccgggcttgcggccagtttctgcttacggccgactttacgatccggctgcgtcatcactgccaccacgtcataatgctgggcaatgaggccttcaaggatcgggacggcaaaatcaggtgttcctagaaaaattactgaagtcatgttttcctccaaacgatcgattcgatatgatgcgtgatacccttcgttgacaacaacttcaaacaaatgatagcggttcgggatcaatggttacctgaaatccttgccggctgctttgttgcgtttcttcaagaatatgttgcaaggttttggctaaggccggttcatgtttatattttaaaacgatctgataaatatagcgattcttcaagcgtgcaatcggtccgggcgttggtccaagcatgattacctgatcagacaactgtgcgcgcagttctttggccaaggaaaaaattgccttcgctgcctgcgtttcatctggatgactaactccaatcttagttgaaaagaaatatggtggatagttgccttggtggcgcaccgccatctcctggcgaaagaagccttcgtaatcctgacgtttggcgtactgaatggcgtaatgatccggattaaacgtctgcacaaacacttcgccgggtttatcggcccgcccagctcggccacttacctgagtcagcaattggaacgtcttttcactggctcggaagtccggtaatcccagtgacgtatcggcattaatgacgccaaccaaagtgacatcaggaaagtccaaccctttagcaatcatctgagtgccgagtaaaatatcggcttgatgagcgccaaatgcattcaaaattcgggcatgtcccccttttcgccgcgtggtatcaacatccatacgtaaaatgcgtgcgtttgggagtaacgtctgcaattgggcctcgactttttgggtgccggtgccataatagcgaatcttgtccgatccacactgcggacagcgatgcggaattgcttcttcatggccgcagtagtgacattttagcgtgtgcgtatccatgtgcaacgttagactgatgtcacagttaggacactttgcaacgtaaccgcaatcgcgacacattacaaaactggagtatccgcgccgatttagcagcaagacgctttgttcatgccgctccagacgcaccttcaacgcatctaacaacggcgccgaaaagtcttcttgagccccctgcgcaaacgcttcacgcatatcgacaatgtgcaccggtggcaatggctgatcgttaatccgctgcggcaaacgtaaaagcgtgtatacgcctttttccgcccgcgcacgggattccaacgatggcgtggccgatcctaatacaaccggcgcgtgatgaatctgtgcgcgcttcagtaagacatcgcgagcatggtaacgcggtaccgaatcctgcttatagctggtttcgtgttcctcgtccatgatgaacacgccgatatgcctgagcggtgcaaacgcagctgaacgcgcaccgacaaccacttgcgcctcgccacgggcaatgcgtcgccattcatcatatttttcgccatcagacaggccggaatgcatgacggcaacatgcatcccgaagcgtcccttaacccgatcaaccatctggggcgtcaaagcaatttcgggcaccagcatgagcgcggtttgccccgccgccagcacctgcgcaatcacctgtagatagacttcggttttacctgatcccgtcaccccttcaagtaagaaagttttcggctcttttgctttcacggcttgattgatcgtgtccacaatctttttttgatcggccgttaatggtaagggttgcgttaacggttgatgccgaagttgcggataaggatcgcggtaggtttcatgggcttctaatttcaaccagcctttcgccgcggcctgattaatcgttgcttttgttaacttagtgtgatgttccacatccgtcagcaatggtcgttcatgtttggccgcccaggttccgatcaggtcaagcaattgcaattgtttcacggcatttttgcgtgtttgttgcttttctgcggcaacttgctcagctgacaattggggaatgaggtagaaaacctgtttaacccgggcgcgatcttttttaacgtaagaaatggccactttttcagcctgtgccagtttcatcaaagcaacctgatcctcatcagaaagcgtgttgaaggcgacgctatccgcctgaccaaaatagcgggcttgctcctcagccgacaatgcaatcggttcggcaattttaaccgcatcaatttttaacatggttggtaacatggtttgcatgcaggcaatccaaaaagaataagtggtttctgccagccatttcgatagcgccagcatttcctgattcaagaccggcgcgggatctaaaacatccagcagcggcttgagttcaccggcatactcgctttgatcggaaagtgcgacaaccatcccgctgactttccgcgctccttttccaaactgaacccaaacacgcatcccgggttgaagcgcgccatcgagtcgtggtggcacaagataatcaaatggccggtctgtttgcatggtcggaacatccacaatcactttggcaatggttgccaagcgctcaccccttttgtttcggtaacatccttgttaattgctcaattaaagccacggcgactttttgcttcgtcatttccggcagcgtcaccggtggctgatcaggccgcaaaaaagtgaccgtatccgtatcggcattaaacccatgggtcgcatcgactggattggcaacgatcatgtcggccttttttttcgtcagtttggtttgggcattggctaacaaatcattggtttctgcggcaaaaccgatgactacctgatgggttttcttttgccccaatgtcgccagaatatccggattctggaccaaggtcaacgtcaagccgctgttagcatcgactttttttattttgtggtcgctaatcgtcggcgcgcgataatctgcaaccgccgccgccataataactgcatcggcatccggaaaatccgccaaaattgcatcggccattgattgggcactggtcaccggcttcacggtcaccccagggacaacaggcagctctctagtggtcactaaagtcaccgctgcaccagcaccagccgcggcgttggcaatggcggtgcccattttacctgatgagtcattcgttaaatagcgcaccggatctagtcgttcttttgtcccaccggccgagacaatgatacgccggccttttaaccgcggctcggcaaggttttcaagaaacagcgcaatctgatccggttcaggcatccgtccgactccggtataaccctcagccaattgtccggtagcaggtggcagcagacgatagccttgtctgctaatcagccgcgcaatattacgctgcgtttgtggattttgccacatttgatcgttcatagccgggaccattaatttaggggcagtcattgctagcagcgtcgtggtaacaacgttgtcagctaaaccggccgctagctttgccaaggtattggcggttgccggcacaacgacccccaaatccgcccagtgtgctaaagcaacatgcgccacgtgttccggatgatcaaactcatgtccgtccgtcaacacagcatgtttactaacaatggccaacgtttcaggagtcacgaacttctgcgcactggccgtcatcgcaactcggacgtcatacccggctttgactaacgcgcgcaccaacagtggtattttatatgccgcaatcccgccagtaacaaacaaggcaatatgttgctttttcatgaggcacccctcttacatttcgtagtagctttattatagcaaacgtgagccaagtttccggtcatggcgattaaaccaactcggcaaacgcatatccattaatggtcccaaaaatattgccataaaaaaagagcaaccggttgttctgcttaccgttgccccttacttcaatggtttgtcttttaatccttaatctttgtgatcgagtttttcggcatcccgttcaagcatctttgattttggatcaataatcacgtcgccagcagcaatttcttcaagcgctttgccgacactcttatctgatttataatcggataacattttcaaatcgcccgcttcaagttcatgtgcacgcttggctgccaaaacagcaagtgaataacgtgagggcaccttttccaataacttgtcaattgaaggataaataatcatgtgatgagactccttttttcataatcgccaatttgccaagtcgcaagttggcgctctattatctagctaaatcggcactcgccaacatacctttgtagcggtcaatgacacgcggaacacgtaaatgttcactttcgatgatgcgctcaatccgcttgacggccaaatccactttgtcgttaaccacggcataatcataattttccatcatggtaatttcggaagccgccttgcgaatgcgcttatcgatggtctcgtcgtcatccgtaccgcgacctttcaatcgatggcgtaattcacttaaatccggtggcgtcaggaagataaacaccccattgggacacttcttgcgcacctgcattgcaccattgacttcgatctcaagtaacacatcacgcccggactcaagcgtttcattaacgtatttcagtggcgtaccgtagtagttgtcgacatacttcgcatactcaagcataccacctgtcgcgatttcgtgctcaaactgtgctttggttctgaagtaataatcaacgccatcaacctcgccaggacgcatttggcgcgtcgtcattgaaatagaatattgaaaatcccggtagttgccttcaagcatggcttgtcggaccgttcctttgcctacgccgctgggaccagacaaaacaatcagcattccccgttcgtgcatgtgtgaacctctttcgttaagtattactaaacattttgcactttttcaccgccgatttcaactgcttcaagaccgcggtaatgaaaacgtcatatggcgtaaggtcatctcggcatcttttttccccaaggccatcatttcggcaatcgctgcgggacgaaagttgaagagacgaggcagtggctgactaggtttcagataaacatcgccgtgatcagacccgatccggccaatccccgtgccactgatggccacaacaaaatcagcgccaatatctcttgcaatgtcaacgggcagatcattaaccacgccaccatcaacaaaactggtgccatgccggtcaatcggtgtaaaaatccccggcattgcgctggaggctaacaaccactctctggcatcagcaaccgaaagtccatctatgcgcgtcacatgggcacgtaagtcgggtaagcgcgtggtgacggctaaaaccgcccgttgatcgcgttttggcgaccgcaacatctgctcaagtaatgggacaaagttacgtctggcaaagatcggtccccgcgtctttaagctggtcaaagactgccaccaatgcgccagttgttgcggcgccatgtgaaccgtagcagcagcgttaatggcaccgattgaagaaccgatgacaaacgcaggcaccagtcgcggacccagcacgctccagacaccggcttgataagcaccatgcgccgccccgccaccaaaaacaactgccaataccaactttgccacctccaattctgtcacgagcttgccgttgttacaggtcgaataaatttcaaaaagtagttgcaagtttgaacacatgttcgtataatgaagttacaaacaaacgttcggaggcgcgatcatggaaaataaatcgtcagcactgcaaaatgtgacccatcaccttgtagcttcataccgggaattattcgatctggcagcacccacgatgcaaatgcccgcccatcaagtggatcttttcattgatcaggcgatgcaacgacattaccaaattgcactgtattttaaccatgaaaccgcgccatttgtgggccacattgtccgaccacttggtgaaaaacgcttcctggttaaaggataccacagcaacattttccgcatcatgaccagcaccagtgtcaattatattaaacgattcaaatagctttttctgaatacggctcctgtgaccaagcaaaaagcgattcaagtaagaccgatgtctccttgaatcgctttttgttatgccggaaaaaatctacgaacattgaatttttggcgcattcaataccgtcaccagttcacctgactacgatgacactttgccatgtttaaactcatcggccattcttaatagttcttcggcatgttcaatcgtcagcttagtgattttttcgccggccagcatccgcgcaatttcctctacccgcgctttatgggttagtttattgacttgggtcgttgtccgaccgtcatgaaccgccttgctgatgacatactcatgatcggccatggcagccacttgcggcaggtgcgtaatacacaacacctgcgaccttttggcgattaagctaattttattggcaatcgcttgcgcaacccgtccggaaacgccggtatcaacctcatcgaaaatgatcgccgtgaccccttccgagcgcgcaaaaatggttttcatcgcaagcatcagccgcgataattccccacctgacgcaattttggctaacggcttggcttcttcacccggattagtctgaatataaaagaccgcttcgtctaacccgtctgcccgaaaatctttggccttagtaaaatgaaccgaaaaaaccgttttatccatgtacagtgacgccagctgctcgtggatcgctttggtcagttgtttggcagcagcgtgccggcgttttgaaagtgccgcaccgagtttctgaagctgggcttgagattcttttaggttgctgtctagatcttcaaccgatgtttcggcttgttccatctgattcaattccgccgctgcccgtttgccataagcgatcacttcatcaagggtttcgccgtatttgcgtttgagctgattaaataagtcgagccgtttttcgacttcatctaggcggccttcgtcaaattcctgatcatcgagttctttcgataaatcattttggacatcttgcaaactataatacgcactctgcaagttgtcggcaattgccgcaaaatccggatccaaatcggcaatgctttgcatactcgacattgcttgaccaatttgatcaagtgcattgacttcctcatcactcaacaaggcatagctttcttgcaaagcagcattgattctttgaaagtttgccaaccgatcgcgttcggtacttaaatcagtatcttcatgcggttgcagatcggcgctttgaatttcgctcacctggaatttcaacatatccagtcgttgcgcccattcctgttcatttgcctgtttttgcttcactgcttgtaaggtacgctgataattttgataaacttctgcatattggtggcgaattttcagcagatcatcaccggcaaaggcatccaataaacctagatgcgtttccgaatgcatcagctgctgatgttcattctggccgtgaatatccaccaacgtttcgccaatcgctttcaaggtggcggtgttgaccagatgaccgttaacgcgacaaacgttccggccgctgcggaataattcgcgctgtaacaagacggtgtcgttttggtccggatccatcaccccgaaagcctggagtttggcttccgtcaatggatttgcctgcgcgtcaaacaaaccttccaagcttgccttggatgccccggttcggatgaaatcaaccgatccgcgcccaccagccaacaaacccaccgcatcaataataattgacttgccggccccggtctcaccagtgagcgccgtcatccctgactgaaagctcaacgccaagttatcaatgatggcaaaatcatgaattgctaactcctgtaacatcttttcaccccaccatggcctcaagttccgccaatacatcggttgcatactgtgccgagcgacaaataatgagaatggatgcatccccgctaatcgtcgcaaaaattcgccggtcgtccaattgttcgatcagcgtctcaaccgcggctgccgtccctggcaaaagcgccaaatggacaaaattatccattgcttcgccccacttcatcgcggtaaccaatgtccgccgcagtttatccgtagcgggcagctgcttttccgcgggcatactgtagcgataatgtccttcacctgccggaatcttaaccaattgcatttctttaatatcccgggaaatcgtcgcctgagtgaccggaattttcatctcggtcaaacgggccaccaaatcttcctgccgttctatcggctcactttgaattaagcgttgaattgtcgcttgtcgttcgcgctttcgcatgtgctcacctctgtcatgaatgcatttttaacgtgaaaaaatgctttacccatagcatagcgcagacgcactaggcttaccaaatttttgcataaatattcaattaagggcgttttaatgcagcataagcatcactaagggttcgctcgatatcaacagttggtgcgatttctccaggggtttggtcagcattttgcaaatgaattaaaaattcaatattgccttcgccgcctttgattggactgtacgccaaccctaaaacgttatagccggtggcactggcaaagttgacgatcatcttcaacacatcccgatgaacctgaggatcgcggacaatgccatgcttcccaacatgcgcaggcccggcttcaaattgcggcttaatgagtgccaccgcgtgaccgtgcggcattaagatggcttttagcggcggcaaaatgagtttcaacgaaataaaactaacatcggtcatggcaaattccacggggccatcggtaaaatcttcaggcttgctataacgaaaattcacccgttccatcactttcacgcgcggatcctcacgaagcttccaagccagttgattatagccgacatccaaggcatagctcatcttggcaccattttgtaaagcaacatcggtaaagccgccagttgatgcgccaatgtcaagtacggttttacccgtcaaatcaagcgcaaatactttcagtgctttagccagtttaagcccaccacgacttacatacggcatttttttgcctttcacatgcaaaatggcatcgccggggattttgacccccggcttatccaaacgttgattgttctgatcatagacttcgccagccatcaccgaacgcttggcctgttcgcgtgactcaaataagccttgctccacaagcagtacatcgacccgttctttttttacttttgtcatgcttgtaacaccgccaaaatcgattttaagtcggctgcatcaacggtcaggctgtttaacgcagcagtggcttgctgaaactgggtcgccaatgcttgtttggcaccggctaatcccagcagttcgggaaatgtatttttgtgttcggccacatccttatcggcggttttacctaattccgcggtggttttagtcacatcattgatatcatctttgatttgaaaacccagaccaaaagcagccgcaaaatcggctaaggcaacttgatcggcttcgggaatcgcgacaaacaaactacccattgccacaccggcctggatcagcgcgccggttttagcctgatgcatctgtttgagagttgctaggtcatattgcgtttgctcgccatccatatcaagtacctggcctgcaaccattcctgaactgccggccgcttctgccaggatttgaacaagtgcagcgcctttttccggatagtgctggcttaagatagcaaatgcgtcagttaacaacgcatccccagccaaaatcgcgagcgcttcgccaaattgcttgtgattcgtgggctgaccgcggcgaagatcatcattatccatggccggtaaatcatcgtgaatcaatgaataggtgtgcacaaattcaagtgcggttgcagcgggtaatgcttcggcaaccacgccatcatacatagcaacgatgctcaataacagcaacggccgcaaccgcttgccgcctgcatcaaccgaataagccatcgccgcacgcaaatgaggattggccacagttgccagttgttcgtctaaagcatgattaattgctgtttgccagtcggttagcgttggactcattgttggccttctttgggctgaaatggttgggtggtaccatcatcgctcaccatttccgtcaccgtcttttctgctgatttcagcgttttttcgagttcctgactcaatttgaccccgactttaaattgatctagggctttttcaagcggtacatcgccttgttctaattgattcacaatgccttcaagttgtgcgagtttttcttcaaacgttggttcagccatgtttattctcctttgtcgtcacgcgagcgccaatttgcccatccgcaacgtgaatatgaatcgcggcatccacttgataatccgcggtcgttttcaacattttccctgcatcatcggtgacaaacgcaaagccgcggcccaatattttcaacggacttaaatgatccaaaccaagtgccgcattggccaccgcttgatgcttagcggtcacaagtgcgatcattgcccgatccagccgacgccgatcatccacctgctgtcgctgcaggttggcgacttttaccagcaactgccgaccatccagttgggcagtcgccattgctaaccgatgctcattttcgcgtaactgattgttgatactctgctggagccgttgccgtagttgatcgacacgctgaacatattgatcgtaaagccgatccggttgggttaagacaacgctttgagcggatcgttgtaagcgtgttgctgcatttttcaagcggttatgcatggcgtttaccagtcgcacctgatcttctgagatgcgattcaaggcatccaccaacgtgactggcgtaacaatttctgcagctgcggtcggggtagcagcgcggcgatcagccacaaagtccgcaatcgttgtgtcggtttcgtgaccaaccgagctcacaatcggcattggcatctcagctagtgcccgcgctaccttttcttcattgaacggccataaatcttcaattgacccgccgccacgaccaatgatcaccgcatcaaatccggacattgtcttaatccggttcaactgtttcacaatcgaatcggccgcctgatccccttgcacgatagccggaaataagatcaactgcaatatcgggtatcgccgggccacagtggtgataatatcttgaataaccgcgccacttgggctggtcaccaccgccacgcgttgagggaaaagtggcagtggccgctgatggcgttcaaataacccttccgcagccagttttttctttaattgttcaaacgcctggtacaaggcaccaacgccatccggctctaatcgctccacaatcagtcgatactcgccactgggttcatacaggctaacacggccaaccaccaacaccttcatgccttcttcaaggttaaattgaagtttgctgaatgcgttacgaaacatgagagccccgattttggcatgatcatctttgagtgaaaaatattgattgcccacgcgtttgcggtagttggaaatttcaccggtcagataaactttggctaaatacggatcggcatcgaattttctttttaaatactgcgtcagtgcggtaacggttaaatattgacttgtctcaaccatgtaaccgcctcttcgccaaagccaccgtttgggccatgagcgatgcaatcgtcatcggccccacgccaccgggtactggggtcaaggcgcctgcaatcggtgcgaccgtatcatcgtcaacatccccatgcagttttccatcggcaccgcgcgaaattcccacgtcaatcaccgttgcgccgggtttgacggcatcagcgccgataaaatgtggccgtccgacagcaaccactaaaatatccgcttcccgcgtcaactgtttgaggtttcgggttttgctgtgagcgatggtaaccgtcgcatcatgattaaccattaatccagccagtggccgtcccacaatattcgagcgcccgacaatgacaacccgctgcccggcaacatcaatatcataagcatccaacagcgccataatgccataaggagttgaggccacaacggttggctcattcgtccacaaccgtccgacactaaccggactaaagccatcaacatctttattaggatcaatcgcatcaataaccgcgcgttcgtctaagccagcaggtaacggaagctgtaccaaaatagcatccacatcaggatcctgattcaactcggccaccttagctaacaatgtcatctgagaagtgtcttctggcaatcgatacatcaacgagcgaacgccaatttcttcagcccgccgctgtttgttacgaacatagacttcgctagcaggatccgaaccaactaaaacaacggccaacgtaggcgtgacgtcttgttgtgccaattttgctaccgtctgtttaagttcaccaagtattttctttgacactacccggccatctaatcgcgttgccacaaaaaccactcctcatttttgacgctgctcgcagcaggcgcccaatgttgtttgttaccttgatcgttaacgattcgcggataaattaaaaccggtcaaagtaattgcctttgaccggttaacttacgcttttggcgccgcttcgatgaagtttgccaaaatgccattgacaaacttcgccgactgctcgtcgctgtaacgtttagccagattaatggcctcattaatcgctgcagcttccggcattgcttcttcataacgaatttcatataagcccagacgtaaaatgattaaatctggtttcgttaaccgactcagcgtccagcctttttttagttgcggcgtcaaagctgcgtctaaggctgcttgatttgccaaaacgccttcaactaatgccgttaaatatgacggtacttctgtatctttaggtaaaacttcggcgtacaccgcatttttatcagcttccggattcgttgccaaggcaaagagcgcccgaaaggcagcttcacggattgcatgtcgtgattccatcttattcgtcatcctgtccgcttgttgtcgctgcatcatccgtgtcatctgtgtcgtcatccttgaacaggtcttccggattgactggctcggtcttttcgggaatcacaccaacgacatgaacatttacttcatccaaagtaagatcggtcatgaacagcaattgctcgcgtaactgctcttgcatcgccaatgcaaccttgggtaccgaaacaccataatccaaatagacgtacacatcagccgtaatcttatcatcggcaactgtcacactcacacctttaccgtgattagcccggccaaaccaggcattaatggaagatcctaatgtgccacgcatttggtagaccccgtccacttgactggcagcgatgcccaaaatgacctccaaaacttcaggaacaatttcaatcgtcccttgtgcatcagtccgatttgctaatatgatattggtttcttcagccattatgagatcctcctagccttagttgttagcacgtgagatataagtgccatcatcggtgttgatcgtcaacacatcaccgttattaatgaaaaatggcacttgaacaaccaaaccggtttccatggttgccggttttgaaccgccgctactggtattgccacgaatacccggttcggtttctttaactgccagatcaactgtttttggcagctcaatacctagcgtttcattaccgtgcatgataattttaacattcatgttttcttttaaataattcaactgatcccgaatttcgtcacctgggagtgtcagctgatcataagtatcggtgtccatgaatacatagttgtcgccatcggcataaagatattgcatgtttttgctatcaatctgggctttttcaactttttcagtcgaacggaaggttttttcctgaacggcaccggttcgcaggttcttcaaagtcgaacggacaaatgccgatcccttacccggcttaacatgctgaaattcaacgatccgccaaaggtcaccatcgacctcgatcgtcaaaccatttttaaaatcattaacagatatcatgaacttcctccatacattcagtcataaactaaacctattctagcaagcagcggagacgcttgcaacagccaccggcgaactaaccccaatgatctgcaatgcatcaccacacaaagcaaccgtctcgatacgaattttgccttgatataaccacccataccagagataggttcgaaaaagcggtcgaataaactgcgaccgcaacgctattcaatattcttatcagttatgcctttgactatctcagtagcaaccggcgacactttcaaatgttaaagtaccaacaaatcagccggtgctggctggctgagtgattgattaccgtcagccgttaccaccagatcatcttcaatgcggacaccaccaagctctggaatatagatgcctggttcgtctgtgacaacattaccttttgcggctggcacatcaagatatggcccccaagcacccggaccttcatgaatcgataaaccgattccgtgacccgttccgtggccaaagtactgaccgtaacctgcatcatcaatggtgtgatgcgccaaatcgttaatcgtccgtccgagcacacccggtttcagcgcttgttgcactttttggttagtttcgtaaacaatcttgtaaatcgtcttcagcttaggatctggctggccgactgcaaaagtgcgggtaagatcagacatatagccatgataaatgcagccccaatcgagcgtgaccacatcacccttagcaattttcttttcggttgccgcaccatgaggcatcgccgagcgggcacctgaggccacaatcgtttcgaacgagacattgctggcaccgagtttgcgcatataaaagtccaaatcattggcaatatcaatctcccgcataccgggtttaatggtcgccagcacatgttgatagcctttttccgcaatggcaacagcctgtttaatgagagccaattcatcatcgtctttaacttcacgctggctctcaacgaaatcgcgagttggcaccaaggtcccttgggtcaacaagtcaaacgcttcataatctgcatagttgagatgaacggcttcaaaaccaatgtgcgttaattgcaaccgattggccaattttcccgctgccttaaacaacccatcttgatgcaaaaccaattcggcgtgttgcacctgctgtttaaattgttcggtaaaccgcgaatcagtaataaaataagctttttccggtgtcaccagcaaagcactttcatcgccggtaaagccggtcaaataagtgacgttggcggcatcggtaacaaaaaagccatccagtttcttatccagaatccgtgcctgcaatgctgtcattcgatccatccaaatcgctcctttttgacgtttgtccaaactttgaaaaaaagacgccccgttttaccgggacgtcatccatctttattcagcagctgctgccggataaactgaaaccttcttcttatcacggccgaagcgttcgaacttaacaacgccatcagcggttgcaaataaggtatcatcgccgccgcgaccaacgttttcaccagggtggatcttggtaccgcgttgacgatacaagatgttgcctgccttgacgaattggccatcggcacgtttgctgcctaagcgccgaccagctgagttacggccgttggatgttgaaccgccacctttatggtgagagaagaattgcagattcatctttaacataacgtacacctccgagaattaattttgctctaattgttttgtcgtaatcattaagcgatcagggtattgatcttggatgctttgaagttcaagcaataaattttccaacaaaatttgactaatatgcaactgttcaccggtaataacggatttgagcttcatttgcaagtggccaccatggacctcatctgcaatgacatccggcttgaatcccgctaaggcttcaacaccgttaaccgcaccgatactaacagctgaaacagcagcgcagacgatatcctgaccggttttaccggcatcggcatgaccagtcagctcaaaactgacaatatcgccatgctcgtcgcgatgaaaaattgccttgatcatagcctaacctcttatgcgttaatcgcgtcaataacgacttttgtgtaaggctgacggtggcctttcttctgatgagagtgcttcttaggcttgtacttgtaagtaacaacctttttctcgcgcccttgtttttcgactttaccggttacggttgcgccggcaacggttggtgtgccaatcttggcatcgccttcgccagcaaccataatcacttcgtcaaaagtcacctgtttgccttcttcggcatcaagtttttcgacataaatagcttcgccgacttctgctttatattgcttgccgccagttttaataattgcgtacactgtgtgcacctcctgttttgcctctcggcttttcccctgaagactcgccaagttaggtgcttgcgcttaaaacctaacgatgtgcggttgcataggaggggtgccaaatacaacggattaatactaccagagactggggtaagttgcaagcgtctatgtaagtaagtaaacaagttcattttatctaatggcttcgcgatccaatccaaatatcaggactcccaatgccatctgcctaaacagaaatgctttacgatgccaaatgccgtttacgataaacccagattccgcaaatgagggctggcatatagagtgcataaataatagtaaataacgtgagccacccaccgaaagctgcgttacctaacagtaacccaacatataaaattccgtcgataatccagttaaccggttctatcagttgcgtggtcaccgtgattagcaacgccccggtgactaataaaatgagaatatcgagcaaaataatcatacgcgccacctcctgcaagcattatagccaagcgtgccggtttcaacaagaaaaccttgaaatctgacctcaggcgttttgttgcatagaaaaaggcccagaacgaatctgagcctgcccctgccaagatacctaatatagcataaaaggcgccaatgtaaccagcaaatatttaaaaaggcaggggctaaaaaacaatatcttagtgaccttaaacatgcctcaaggaagtgaaacatcagcgccaagcttcacatgcctgccccttatcccctgaaagtagataaagaaaagccgctgatcattaaaaaatcagcggtgatgagtcaacgtttcaactgttgtaatgctttttcaatcgtatcgcctttgccaacatgtttggcatttttcggatcaatggcgataaactcttgcgttttcatattaagttggattcgatatgccatctgaatccctccattcttaaagatgtgaatggcctttggtagcgaataccgtcatgctactcacttttaatcagtaagtcaagccatccaacttcaaaacaacccattagcaatcagggtctcgttatgatgacatccgggtttgaatttaacctaaaagtccaaccggccgggcggtttcattgacttgaccttctggctatggcattaatggattaaagctttttatagtttagtcagtgatagcggattatcaatatttttatttttaggggcgtggaaattttgaaaaaatggatctggggttcaatcggcgggctaatcgttttaattgttgtgggcatcggtggatggtggctttatgaccattttcattatcagcaactagttgatcagcctgctgacgttaaaaaatgggaagccgacccacgcccactgcaatctgaacaaaccgccgttaagcgaatcaaagaaatcccccagtcggcacagttaggcaatcggatcgccaaggggacaaagttggttgtcattcccggtctgcgtggcgcctggtcaattaacgccaaaaccaaacgcgccggctttggcacaaactgggtccctcaaggcgttacccagtcaaaagacagcctgttcgtcagtctatacgatggcgatcacaagttaaattcgctgatcttggaaatcaacaaaaaaaccggtcgttaccgtaagtcgtttattttaaagtccaaagcacacgtcggcggcatcacctatgatcgcgaaaaaaagcggctgttatggtcagacgacaactccaaactcggtggcgccgggattagttatgcctctcaacgagcacttgatgcgtatcaagctcaggttgaaaaagcgcctcttgattccacacgcatcccactgcacttggctaaccggacatcggccatcacgctttatgatcaccaacttgttttcgtcaagtatggcaagaacgccattaatcggtcgctcattgctttaccagtgaacgatgacaacctccctgctgccattaccgaagcacaatttaaccgcttgattcgtgaccttatcccgcaacttgaaggtaaaaacgatacccaaagtttccaaatcatttctaagaagctcatggatgacaagatcatcaattccgtcaatgcaggctgggatcgcattcaaggtattgccattgccaagaccggcctcacctttgtcagtcaatcaaatggtgccaagcccggcaaaatctggattcgtattccccttgataaaagttggtctaagctgacctttgccacgccgaaatccggagacaaaattattaacgttcctaattcggtggaagaaattagtctaaacgcggatgacagccagctggcccttatttttgaaagtggtgccaaagcctatcgcgaagaaggctcgttctggaaacgcccgcactacatggatcgtatcatgctattgcccatcagcgtccaatcaaatacaaagaaatgacctgattatcggcttatcgcttcatggcaaaatgcaaggacccgttgacggtctatcccggttctcgtatacttaatagtgctttgtaccagtagctcagttggatagagcaacggtcttctaaaccgtttgtcccgggttcgaatcccggctggtacattattaaggtaaaacgggaaaagctaagacaaaaaagcctgaagaatcaggctttttttacgtcggagaaagcagaaaaaaattttgtgacagtgtcgtgacagcgaggcttaaaaagtcggctaaaatcggccattctgtcacaagactgtcacaagatcgctgtacaccctgcgacataaggtatacaaccggtgcttttttgtcattttttcaactgcaacgtatgatcaaccaactcgtaagtttcaactccaaacgcctgcgccagttccgcattataatgatgagcaacctcgatcaccgtcaccggcaaggcataaataagcttatgaatcttgtcggcatttgcctgatcaaggctggcagaaatttcgtctagtaaaaagaccggactttgtcgcaagaggccgcgggcaatcccgattcgttgtgcctggccgccggataaattgctgccgttatcaacaatttcaaagtcaagaatgccagtacccagttccttatccaggctcaccacctgcaagacccgtaaaacggcttcatcgctgtaatcctgatacaaggtgacattatcccgcaacgtaccactaaacagccaaacgctctgtgaaaccaacacaaagtcaccggcatgcagcggcttattgttaaataaaaccgttccctgcgcagtgagctgaccagtgatggcttttaaaagcgttgatttccccactccagaaggcccggttaccagaatcttagcatccggtttaaggttcaaattgaccgcgtccaaaattaagtgctgatcacggacaacggtgagatttttgattgttaaatggcctttaacgctttcaggttcagctagcgttactggtttttcatctgcaatcggtgcggcaaatgctttaacgaccggcaactcgcgtagttggctcgtcccgacaatctggctttgatacccgctcagccgacgaacgccccctatcactgagtcagctgtcattgtcagcgttacaatgacactcgtggtgacaccaaaccatccctgcgccataaaccaaagtccaatgaacatcggaaataaaaatgatgcaatcgcaaacatccaggaaataaactgcattgaatattgaaagtcattcaaccgctcgtaatcttgttcttctttggtcagatgctgacgaaaacgagcgaaaaacgctggccatgctttaaagttcaaaatatccgttcgtccttgaaatagatctttcatattcaggaccaacgccgcatttgcagccgaccacttttctgaatttttagctaaccggttgcgaccaaagtgactcggtagcagcgacaacgccgaaataagcacataaatcaagcttaaaatcgcattgatcttcacaataaagataaccactacaatcacaccaataatttcttgaaccatatccataagcgcaacaaaataattttgctcaatttgcttgccgacgttggtgacttgattgattgtgtctgaaacctcggttaccttggtgccagcttcagccattgacgtggtaaagtagacggttttcagtgcctgattcaatatcctaacaacgcgttgtttgatacgcaaataaagatacagcgaaacataagtcacaaaataggcccctgttgccattaacacgtaacggccaacagtccccatattatggaaatcgattttaaccaactggccgaacacccagccgtttaatattggctcaaacgtactcacaatgccaacgatcaccagcactaccatcaatggaaacggtaattgtttgataacccaacgcacaccaatccgttgtgcgtgatgatccgccattcagttcacatccttgtcctttagtaacttcaatcggcaactcgcaacttttaatcgtgttgcttaaatgcgaaacggcagggtcaaggtacttttggccaaatccagctgataatgggtgacttttgttggccgaatcgtttgcgccatatcagcaccatgaataatcagtgccagttgccgcccagccggtaagtgataatgcgttggctgcaaatcgagactcacatggaaaaactgtccgggggtgatggtttgaacttcatacgcattctttgggttttgcaaattaatatgacccagcgtgatcaatttgcttggcgtttccttattggccggtttaaattcaacaatatccgtggtcttaaaatcaaatcccagctgcaagccacttgcccccaccgttgcggcattttcctcaaaacgcttggccttgcctaaatcaaccagccgcacactgagaatgccggttggcgcatcaacggctagcgttaactcaagatgcggaatgccttctaagacccgatcatgctctaggaccggctgagtcaaccacagacgactgttaacataggcgctattaggcgtaataattgctttttcaaaacttgcactcgtatcgtgttgggccgtgaatgttgctgtcgcatgatccgaaaattgatcggttgcgctttcaaaatcagttttcaaattagccgtggttgtcacatgctctgcagctgggttcgcaaagtccgaataagctgaccatgtctgcggtgtcacgttatcctgaaccaacacattcggcaaaacctgctctgcctgattggcaactcctaacaattcgtgagtcagccaaagattcatcatgtccagaaagtccaaggaacgaacattgtgcacgtagacatgctgaccttgatgcaggatcaacttcttttgaatcggtaaatccgcaattgcctgccagaaccgaatggcgttctttggtttaacattccaatcatttagcccgtgaatcaggaccacatccgccttgacattagccgcgttttttcggtaattccgcgcgtcccaccaagcagtataagcgcccgttgtccgatcctgatcccgagtcatttgcgccagatgctgctcccaggcctttttaaggcgaatcatatcgccaccggatttttgccgtgaaaaagtatcaaccgccaatacgtcggcatcttcaccttgatagccacccggtgccacaacgagaccattttcgcgatagtaatcataccaactcgaaatcccggcatcagcaacaattgttttcaaaccttcaacgccggtggttgccgctgcaatggccagtgtcgccagataagacttaccggtcatagccactttgccactcgaccaccacgccttaattgcaacgccatccgtgcgattggtaaaagcccggcgtttacccgtcagccattcaatcacggcaactgccccatctgtttcttccggtccgccaattgtgcgaaagccatccgaataacgcgtcccgacaccagctgaataaacaaccgcaaatcctcgcgccagaaaataatcattgaaggcatatggactattttcctcagcgtatgccgctgcctgtttcgtctcacctgtcaccggtcgcgctggcagttttggtttggaagccggcgctgcggtgacttccgctttcgaagcgccatgtggtttaaccgccaagaccgtttccggaacatgcgtcgccgcggtgacatcgttggttccatgaaagtaagggttagcggtaaaaagcaccggaactttcagcccgcgatcggtggctttggggcgataaatcgttgcctcaagcagatcacgttggccgtcgtggtcagaatctacatctgattcgatccagacaacctcccgaacagcttgacgcgcatcaaacacctgttgcaccttgccattaaagagcaaatgagccggttgcgaactttgagcctgaaaatccttaaaaaaaccgcgattggctaaatcatccagaaagctaaccaagtgcttggtgcgcgtggtcagtaacaggtagctggcctgaagcaaatcagcagtatgtagcaaatcatgcgcaacactcggtagttttgttacagtcataaatgaaatcggatcgcttaaatcaaagtccgaaaacgcctcaaagcccaagagctgtagcgcaacattgtaaaagtctgcccgcttcatgtgagtgggctttgtcgccaaccactcagcaagattttggtgtgaattaaccgcaacttgagcaaacttatcctgttgcgccgcgggttgatatgcctcagggaaaaaggctgcgtacatcgcagctgcagtatccgcaaagggtgcttgcggatcggcgggtaacccaatgcgtgcgagttcctttaattgttgatcaatatcaggcgttaaccgagcaaactggtttaatttcatgtgaaaaccttcctcgtatatttaaattactgacaagttctttatgagagtgagcgcgagccagcgcgttcaggggccggagtgtaagttgccttgggcgtgatggccgggctttggccagtgtgcgaccaaggtccttacacccaggctcctgcgctggggagcgcgttatggtgagcgcgactcagcacgtgtatgaacttgacaaagcaccaagttataacagcgtaagatgagagaaatgtgataaacacagtgtagccatctcatttagtgttttcaactctaaaaatattttaaattaaatgcaaaagaaggcttcagacgtgtttttctgtctgaagccttctcaatattgttaaatgcttgactgttttagctagccagcagttcgggtgtcaacaacagcttttgggtggctgaaattaatataattccaggtattgttgccgttcccattcagaaacctgctgacgataagcagaccattcgaggttctttgaatccataaagctttgatacaaatgtttacccagggcagccttgaccacgtcatcggccgccaatgctttcaaggcattgtgcagcgttgatggcaggtcttgaatatggttcgctttacgttcgtcatcttgcatccgataaatgttacggtctaccgcttcttccggcttcaactggttcttaaccccgtcaagaccagcttgaagaatggcagcgatcgctaagtatggattggcagtcggatcaaccgagcgcaattccaaccgggttgataagccacgtgattgcggtacccgaatgagaggtgaccggttcttgccagaccaggcaacataaaccggtgcttcaaacccagggactaaccgcttgtaggagttaaccgttggattattgatagcagttaacgcataggcatgccgcaacacaccggcaagaaaatgcatcgccgtctcactcaattgatcgcctgtatccgggtcaaagaatgcattgcctttgtcgtggaaaagactcatgttgatatgcatcccgctaccgttgataccatgaagcggttttggcatgaaggttgcatacaaaccgtgtttgcgggcaatcgttttaacgaccagtttgaaggtctgaatattatcagctgcttcaagtgcatcggcatacttgaaatcaatttcatgctgaccaggcgcaacttcgtgatgagatgcttcgacttcaaagcccatcttttccaattcaaggacaatatcacgccggcaattttcacccatatctaacggggcaaaatcaaagtatgaaccacgatcattcaagtgcgttgtcggattgccgtcttcatctaatttaaacaagaagaattctggttcagggccaatattaaaggctgtgaacccggcatctttcatttcattaacgacccgaatcaagttattccgcggatcgccgccaaaaggtgtgccatccggacggtgtacagagcagatcaggcgagcaatcttaccgtgatcattctcccaagggaacaacagccaggtgttaagatccgggtaaagcagcatatcgctttcttcgattcgaacaaaaccgtcgatcgaggaaccatcaaaggtgatcttgttattgagcaccttttccaattgtgaaatcggcacctcgacgttcttaatgatcccgttaatgtcggtaaacatcaggcgtaagaacaaaacattttcgtccttaactgtctggcggatctcatcagcggtaattgcttttcttgccatatacgtgaactcctatctttagtgtgattgtcggaagccaatgacgggtcctggatccgggctttgattcagtcggctttgattcagcagttcgtcccgcaacactttccgaacttctgcatcactatcttcacggtgacgcggatgttttagccgcttgacatcagccaacgtaaaaccgtcagccatttgactgcgaatctcaagtaattcgtcaacatcatttagcgagtatgttcggtgattaccggcgttgcgttgtggtttgaccaacccttgagtttcataataacgaatctgacgggcggtcaaatcagtcaacaacataactgtaccaatcggcaagaccgatcgcgttctcagatcagcgatctcagccataggcatcctcctttacaacgatgtcagcttatcaaaccacttaacacctgtcaacgccacatgtaaggttttcttacatttatggttaaattcggtatatttttatttttctttttaatcagttatagaccaatagcgaaatgtcaacgcgataaaacttccctttttccgctaaaatatttaagcacgtgcgaggtaagttcgctatcagtaccttagttaaatttttttgggccagcctctaggtatttttggtctcggaaagtatgataactatagtctgatcattcttgaaaggaagttacttccatgacgttacatcttcacgttggttataccgccagcttatcatccccggacataccggctgattggcttccatttgcctcgcacccacttgcggcatttgctgctgtcgttttacgggctaccgatcatcaggcgctagcacagttaaatgccagcgcgctccctttgcctgtttttgtgatcggtcatctcgagtacactcctgaaagtcaattaaaaatcacccaaatcgagcggttagatactgcgagtctggctcagattcagaccgctgcaaccgagtatgagtctgccatggttcccggatttttacgcgacttactcgcctatgctgcggctgaccccacaagttttgcaacgccgggccatcatagcggtcattatgacgaacttgcgccagccggttatctattgcaccaagcgtatggcgaaaccttctttgccagtgacaccagtgatgtggtcaccgcacttggcgatatgctaacacatggggggaccccgttagcagcagagcaggccaccgcgtgcctataccatgctgatgaaacctactttgtgaccaatggcaccaccggatcgaacaacattgtggccagcgcgttgttgacacccggtgatctggtcttattcgatcgcaataatcataagtccttttacaacgcggctttagtccaaaatgacgcccgtccggtttatttggacacactgcggacgcaacgtggcttgattggtccggtcgatctaaccggcattaccggcgagcgactacggcaactcgcggcaaccgttgaccccaaaaaagcaagcgaacctcgaccatttcgcctggcgattctcgagttggagaccttcgatggtattgtgccaaacgtgcggcaactgcttgatctaattggcccgctagttgattacattgcatttgacgctgcttggggcgggtatgaaccgtttatcccggctatgaaagcaatggacccgctacagttgcaacttggcccagcagatcccggtatcatcgtgacgcaaagtgtgcataaacagcaatccggctttggtcaggcttcccaaatccataaaaaagacgcccacatcaaaggtcaagcccgctacgtcagtcatgagcagttcaatcacgcctacctcaaacacgtcaccaccagttattcctatccgctctatgcgtcactggtgaccaataccgcgatcaatcaaggcccgcgtggcaaaaaaatttgggccgatgcgatcacggcctcgctcgaatttcggcgctccctaactgactcccgattattttcagcctatgagaatccgcagttagcaaaaacaccgccaaccgctgcactaaccaccagtgacgcgtgggccatgacccctggcgcttcctggcatcagcttccacgcttacaacccgatcaagcgtttcttgatcccggcaaagtaacggtcttgctcccagaatcagcggaattaggcgtgagtggctggctagttgatcgctatctgcttgatcatggcattgttcccgaaaaagcagatctgaacagtttgttgtttctggtgacgcccggttctgccaaggctgattggcaacggttgcgccaagtattacgtcagtttgaagcagattattttgcaaacaaaacggttgccgagacattgccaaaactggtggcggaaactggtcaagcctacacaaacctgactttgcgaacactcggtcagaaaatgtctgactttttccgccaagcggggttagccaagcagcagcaactccttttcagtgcgaccaacaacattccaacggccatgacggcgcaggctgctgatcgctgcttcgttcgcggccagtttgagaccattccgttgcaagctgcggctggacggatcgcagttgccggggccttaccttatcctccgggaatttttgtcgtcgtccctggtgaacgttggcgaccagaagcaatccagtatttcgaaaccttatttgccgggatcaaacgcttcccaggatttacgcctgaaattcaaggggttgtcacaggcaaaaacggcgaaccctatgtgcaggtcgttgcggacaaagaataaccgcttgtcaatcgcacgagtcgcaatagcagcatctagtcaaaaaaaaacgattccagcctacgcaatttattgcaaggctggaatcgttttttagtgtcctgtgttttacattagtcagctttgtcaaagaaggtcgattgagccgcgcccatcgttgcaagtttaatgtgggcgtaggttaacccgccttgcagataaagcgtgtatggtggtcgcagtgggccatcaccggaaaattcgattgtcgagcccgcaacaaatgtaccgccagccatgatgacttcatcttcataaccagccattttctcaggaatcggggtgacgaaactgtctaccggcgaattggcctgaaccgccttggcaaacttgatcatgtcgtcacgattgccgaaattaacggtttgaattaaatccgtccgcggagcatcccattttggtgagacgtctaggccaagcttggcaaacaaagctgcttcaaaaatagcgcctttaatggcattgccggtggtttgcggcgaaatgaaaaagccttgatacatgtcagccagcgcgccaaccgttgcaccttctgcaccgccgaggcctggcaccgtgaaccggtagctgatgcgctcaatcaaatcttgcttgccgacaatatagccaccggttttggccatgcccccgccagcattcttgaatagcgatcccgccataacgtcggcgccgacctcaagcggttccttggtttccgagaactcaccatacgcattgtcgacaaaaatccagacatttggcaacacactgcgaaccaccttgatcatcgctgcgatttggtcaaccgtaaacgaatcccgagttgcatagccgcgtgaacgctgaatcgccactaccttggttttcgcattaagccgggatttaaccgcctcgttatcaaccgcaccatctggcaaaagatcgacataatcaacgccaatcccgtattctttaggactcccgatgccattgcctgccagcccaagtacttcttgcaacgtatcataaggtttgccggtaatatagagaatctcgtcaccgggacgcaccaaccccagcaaagctaccccaatggcatgagtgccagaaaccaactggggacggactaaagcatcttcaccacctaatacatccgcgtaaatctcttcaagcacatcacggccctcatcgttgtgcccatagccggtcgaaccggttagatagctctcagcaacatggtgtttttggaaactggtaagaaccttgtcctgattttctaaaatacgggcatcaattgcggccagttgcggtgcaatttgcgtatcgacttctttaaccatttttaataatgcaggatcaaatttatctgtccaactcatgtttttctcctttagccggttgctttagccaatcacgaaccaaagcaacgacagcagtcttttcttctggatgggcaaccaagtcaaaccaatgtgttggcatctggttgcgaaaataggtcagttggcgcttggcaaaatgacgtgaatgctgtttaatcaaggccacacaggttgctaaatcagcttgcccgcgaaagtacgggatcaattctttgtagccaattgcctgcagcgcctgcgcatccgggggaactgtttttagcaggttggcgacttcattttctaggcctgctgccatcatagtatccacgcgcgtattaatccggtcgtacaaaacagggcgtgctgtcgtcaaaccgatcaccaacgtctcatagcgtggttgcggctgcggctgctcggaaaagcgcgtacctgtcaattcgatgacttctaaggcccgaatcacccggcgcgtatttgccgattcaatttggttagctgccaccggatcttgctgctgcaactgctcccacaaccagtgttcgccattttctgccaatgctgcctgccaacgctgacggactgcagtcggcggtgccttgccacccagcggtaaattcaggcgcaaactgttaagataaaagccggtgcccccaactaaaatcggcaggtggcgccgactgctgacgtccgtgatggctgcctcagctgcggctttaaatttggcaactgaataggccatctgcggatccacaatatcaagaagatggtgcggaataccgtccatttcatcaggcatgatcttggcagtgccgatattcatatgccgataaatttgatacgcatcaccattaatgacttcgccttgcagttgttgggccaagtagatgccaagatcgcttttacctactgcggtcggtccaacaatcatcacaatgcggttagccggtttatccatttcattaagctccatgagtatagtataattacagtagtatcacagatcaccaatcaggggggattttcatgaaacataaatttgcacgtggctttttcgtcggcacgctcatgactattggcgctgttgccggcagtgttttcgccttcaagaaaaattatatcgaacctgttgaaaccaaggttgacgaaatcaacgaaaatcggcgcaaagccaatcgtaaacgtttttcggcccaccaaggctaaaccattgattgatcatttttaccaaaaaagcaatcgacttgagcgattgctttttttgctgtctatgtacggactaataattagtcggactttttttgattttgcctgaccaattatcatagccgccttttaaccagctgattttttcaaagccgtttttacgtaatcggcgtgctgctcgcaacgacagtacacccgtcttgtcgtatagataaaccggcagatctttgcgcatttcacctagccgttcccgcagttgggtgtatggcaaatcgcgtgcccccagaatatggccggctttgaattcgttacgttcgcgcaaatcaataatctgagccttacgcatggtgtgttcgaaggtttccggactaatttcgccgccgattgctttaaacttcgacttttggtagtaactccacagccagctaaagccccagtaaattaagaataatccaacaatgatcagtaaataagttaacacgtctctgactccttcttccgcttacttcaatgccaagcttgcggcaccgataacgccagctgtattcccaagtgtcgccaaccgcaaactggtggtttcacgaacattcgggaaggtgttttctttgaaatacttgtcgactcgcgtcagcaagaattcacccgccgcggagacaccgccgccgataacgatgaatttcggattcaaaagattgccgacattggccaaagccaaaccgaggtaaaaagaaacccgatccacaatcatcaacgccagacgatcgccttccttggccaagtcgaaaacaattttgctcgaaatctcatcgccatcgtccaaggtttcttttaacttagagtcaccggcaaattcttctgccatgtcacgtgcaacccgaactacgccggtcgcactggcaactgtttcaaggcaaccgcgtttaccacaggtgcaaagatagccattaaccggatcaacggtgacatggcctagctcaccaccggaaccggcaacaccgtgcaaaagctcgccattggcaataatcccgccgccaacaccggtacccagcgtgacaaacgtgacatcaggatcgttttcaccggcgcctttccagcgctcacctaacgccgcaacattggcgtcattatccacgctaaacggaatgccggtccctgattcgattacttttctggcttgctgcaaggttttccaatttaggttgtaagcaccgatgattgtgcccgcctcactgtccaccgatccaggcgaacccatgccaatgccgacaaaatcagccggggtcatcttgtataaatccagatgttcgttaatagatgtaacaatgtccggtaaaatatggctgccttcatccaaaatgttggtgtcaatactccacctttgttgaatctcgccaccctgcgttaaaatggcaaattttacggtcgtcccgcctaagtcgacgccaatcaatttttggtcattcatgttgatcattcctccgttgatccgaatgcaacggcaattcatgatttaaaggatcccgttcttcctgttcatgtgcatgacgcagcacaatttttgcattcagatacaccttatcatcaatcaattttgcctgatgcaagcggtctaattcaagtgccgcaagttcaatatcccaaacacgtttaccaacatggatatacgtgccaaaaccttttaataattgcaagacatcatagtaagttttcatacgattccgcgctgaattccaaataaaagcaaagcaaccaatccaaagatcaaggttatcgtagaggccagtcgccggccggtgcccatgcgacccaatgctggcgcgcctaacatcccggcagccaagaacccgccaagcaagccgccgatgtgcccataaatatcgacgccgcttgaaaacaaattaaacgccaggttcaaaaccacgagcagcaaaaactgccgtgccagctgacgaataaccggattctcccggtaagtatcccctaacatcaagcacgcacctaacaagccgaaaattgctgtactggcgccagctgccaacgtattgggactgaacgcaaagctcgcaacattaccggcaaatccggcaatgaaatacagcaagaaaaagcgccagtgaccaaataacctttctgtcatttggcctaggaagtataacgagaatccattcattaaaatgtgcgtcaagccgatatgcacaaataccggcgtgatcaagcgccaccattggccgtacaaaatcagcggattggcccgcgccccatatgccaccaaaacagcattgttagtgctgccacccgaaagtgtctctagaatgaagaccaaaatggtaaccgccaaaatgccgttcgtcacataggctgaattttgaaagcgagagcgccagtttgcgtaattcattaaattcctttctaacttcactgcaatagcagcaagtgcgtttctgactgccgaatagttggcttatatcgctaaaaaaacaacaggtgaacctgttgtttttccccgccaccgctgaccatcaatcttctttggtcatgtcttgtagtagtttagcattttttgcacacgctgccaacagcgttaaccgttgactgtcttttggtgaatcgagtagcccttatcttctttaatgtcattcatcttgtagaagtcgctaaacatttccttagcaatttgtaactggtacggcgtggttgtttccgcctttaggtttggaataatgacagcaatcgcgattttagggttcttggccggggcataaccaacaaaactttcagtaatggtttcggttaatgccgagtcgtctgattcgcgcgcaaagccttgcgcagtaccggtcttaccggcaacgcctggattaagcgtatttaaggaagtcgcggtggtccaaccgttcgtaccatggacaacctgccacataccttgcttgaccaagtcaatttgggcctgcgtattttcgattttcgaggtcaccgatggctgtgtggaactcagcaccggccctttgctgccatcgcttaacgtttggctgatactgttaaccaaataaggccgcatccgataaccgttattggcgattgcgctgatatattgcagcatttgaatcaatgtatagttatcgtagtttccgtatgacaagtccaaagccgacccgaccagcaaattacccgaagaatcatgggttttcccttccaacccggcaatttcaccgggaagatcaattccggtcttgatacctaagccaaactgactgaaataaccgcgcattttggtgaaaatgttgtcgtccattttcagataattgttcggcgaataggcatagtgaccttctttcatagccagccacatcatataaatgttactggaaacttccaaggccgaggcagcatccagtgagctgaaagtgccaactggataaactgacttcttcactggggttgcaggcagataaatcggggtatcttcctgggtattatgctctacgctaataacgccatcttgaagtgcccctagcacagttgcccctttgaccgctgacccgacaacaaaagcgcggttaataacccccagtgcatcgtcttcaacttttttggtcttaacatcctgatgttgcccggccatcgctagaatccgaccggtgttaggatccatcgctaccgcataagccccatcggataatccgcctgcgccagccgaacgaatcgaactgaaggtgtcttcaagcgctttttcgaccttcttttgatattcggaatcaattgtcagattcaggttagcgccttgttgccccttgaatttcgacactgattgaacaatctgattgtcattgccaatttcaacttgggtctgactctttgacccctttaaaacattctcgtaggccttttccagataactggttccaacgcgatcattacgtgcgtatccgttagccagataagcctgcaactcgtcagccggcaacccgcttttttcattggatacccggccaatgatagaggtcattgacgtaccgttgggataagcgcgttcccaatcggtgcctaaattaacccctggcatttgcgtcagacgttcacccacaactgcaacttcatgtgccgttacattctggtttttaagatagacagtcgatagttgggtggcaccgttcataatcttgtaaagaccggctgcctctttttcaattggggtcaatgttggcatatgtttgcggacataggcgacttgatatttatacaattcatcggactttgatgaaggtagatcctgaatttttttaggtaactgcttcgtcacctgcttggcaatcttggttcgcgccaaatagtaatcaatgtaatcacgcttagtcagattctcggccggcttgtcgattaacttggccagttgattggcgatctcgtacatctgctgcgatttggtacccacacttttggtataagtaatcgcattattggctttattggtcaccaatgcgcggcctttactatcaaaaatcaagccccgcggcacattcccggtcaccacggttttattcgttcgatcgacttcggcagctaatcgcgggccatttaaaatctgcaaataagccagttgggcaactaaggccgctagcaaaagaaacgcaatgaaaaataataagtttaagcgaaacggaatgcgactcttattccgcttcggctgcggtgtacgaatgtacttcacctaaaattgctccttcgaaatttctatcttttaaagtgtagcaaagaacccgccaaaacgctatgtgtcttatgatatgcttgattcacagtaacagcttaaaaataagctggaattaattttaatttagaagttggtgagggcatgtgcgacaagtctggtcgaaaaagtatccgttaatactgagttttctattaccgggactattggtggctttttactttgccattcgtggtgcttttccatttgggtccagtagcgtcttaaccgttgatctcggccagcaatacattgatttctttgcctacttgcgccaaaccttactaggcaatcccggacaacttttttatgccttcaataaaggcctaggcggtgatatgttcggggtttttgcctattacttattgagtcccttcaacctgttagttgtgctgttccctgccgatctgctggatgtcgccgtttttgtcatcatgatcttgaaaatcagtacggcgggcttgacgatggggtggtatgccaaatgtcatgcgattacgggtttaatgatccctacatttgggctggcttatgccttaagcggctggatgttggccaatagttttaatttgatgtggcttgatgcggccattttgttgccgttaatcatccaaagtctggagacgctgctcaacggcgggcgcgtttttgcttatatcggttggttaaccgcagctttcattgtcaacttctacacggggtatatgatcgctattttcttggtgctttataccggttactggctgggcagccatgccgtttcttggcggcagacagcacatgcaggtctgcgctttgcctgggctagcatcttggccggtatgaacagcgcagtcgtgttgctgccgacctggtttcaactcgcccaatccaaaggcacctataccgtcaaaaccatccaatggcggttcgaatacgcgccggatcaactgcttagcaaaatgctgcccggaagcttcaattttgatcagatgccttcaggataccctaatttttatatcggtgctttaggctttgttttagccattcttttctttatatcacgacaccagacatggcgccaaaaaatggctgctgctttggtgaccgcattcctagtgctttcgtgcatgtttgagccgcttgacttaatgtggcatggctttcaattcccggtttggtacccgtatcgctttacgtttatcttatgcttttggttactcagtctcggcatcagcaccctgcagaagcatcaatcggcgctttcatttcggacgctagttattttattaatcgtattcgggctcatagatggggatgttgcgcttcaccttaaccattacaactttctaaccatcggccacctgatctttggcattggcaccttgttgctcgtcttggtctggctaagccttgatcaccgccgtccgttttggttcggttttgccattgtgttggtcgatatgagcggcagtttaattttaacgctaaatcaattggcgtatcttgatcatcatgcttaccatgattacgccgcggcccttatccaaggcgcacgcaccatcaatcaaacagataacggcttttttcgtattggcaaaacaacgattcgcacccgtaacgatccaatgacaggcaattaccgcggcgccgatcaattcaactcgctacttgagccggccacacctcaattcttcggccaaatcgggcaaccggaagacgatggctcggtcgcatacactaacgggacattgattaccgacaacttgctcggcattaaatattttttaacgccgactcatacttccgctgccttacctgatgccggacaacgacctgatttaaagtggtatcaacagctgcgaaaagtcggtccgtggcaggtgctaaaatccccgtttgcccaacaactgggttttgcggcggacaaagcgttattaaatcagcagctttacagcgacaccccgcttgcaaaccagtccttcattttgcaagccgcactgggtaagaacacaacgccttattttgctgctttgccacttccttcaccgactttaactggcgtccgtcgcgtcaccacgggtacaaacccaacttttgccaaaagcggttccggtccgcacacggtgacatatcaatttcaaccgcaaactggcaaaaattatgtactcaccctcggaagtcattttgccaatcatttggtcaccttgaaacaaaatgggaaaacggtcacgttaccagaaagttttaatgataccatcaccgttaacgtcacccccgcaaacgcggcagaagtccaaacgttaacttttcgactcaacaaaaaagaagcctggtttgaaaatatcggtctgtatcaagcggatacggagcagctgatccaggaccttaagcagctgcaaacaggcggctggcacgtaacccgtgtgactgccaccacacttgccgccaatatcaccattcacaagcaaaaccagatgttgcaaaccactattcccactgcacctggctggcaagtcaaggtcaacggacaaccggtgaaacccaaaaccagtttaggtattttcatggcgcttccgttaaaacccggccattaccatattaccatgcgctatcgaccacccttgttaggctggggcagcttgatcaccatcgccggtgtactgctgacgttttgctggtggctcgtgacatctcgcaaaaaaagaacgggaattattgaagcaaaacgccgtaccataattggaaaataaagtgtccgcgagttggtaggtaccaacttataattaaaagtccgccaccagtgaaacaacgacaattcgctggcagcggactttattattcttctttaaattcgtacttaggctcgtcaagatgtgcatcatagtcaaccgtcatgatcagattctcaaaaaaccacgcatctgtcgggttaacgaaataagtcacgccatcttttttaaccgccataattggctggtcagggtggtcatcgcgcgtcatgcccacgctaaaaccatcatgcacctgggttttaccgtaagccttgccaaagaatcgaatgccggcaccttcagcaggcaaatctaattcgcggtgaaaccattgactagctttatcagtgatcgcgagttgcaaccccatcatctccttgatcattttttaccagaccatgcttaagcgcgtaaatcgctgcttgcgtccgatcttcgacatccaatttggccaatatgtttgagacatgcgttttaacggttttcaatgtaataaagagctcggtcgcaatttcctgattcgacttgccttgagcaataagctgtaatacctcgcgttcgcggttcgtcagctcgtcatactgtggctgcggatgattcatccgattcatcatcttcgtggtgacttgcggctcaagtacccgttccccgctggcagtctgacggatagccttggcaatttcttcggccgttgcggttttcaaaatataactggccgcgccggcttccatggcaggatagactttggcatcatcgataaaacttgtcaaaatgatgatccgagcttgcggccatgcttttagaatttcttttgtcgcctcaatgccatctttaaccggcatcaccaaatccatcaaaataatatccgggcgatctttcagggccatttcgaccccttcttgaccattctcggcttgatcaacgacctctaaatcgggttggacgccaatataggtggacagccccagtcgaaccatttcgtgatcatcaacgatcaatactttaatcatgcgcaacatcctttgataacggtactctgacttcaacactggttccttgaccgaccacgctaacgacctttgccgtaccacccatggctgccgcgcgttctttaatattagccagtccataattgccattactactggtttcttttggatcaaacccgacaccatcatcaaccatacgcaaaatgaccatatcttgcaaccgcttcagatagacttcaagactatcagcttttgcatgccgcaacgtgttgcttaagagttcctgaacaattcggaaaagattgtcctccgctgctgcattcaactgaatatcgtccagttgccaagtgattttgatggtgatcttagtttgtaattccttcagcaactggataatgccttgcttaagtgactttccttcaagattcgtcggacgcaaatgcagcaataaggcgcgcatctctgcctgggcctcattaatcactttttgaatcgtatccagttgcttattcaaagcttcttgtttcggatcgcgggctgccacactgcgtaacgccgacagcatcatcatggcagcaaagagttgctgggaaacagaatcgtgtaattcacgcgctaatcggtggcgttcgccggttaaaatggcttcccgcgtctcgccggaaaatcgcaccggtgtgttactataacgttcgatttcacgttgcaagcgtatcattttttgccgtaatgcttcaagcaaggcagccggttgttttcccaatgccgcttcagcttgttgcgatcgattaaatatcggtgcctgatactgtccagcgtttaattgggctaaacgactatccaactgactacgcacgacccgctggcgccaaagcacaatcaccgtgacaccagaactaatcaataacgcgccaatgagcaaataaaccagcagtggcgccgacaatacattggctaataaaaggcgtagaaaatcgtgctgagtaacttttgccagcataaaaaccaaacaggcctcgactagaagtgtccagaccagcaagatcataaaaaaaccgactaacattcgtcgcctcataccgccagcacctccaagtcacctaccactacattcgtaatgatatggatacgccgtggtgcatcgtcataattctgcgaatacatcgttacgctttgactatgcagcatcgagtccgcattttcaaaatggagccgcccgtaaaatgtcgcatgttcaaccgcaacgccaacgccaatgggaaccagaattctggttttaccaaagcctttgcgaatcataataacactgtcgcctttaggcaggaaagtatcccctaagtcaataatggtatcgccagcaggaacgaccatattgatgtcgtcccagtcgtaactcggtgcaatggtttgccggttgccccatgaatgaactgtgcggcgacccgcttttttcccaggctcctgcgtgaccggtgcaacgtattgtttgcggtcccacattgaaaaacccatccccggcttggttaacaccatgattaggaacacgcctgctaccatgagaatcaaccagactgccggattaataaagattcccagtaccaacaggataccaccaaatgtcacattgaacgcacgcattcgatgccaacgcgcgcctaaaaagagaaaaagaacgccaaataggatcgttgtcaacgccattggattggtgatgatctgaaaccccagccagaggatcaacgcaaattcaattcctaaaaacagttgccagcggcgcattgcgatccctccttatctaaaaatcgttgtgaacttagagcacactatccgaaaaagcctgctactattcacgaattattataacgaatcggaacacaactcgcttagggcgtaaggctgatattcattggaaactggcacgaaaactgatacaggtggacgtcattgtgcgcggccaagcacaaaaaaacggcaatcactgctcttgcatttgagcgtgattgccgcttttgccttacttacaaaactgaagcatacaaatcgtcaaaaactcgcttatccttcaaccttggtaatcttaacggtcatttcaccaccgggcgtgttaatggtgacttgatcgccaactttacgtccgatcagtccttgagcgatcgggctttcgttgctgattttgccgttgaaggcgtctgcttctgccgcaccgacaatttcataagtttcctcatcgccgtcttcttcaaaggtgacttttttaccgattgacacttcattttttgcgactgccttagcatcaatgatttcggcatagcgcaacatcgtttgaatcgtaacaatccgattctcaagggttgattgctcatccttagctgcttcatattcggagttttcggataaatcgccaaaaccacgcgcgactttgatgcgttcgatcacttctggccgcttcttggtttttaattcctctaattcgttttcaagtttctttttaccttctgctgtcatcggatagcttttgtctgccataaaatacttacctcacttcttattttctttagtcactttattaagccagcaaccatttgtcaatggctactcttctaaaccgcgctctgccaaaatacttttgatctttgtgaccagcaaatcgatggcgacctgattctgaccgccttctgggacaatcagatctgcatagcgtttcgttggttcaacaaactgatgatacattggcttcacggtttttaaatattgattaataatggattccagcgtgcgaccacgtgacaccatatcccggcgaatacgacgaatcacccgaatatcgtcatccgtatccacaaacactttaatgtccatcatgttgcgcagcgcttcgtcatcaagaatcaagataccttcgagaatgatcacgtcttttggctcaaggtgaaccgttttatccgagcgattatgaatcttgtaatcatacaccggctgatcaacggcatgtcgatgaatgagttgctccagatgatgtttgagtagcggcgtgtcaaatgctaacgggtggtcgtaattgatcttcttccgctctgaaaacggtttgtcacttttcttataatacgcatcctgtgccagcaagagcaaggaatgaccggaaaaatgattaaaaatagcccgactgacactggttttgccactggctgagccacctgtcacaccaatcacaatagctttcttctgttgcattttagccttcctcactcagtatataagatctgcgcataacacagccttggaaataacgtccgctggttggacactgcttccaaggccgcttaacctgaaatttgatttagcttccggacatgattttatcatatccaaagttggctgcctgctgcgctgtcagaacgtcacgttgttgattggattggtttgatgatcgcgatgccttcatcaacggttgcgcttatttatcggcagcggcattatcgcttgcaaacttagctgtattagcatcatgttgctcgcgagtcgttgcatacagcacttcacccgtcttcagatttgcaacaaagtacagataatccttgctgcgggcattcggactgagaacagcagcaatgctttgttcgctcggtgaatcaaatggtccggggccgtaaccggtgtgcacataaaggttgtacggtgaatcaacgctagtgtctttgttggttaaatgcgtcttatgcgtattcaaggcatacataacagagatgtcggactgcagtggcataccggcatcaatccggttcaagaagacgcccgcaatggtacgacgatcttcttgggttaccccttcacgctcaaccaacgaagccaaggtcatcacttcctgaacagaataaccttgtttcttaacgctcttgtaataactttgcatcacgctatcagtttttgccaccattgcctcaaccagatccttggtggtttcaccggcgctcatgctataagtggctgggaaaagatacccttccagacgataccgtacccctttagccgaggctgcagcgctaagtaacttaggatatttcttagccagctggttgaaaaaggtttggtctttcatcaaggccaggaattttttgctcgtcagattttgattggatttagccaatttattaacggaagtcgcaatttgctcaaccgttgcgccttcttttaccagcaactgtcccgccgcggctgctgaagtaccgcctacacgcaacttttgaatcacctgatccatattgtcacgttgcgttagttgatagcgtcctgcctgaaaatcggcaatattgtgaaacttcacgtaatagttgaagaccatggcacttttaatcacatgcttggcttctaatctgctcgcaatttgtttcgtgctagagccagccgggactgtcacattaatgcttgttttgccattagggtcgactggctgtaaggcggaattgacataccggtagcccatcagtccaacaatcacaagcacagcaaataaaataccgagaacccaaccgacgattttttgcgatgcttttttctcatgttgccgctggcgtcgtttacccgccacgtccggggatcgcttgtccaaaaagatgcctcctttttctcatgccaacgttaacctcatccgttatgcttgtacacaaataaccgcccggcataacagacaaagctatgacaacgccattatgtagcaacgtcaccgtcagatcatgcttgacggtgacgcgatacagtctgaatgttactgagtccactgaccgttgccagtgactatcataccgaaccaccggctaaaatgcgaccaacgattaacgaatggttgcccctaaatcagattcaagtgctgctttgactcgatcaaaagcctgcgtaacttcttcttcggttaatgtttggtcatcgcgccgataagtgagcgtataagccagactcttttggcccggcgccatatgcgaacctgcataaacatcaaacaaggtaacgtctttgagatatgcgccgccgtgttgctggaagatctgcatcacttcggcattagtaacggtatcggcaacttgcagtgcaatatcgcgcgtcacagccgggaacttcggtgcaggctgggcaatcttctcctgacgcggcgccgcaaataaggcatcaaggtcaagctcaaagacaaaggttgcaggtagatgctgttcatgttcaaacgccgggtgcaaacggcccaagaagccgactcgttgtgtcccgaccaaaatatcagctgcctgacccggatgaagttcactcaccgcctgagtcactgcaaagtgcaccggttcagccaatgaataatcctccagcaagtgcatcacaatgcctttgacatagaagaaatcaacgctgcgtgcggcttgatgccaatttttggcggctacgtggccagtgatagcaccgcctaaatactcgatttcagttggccgtacctgatcaccggttttggtaaagatccgtccctgttcgtaaatggcaacatctgtttctttacgcgcctgattatatttaatgacatctaataaacctgtcaccatattcattcgtagtacggcatggtctttggtcatcggtgaatcaacctgcgttggctcgccgggttgcaacttaaatctggttgccgcttgctcagtcgtcaggccataagtaatcgcttgattaagacccaacccttccaggagatggcgggtacggcgaattcgcttttgcgctggtgtatactcgccaatcgtcatcgtagtagtcggaagtgtacttggtaaattgtcaaagccataaatacgggcgacttcttcaaccaaatccgctttgatatgaatatcccaacgccgaggtggaatcgcaaccgcaaataaaccatcagcaacttcaacgccaaaacctagttgttggaaaattcgtgtcacctggtcttggcttaatgtcgtgcctaacacgtgattaatatgatccagcgaaatatcaaccacgacatcttttgcgtcaaccgcagtcggacttacggttcccttggcagcctgtccgccacccaagtcgctcatccaggcaactgctgcatctaaagcgcgattaatatcagctaagttaatccctttttcaaaccgcgatgatgcctctgagcgcaaattgtacttcagcgctgttttacgaacgttaaccggattaaaactggcagcctcaacgacaaccgtggtcgtggtttccgagatctctgaatccaagccgcccatcacgccggctaacgcaactggcacctgaccatttgtaatcacgatatcgctgtcatctagttcgtgttcgccaccatccagtgtggtcaacggttccccattgcgcgcccgccgaacctcaatgtgctgactaccgagtttagcatagtcaaacgcatgcaaaggctgaccatatgccaacatgatgaaattagtgatatccacgatgttgttaatcggacgcacgccagcattccataaccgccgttgcaaccaaagcgggctctctttaacggtgacgtggtcaatcacccgtaactgataactcggggcatcctgagcgtctttaacttcgacactgagataatccgccactggacgatcaccttctgtcagcagcttttcttcaaagtgcggcttttcatcataagtcgcgcccacttcccaagcaactccgcgcatgcctaaagcatcagcgcgatttggcgtaatctcaaaatccaacacggcatcatgcatcccgagcgcggccaacgcatcactgcctggttctagcggttcattaaaaacgtaaataccgtttaaataagctttgggaacgacattttcattaaagccgatttcttgcaaagcacaaatcatcccaaggctttcttcgccacgcattttgccttttttgattttgacgttatcggcaatccgtgctcccggaagcgcaacgatcaccgtttggccagccgcaacattgggagcaccgcaaacaatctggcgcggttcatcttcacccacatctacctgacaaaggttgaggtgatcagagtttggatgaggtttgatcgccaataccttaccaacgacaatctttttcaatccggcatcgggatgtttaacatcgtccacttcaattccggttcgtgacactttatcggccaattcttccggtgataccgggatgttgacaagctcttttaaccaatcatatgaaacgtccatcttaaccctcctgactgaactgcgtaaggaagcgcaagtcgtctgtgtaaaaactgcgaatatcgtcaatgccgtatttcagcatggcaaaccgatccgggccaagaccaaacgcaaagccgccatatacatcggcgtcaatattagccgcacgcaaaacattcggatgcaccatgccggcaccgagaacttcaatccagccggtatacttgcaaacagggcaacccttgccaccgcagcggaagcaggaaacgtccacttctacagacggttctgtaaacggaaaatagctcgggcgcaggcgaatcgtccgatcagcgccaaacacatgctgacacatggcgagtaacgtccccttaagatcagccattgtaatatgcttgtcgatcaccagaccttccatctgatggaactggtggctatgtgtggcatcatcatcatcacgccgataaaccacgcccggactgatcattttcagcgggcccttagtaaaatcatgtttctccatcgtccgtgcctgcatcgggctggtttgggaacgcatcagcaactcattggtaatataaaaagtttcctgcatatcccgcgccggatggtccttggggatgttcatcatttcaaagttgtaatgatcctcttccacttccggaccggttagcacttgatagcccatgcccataaagaagctttcaaggtcatccataatctgaataataatatgcggtgtgcccgccgttaccggatcgcctggtaatgtgacgtccacggtttcagacttcaatttttcgttgatgactgcctgctccagttgagatttacgcgtctcaatcaccgtactcagttcatcccggactttattggcaaaggcaccgacttttggccgttcatctgctgataaatccttcatgccgcgcaaaacgctggtgatggggccttttttccctaacaactgaacgcgaatctgatttaattcgtccaacgaggtgatcttttttatcacctcattattttgctgaaaaagttgttcaagtttcgtttgaagatccatgttcttcctccttgactgctaacctgagaagtccgccgttgatacgtttgaaggcataaaaaaagtcccttctcaaaaaagggacgaagcatcgcggtaccacccttgttcatgattaaaaaacctcatgcactcaacaaggtaacggccaggccggagctttctaagtgttgccacctcaaaagtcaactcagaaagtgaagacaaacattttggtaacagacgtcttgcagtctcgtgaacgtcattccctgatttaccagcctgtttgggctttcgtcattgtttttacatttttttgataagacaagcttagcaaattcagcgcagacgtcaagagctgatggctaatagttaggtagttaggctctttttacttagggcctctcagatgtgttccggctaatgatcaacaatggcataagaaaaaaacgcgtctcttacgcgtttttttgtttttcattggcatggcactcttcatcggtaacccatgcatcaccccaggcgtgtgcagcggccatgactgaattcaaagcccggcccttatctgtcagggcgtattcaattaaagccgagtccttgtgcgtcagacgatcaatcaaaccctcgccttcaagttccttcaagcgttcgaccaaaacccgatccgaacaccggggaatcagttgcgcaatatctttaaaccgagaattgccattgtttaacaaaacttccagaatcaaaccgttccacttcttacccaaaatttcaaatgtgtgctgaaacttaggacaaagagcgacttgttgactttgacattcggttttactggttactgttgcatccactctactcacctcatcatacccgcttacttacatttagatagtgttagcataacacactcccaaaatattacaagtcatgcttatcatcagcaactcaaaagctaattgatgcgtctaaaataaacgaaaaaaactcacaatccgttttcaaagcgtggcactgcatccaaagttgaattttgctctcacaattaatgtcggctcgtgggggaaaatatacccgtcaaaaaagagccgcgggacaccgcccacgactctaatatgacgacaataacaatgagctgccgtcaatcacgatcctaatttaaagcttttaagtgagtgtgaatcggatgccggagcttgtgcatccagggtacaacgacctcatccatcgcagcataatcatcaactagagaaacaacaaaactttccttatacttcggcaagccaactgttgccccccacatgtgcttgatgataatgtctttttccatcggtgacaattcggttaacttctcagcattccgtaaagcaatccggggatggataaaggcatgcgttcccaagtcaaacttggttttgcgccaatcatagtaaaacagatcgtgcaataagccggctcgggcgatcgcacgaacattcaaatgcaggcgcttcccaatcaaataactctgataggaaacactaattgaatgttccaatcggttcgaataatggtgttgtgggtgttctgccagtcgctggacctcaggcttagccaataaatcagccacatacccaacgtactcagcatccgattgccaatcgcgttttttgctcaagacatctgctccttttgtggtttgatgaacacacccatagtataacagcttcccaccctaaaaagcacgttcgtaacacattcttaatcaccgactaagtgaaacatcatgatagccgctgcgacagcgacattcaaagattctgcttgtccccgaatcggaatatacaggttcgtatcggtttgctttaaaagaacaggatccatgccattgccttcattgccgacaacgagtccgaactgtgcgctcggttgaatactgcgataacttttagctttatcattaagctccgagccataaacgggaatccctgcccgttgcaaggctttaataacaggcatcaattttgccgatacgatgcgcacgtgaaattggctgccttgcatcgcccgcaaaactttcggaccaaaagcgtcggctgttccattaccaaaaatgacggttttaatgcccgcagcatccgccgtccgcaccaaggttccaacattaccgggatcctgaatcgcatccaacattaaaaactgcccacttaaaggatctggcaattgcccggcctgacgtggcataaccgcaaaaattccctgtggcgtttcggtgtcactaagatgctcggaaaccgactccgaaatctgcgtcattttgtcataaaacggcttaagcgcacgatcatcaacatacttttcggtagcataaatatcataaggcgtctgcccactcgccagcgcctcttgaaccaagtgccgcccttctagcaagtagcgcccagcatccttttgatgtttcttaaccgttaatttcttggccgttttaatgcggtcatttttgggtgatgaaatatattccataaaaatctccttttaaaaagtgagcgcgagccagcccggttagaaaccggagcataagtggccttgggcgtgatgacccgggtttggtcattgcgaccaaggtccttatgtgcaggtttctgggctggtgaacgcgttatgatgagcatgagccagcattaaccaatcgccagttcacaaacaaaaatccgactttagcctcttgtcgcgttttctatataccttatgctacactagtatggactgtggagaaagcaaagatgaagatgttttcatcacctttcgacccaaatcttctgcacgaaaggaagtgtctttttggtcaaactcgctaaacaaatcgtcgttcggggacgggttcaaggcgttggttttcgctgggccacgaagatgattgcggataatctcaatattagtggcaccatcgaaaatcgcgctgacggctcggttttcattcaagcagccggtgaaccgctcaatctagccaaattcattgcacaggtcaaagccggtccgaatccttacgctaacgtgtcgacttttgaagaaaagccgcttgaaaacgtgccggacttcaacggttttcgtgtaaccggttgaatccgcttggtccatacagtatagttaaacccgatgacattttgaagggaaattattcatgcacaagtcgaaaaaaatatttgcactaggagcggtaggcattctgccgctattattatcagcgtgttcgccaacgaaacaaggcgtcacactcaagccgccgacagatccatttttcggtactttctataagataatcgggttgccgttgcagcatttgatggaatggattgccggattcgttgggtcgaccagcagttacggcattgccattatcgtcattaccttgttggttcgcctaatcgtgttgccactcatgctgcgccaacaacgaaccatgacggcttatcaggaaaagcagaagattctccaaccgcaattaaaaattgttcaggatgccgttaagcgcgcaaaaacgccagaacaacaaatggctgcgaataattacatgcggaaaatttattctgctaatggcaccagcatgatcccgtcaatgggttgcttgccaatgctcattcaatttccaattttctcaggtttgtatcaagctattgcttattcacctgaaatttcacacgcaactttctttggcattcagctggggcattccagttttattgtcaccattttagccacgttgccatacattattgtcagcctgatcatgcttcaaggcgtcccgccagagcagcgaaaagctatgcaggcaacggctttcctgagcccgatcatgacatttgtgttctgtatgatgtacaacgccggattgggtctgtattttggtgccggtgggattattctcatcatccagcaagccatcgtgacttatattgtgacgcctaacatccggaaacggcttgatgccgaaatggaagaaaatccgcctgttgaagtcgttaatgaacatacctttgatgactggggtgccgtcacggccactgccggatcgactggaactcaaagccgccagcaaccagtagatccagatgccattgatcatcaacaattacgcaaacgaaacgccggcaaacaacaacggccacgtaagtaaattaccaacacattgaagtcgtctttattaggcggcttttttgtttgtcgaaatttgaattctctataaacacaaaagtggtgtacacgcctctgcttacaattggcaaagtctcctactggcagcgcaaaaatatggccacacgccaaaaaccggtttcagagttaacaagaatgctcacactccgaaaccggttcatttattgattgtgttccgactacaaattgcttttaattgacgtatcacttttcggcgcagcagcctgctttgctgcttcttggcgttgaagtgctttggctttgtccgccgaaatcgttggcaaatcaatccggaagatcgacccatgacctaaagcggagtctacttcaatttgaccatgatagctttcgatcagttgctgagcgatagatagccccagcccattgccgcctttttcgcgactgcgagccttatcaacgcgataaaagcgattgaacacgcgacgccgatccttttcggcaataccttcaccaaagtcctgaacggcaactgcaacgccattaccactgttttgggccattgagacatgaatttccttgcgatcagtcgaatacttgacggcgttatcgaggaggataatcatcacttgctccagatgattgcggtacatgcggacaaaagttgtctgctccaagtcatcgtctagcgtgaacgtaaactccggatgaatcatgcgaaaatcggcaacgacctgctggatgactttgtggacatccacaaccgcattgggaaactgaacatccacctgatccgcgcgcgtcagatccagcatttcctgaatcaggctcttcatacgggtgatttcttgaagtgaagcagccagcgattcgtcaagcacttccggatcatccttaccccagcgattgagcagttgtaaatgcccttccaaaatagctactggggttcgtagctcatgcgaaacatcctgtacaaattcaccttgctggtcaatgtaacgttgaatccgatccagcataccgttaaattccagcaccaaatcgccaagctcgtcattgcgcttcaatgccggaatccgaaccgtgctttgcggctcctcattgacaacatcaatggcattagtaatcagcttaatcggacttaagaatcgggttgccagcacatagccaattagaattgaaatgagaatggcagcaaaacttaaaccaataattaacaaggtaatttcatgcatggtcgcatgaaacgctgtcagtttgttcgtcacctgaacgtaaccaatcaaatttgaactctcagccgaataaataggtgcagttccgaccagtccgttaaaatcaccgatatgactttcctgaacttcaaatccatgaaccttacccaacgtgatcggggtgtcgcgcgactgaaaaattgtcgtccgatcacgcgaaaacaccgacacgctaacgtctgcctgagccaatttctgaataacggaatcagaaaaaatccgcgtgtgtgactcgctgggagtaggtagtgacgactgatcggacggcgttgtcccttccaatcgcggaaccacctgggccatggtcaaatcgccactgactggggaaagccgttggacgactgtgttaagggtatcggtgacggttcgacgctcctgattaatcagaatctgccgcatcgcaccataaaggatcattgaaaaagtgacaaaagtgacaaaaatcccgacaccaactgtgacggcccatttgaccttcaacgagatgcggggattcttcttttgcttagtactggtttgcttgatatgcattatgaccgcataacatagccggttccccgaaccgtctgaatataactaggttcaccgggccgatcaattttatttcgaatgtagcggacataaacatcaacgacattcgtttcaacatcggaattataaccccagactttagacagcaaaacatcacgtgctagaacaacgttgacattttccattaaagttaaaagcaattcgtattcacgcttggtcaattcgatgatgtcatcgccacgccgcacaacgcgattttccttttcgatgacaagatcgcgatacttgatggtcgtttgcttggcagtgttgttttcgccctcaatactaattcgacgtagtaaggcgcgtaaccgtgccagcagctcctcaatggcaaacggcttaacaatatagtcatctgccccatgatccaagccgctgacccgatcaatcaccgaatcacgcgccgtcatcatgataatcggcgtattcttcacctgacgaacacgccggcagacttccaatccgttcagttccggcaacatgaggtccagcaagatagcatcccaatcttctgctagggctgcttccaaaccggtacggccattaaagtgaacttcggtttcgtaaccttcatgctttagttcaagttcaacaaagcgggcaagatttttttcgtcttcaataattaatattttactcattagcgtctccttatactttcggtgcatgaacacacaatctgaatctatttttagtttctcataaaaacatacgctaggatagtttagcacagttttctcattttgactatcagccccgcgttaataggcatcaatgctaatggaaatgcctattaatcaaggctctcatttttcaattcggctaattctcataataacccgcgatactttctaatctgtctttacgaaacatataccattttttaagtctgattgtcaaagcctttgtgacaaggatagattaaaaaaaccaattcacatgcgacacttaatcgcaggtgaattggtttagacttaaacttcaatgaattaagcttcgtcgtaccacgtgtaatggaaaatgccatcacgatcagtacgttcatatgtgtgggcaccaaagtagtcacgctgagcctgagtcaggttggccggcagaacaggggcacgataagagtcgtagtaactgatcgccgctgagaagcccggcaccggaacgccggctttaacagccaagccgaccaagtcacggacactttcctgatagttcttagcaatattcaggaagtaatcgtctaacaacaagttctgtaaatccggcttcttatcataggcatcggtgatattttgcaagaagcgtgcgcgaatgatgcaacctgcacgccaaatcttggccaattcaccgtattgcaggttccagtcgtagttgtccgatgcaacgcgcatttgttcaaagccttgagcataagacatcaacttgctgaagtataacgccttacggatcatctcgatagcttcttttttgtcaatcgtcacattgccaaccggctttggcagaactttacttgccgcaacccgctcctgcttcatcgcactaatgtaacgcgcatagacggattcggtaatcacactttgcggaacacctagctcaagagcagattgtgaagaccatttgccggtccctttgttgccagcgcgatccaaaatcacatcaacgatcggcttgtcgctgccaagatcgtctttacgggtcagaatgtctgccgtgatgtcgatgaggtaggagtccagttcgcctttattccagtcactaaaaataccggcgatttcttctacgtccaaaccaagcaaatgacgcatcaagttgtaactttcagcaattaattccatatcgccgtattcgatgccgttatgaaccattttgacataatggccggcaccgtttggcccaatgtaagtcacacaaggtgcaccgtcatccgcttttgccgaaatagcctccagaatcggtgctaccaagtcataagcctctttttggccgcctggcattaaggatggtccgtgtagtgcgccaagttcgccaccggaaacgcccataccaatgaaattgatcccggatttatccagttcggcactgcgccgcatagtgtcttcaaagaaggtgttcccgccatcaatcaaaacgtcacctttatctaacagcggcaataattctttaatcacggcatcggtaccggcaccggctttaaccatcatgataatccggcgaggcttctctaatgaagcaacaaagtcctcgattttatagctcgggaccaatttcttgtccggatgttcttctacaaccgccttggttttacttccggtacgattgtagattgcaacggtattgccgcggctttcgatattcaaggcaagattcttgcccataaccgccatgccgacaacaccaatttgtggtttatccattaacatggacctcctcattcatttcatcatttacgacttttatgttagcagaaaccgccgcgctttaacagtcggcagacgggttatcacagctcaatttgatctaattttttgaagtcatctttctagtggcgaaacaagcttggcggataaaccattttttgttaacagaaaaaaacagccccttctaaatgccatcgcgaaggtgccgttttccaataaatcaactcgctatatcatcacgactgatcatcatccgggaacatcccttttaatttcgtaaaagggttatctgcctgcttctcttttttaacggctttatcaaaatcttcttcagccatgacttcccagtcctcgcctgaaggcatctcgccactggcggcttcttctggcgttagcacttgcatggggatgcttaacaacaaatgatcctccactgccggcaacaaatccagctccggatcctcaagcggcatcagaatttcgccgtcttcatattgatcggcatggccgtcatcggtcagatagatctcgctaaacgtgaaatcctgtggcagcgtgactggggtcaaactgcgcgtcgagggaactaccaaagtaccctttaagttgacactaaccagaaaatcgccgcgatcataaacaatatcgccgtttacctggatgggactgacatcaagaacctctggatcacgatcctgcaaatctgccttgacatccaacgtggtactaaaatgcaacggttcctgatcgtgtttcattaattcctgaatcgtccatttcaacatgttattttgcctcctttagacgcgcacactaaccttaagatggagttatgagcgcgtttcacatcaacggtcggcggccataattttgttcaacaccgctaatcgtggtgattaatcgatccgcacgatgggtcatcgcaaggatcccattcggtgcaagcatatcagcactaacgcgagtgagcaagggccagccaacttggtgtttaacctggcgcaagtattgctgaccggctggcgtaaacccgagcacatgcagctgcggcaagtgccgagccttttccaccgccgctattgtcatattcagcgtgattgctaaagctaatcgccgcagtctggcgtaggtataccgcttggacttaacccgctttaaaaagctcgtcatatcaatagcgtcatcaatctgctgggtgaaacgatattccagcccttccgccatcgtggcaacctgccgcaactgcgccaaatctgctgtctgtagacgatatttcaaccatggaaaatattgcgaccacccatattgttgctgcttagaataaaccggaatcagatctgcaggaacaatcttcgcgagcgattcacctctgcgcaatcgctgacgaatcgctgacgcactggccagattagctgtcaactggagcgcgtcatgggccacgccttgtcgaccgaacggataaagctgcatcggcacttgcaacgccaaaaccgcttttgcatagctcaaccccaacatgaaattcgggtctgtttgcgtgatgccggctgcttttgcataagcggcattaagctgggtcgcataagtctgggtataatccgaaaatcccggatccgtcaaaggggctttttctaattgtcgggcaaggtccagataggcaagttcggggtgttcggttccaaatgccagtgcggtcacgcgtaacgccgctaacgtcgcaaccccggcttccgcaaattgatccgcagcttgcaccgctccggttaccggcagctcaatgacaatatcggcgccatgatccaacgccgcccgcgcccgcacccacttatcaaaaatcgcgggttcgccacgctggacatagtttcccgacatcaccacaacgacaacatcagcttgcgttaattttcgggcttgtgccagtgcatatgcgtgaccagcatgaaatggattaaactctgcaatcataccgaccgcttgcatagacgcctcctaataaatttgcttattcatttggctcatcacgactattttttgcgcgcgtggaaaaaccagcgcgtactttcaggtcccaccggctcgttgccaaaatcgtcggtaacctcaattttttcgaacccggcattctgtaaggcccgcaaataatcagccaacggataagtgcgttccttgtgtgtttctgtcaaaggcttataggcatccaaggcttcgtcgtacataaaaaaggtgaggtcatgttcaatgctatgtggatgctcaccaataaaactattccataagaacgcaaagtcatccgtttgatagttgtacatataacccggaaagacctgatccatttgataaagcgagtgagcatcaaaaagaaagtcgccaccagtcggcaactttgacgctacctgcgtaaagacctgttgcacctcatccagattctgcatatagcaaatcgaatcgtcaaaacaagtaacaattggaaattccggtagcgtttccagatcacgcatatcgccttgaagcagggttaatgccacccctgcagcatcagctttttcctctgccaaggtcaacatttcttcagataaatcaaaatccgtgacttgataacctgactgagccaatagcacggccaaaaagccggaaccgccagccaactcaagcaatggctgatgactcggcttcactcgcttgaccacataatcacgccaccgttgatacaatgactgatccatcaattggtcgtaaacttcggcaaaggtcgtgtagatcatgcctcaacccactgatccactttaaccagcggtgcatcttgccataacttttccaggttgtagaattgtcgctcttctggcataaagacatgaaccaccacatcgtttaagtcaatcagcatccacttggaccctttttgtccctcaatccggcgaatctcaacgccggccgcttcttctttttcttcgatttcatcaacaattgcctgaacctgacgatccgaagtgccgctcatgataacaaaataatcggccaacagactcacaccgcgcatgtccaatgcaacaatgtcttcggctcgcttcgaatcaccggctttaacagcaatttccaacatggtttttgcgtcgatcataaattactcctttgataaaaatgcattgtaggttaacagtgttttcggataaaccaattgacgcgccccgattagataggtcagggtgttttcaagctcaatgcggctggcttcttccaagttagtttcggctgccttgcgtgctttggcctcaaccggcaatgaccgttggggttcaataaagtcaccgacaaacacacattcatccagcttggtcatttccggatcaccggttgtatgccgcgcaatagccgtcagcacttgtttatcggtaatgccgacttcggtttgaataaaatgaatcccgacaacgccatgccacacaccacggccatactgcagtaacttggggtcaaagccgtcttcgataatcacgcgtttatatgtttcaaccgagatttctttaccataatcatgcagtaagcccgccaaacctgctcgatccacatcttggtcaaaacgctttgccaattcgatagccgttgcttcaacccgcaaacaatgttcatagcgaggctgatcaaggcgattacgtaggcgattcagaatttcttttcgactcaagccatgcgttaaacttgctggatattgatgttcattcacgatataatccctctttttgaatatagtcaatcactgggtcaggcaccaaatacttcaagctgcgccccgcttgaacgcgatcccgcaccgctgtcgaactgatatcgatcagcggcgcgtcaacccataaaatcggatagcggctagccggtgtatacccgcgccgcttaacgccgacgaaggttactaattttaccagttcatcaatgtgcgcccattttggtaagtagtcaaccatgtcggcaccgatgataaagtagtaatccgtatccggatgaagtcggtgcaactcctgcatggtttgatacgtgtaactaatgcccccacgccgaatttcaatgccttccaacccaaaaagtggattatcggcaatcgctaattgtaccatattcacccggtgccgagcagaaatggccgtttttgtatcaacatgcggtggcatattatcgggcatgaaataaactttctccaagcctaattcagtgcctgccgcttctgccataatcagatgaccgttatgaatcggattgaaggtcccaccgaacaaaccaacctgcttgcgacgatgcgttcccagaatctgttcgcgcatcgcaacagaaataaccggttgcgtcaacgtgacattctgcatctttttcatcacaactcctaccgcgcattgacttcaagactgatgcgacgatgttccgacttttcagcctgcttataaacgatcacggtgcgcccaataatctgcgccacttccaaaccggcaatcgctgcctgtaacgtatccgcaacttcttgcggtgtatcgtcagcagtcggtaacaggctgatcttgactaattcacgggtttcgatggcatcctttacgccagcgacaaaagcatcgcctagcccatttttgccaacttgaattaacggtttggtcgtcattgccaaactgcgtaaataacgtttttgtttaccagttaacatgtttttaacgctcctctgattcagttgtgccgcctttccaccacccgtgcagcttttgggtcgctgcgggttggctgcggctcgtttaaataaatgctttacgtaataaaacatccacgcctttaggggcataacctgcaatggtgacgccagccggtaccgtaatccagccgagaccggcaaaaaccagatccgatttttctttcggcgtgaattcaaagcgaaccagcggcggaaaatctctgacttcatcagcttgtggcggcgctagaagacccccgacatgcttctgataaaactcatcagcgttgatcaattttgtccggtgcagcggcaattgcgtatcggcgtaaatgacaaagctttggcggccgccgcgaagataatcgaaccgtgccagtccgccgagaaagatggtctggccttcattcaactgataagtcgccggtttaatcaccgaagtcggggataccagtttcaaatccttggagccgacaaaatgtgccatctggtggcgatgaatgatgcctggcgtgtcaattagcgactgcccatcatctaacggaatcataatgcgatcaagcgtggttcccgggaagcgcgatgttgtaatgagatcctcgacaccggttaattgcttaataatgcggttgattaacgttgacttgccagtattggtcaccccgacaacgtacacatcgcgatgttcgcgatacttctcgatagcggtgagtaactcgtcaaccccaaatccttttttggcactggccagcaaggttgttaccggccgtaatccctgcgctttagcttgctgctgcagccagttttttaatttattgggattcaacgatttaggcaagacatctgccttattcccgaccaaaatgacgggattatccccgacaaaacgatgcaatccgggaatcacactgccattaaaatcaaaaatatcaatgacattcacaatcaatgcgttactttcaccgatcgcattcaggaggcgtaaaaaatcatcgtcagttaacgtgacgggtgcaatttcattgtaatgccgcagtcgaaagcagcgttggcaataaatgtcatcgtcagcctcggcttttgctaatgtcgcggctggcagatagcctggctttttaggatcggttgtctgcaaaatagcgccacagcctatgcagcggcgctctgtttcatcattgatgatgtccatgaatatcctcctgataattcagttgccttttcttggctaaggctttaaaaacaaagccctcaaaaaagcgatttatccgcgtgttccaggcgtcactttgcaccaacggctgagttaagatggtccgcacgccggcaagattaccggcccagatatctgtcagcagctgatcccctaccatgacaacttcagaacgcgtcagccctaattctttgcgcgctttggtaatcccgactggcaaaggttttaatgcccgggcaacataagccacttgcagctttgccatcgctttatggatacgattggcgttgttatttgacacaacaaccacctggatgccgccgttacgtaaatcagaaagccactgggtcagcttagccgtaccttctgggtgatcccatgccatcagcgtgttgtctaaatcggtcaacaccgctttaataccttgctgctttagactagcaggcgtcaggctaaaaatattcgttaccagccaagtcggctcaaaaactgccacaaatcctgtcccctctccggttgttcatatccttatattataacggaaaaaactggtgagcgcgagccagcgcggttaggagtcggagtgtaagcggccttaaacgtgatggcccggtcttggccattgcgtttaaggtccttacacgcagactcctgcgctggggagcgcgttatgggagtaaaagcgaactagtgcccttagacataacggctcggtcttggccattacgctcaatgcccttacacgcagactcctacgccggtaaatatgcttatggcaaccgcggcccacccaaatctcaagccccaaaatcggccaccaagttgcagctaagtaacagccttcgcattggcagtgccaaaaatgtaaacgttatctttaaaaggcgaaataatcgcgttatcagaataaacagggtaggatgaatttgatagcaaacgctcgcattccgatattaagcctgttatacttatttttagtaagtgttataaagaaggaggctcatcatgactcgtttgcaccatgtatcgttgctgactggcgatgctgccgcaacgatccgattctataccgatgttttgggattgcgattggtcaaaaataccgtcaatcaggaaaatattcatgtacggcacttatttttcggtgattatcagggaacacccggcagtgtcgtgaccttctttgccattgatcgactggggcatcgttatgatgggccaaatcaattaggcgggattgatttgtcgattcctactgagtcgttagcattttggcatgagcggttgcaacaagcgggttgtgtggtgacgaaaatcgctaattggcttgcgttggttgaccccgcggataccccggttcgactcatcccctaccaacggactttgccggatgcgctaacggttcccaatgatgttccgggaagccagcagatcactggcttaattaacgttgatatccctgttgcagatcgtgatgccgaagaagccttttttgaaacgatgttgggacaggcgccggagcagcatcaatttaagctggccgctggcaacaccctgaccatccgcccaagtttgacggctgggactaagcgttttggccgcgggagcatggatcattttgcgctgacggttgaccatgaagaagcattaccgcgattgggcaccattgccgctcaacatggttacgaaatcgaggaattcgccgaccgcggctggtttaagagcctgtacgtgcgtgatccggccgataaccgaatcgaatttgcaactcaagcgccgggcttcactttagatgagccgctggaacatttgggtgagcgccttggtttaccaccgaaatttgaagaccggcgcgccgaaatcgaaacttatttcaaaactaaaggagtggatttccatgattgaacatccattattaggtatgaaccacgtaactgctatggcaagtgacccacaagcgatttttgattttatgagtaaaacgttaggcctgcatttaattaagaaaacggtcaaccaagacgccttggacacctatcatttttatttcaccgatgaccaaggcacggccggcaccgacatgaccttcttcaccttccctaatcaggaaaaaggcaaaaaaggcaccaacatgatctcgcgcgccagcttccgggttcccagtgacgccgctttggactactggttgaaacggtttgctgacaaaggggtagcaaatgacgggattaacacccaatttgacgcgaaaatcatcaatttccacgaccaggatgatcaacaatatcaattaatttcggacgaacacaaccatggggtggctggtggaacgccatggaagcataatgatgttcctgaagaattcgcaatcaccggtctcggcccagtcaccgtcacgatttttaacctcggccatatgcagtatgtgctgaccgaaatcatgggctacaaacagattgccgaagatggtaactggtcgctctatgaagttggtgatggtggtcatggtgcgcaagtgattctagagcatcgcgaggatctgccaatttctgttgaagggtttggcaacattcatcacgccgctttttctactgataatcgtgagactttgggcacctggattgatcggattaagcaatatcgtctgccacaatcagattatgtcgatcgcttctactttaagtccgaatactttcgggccgcgccgcaagtcctgtttgaactggcaacaaccggtcccggcttcttacaggatgaaacttacgatgaagccggtattcatcttgaattgccgccatttttggaaagcaaacgtgcggaaatcgaacgcggtctgaccccggttaaaaccgattggcgcggccgctaagcaacggaggttatgatggcagaagaaaacgtaaattatacatttgtcaaaggcgatcccagtgtgtcaccattattgttactgcatggtcaaggtggcgatgaaaatgatctgctgccgattggtaagtatctctcacccaatagtccgatgctttccattcgtgggcgcgttcaggaacaagggatgaaccggtatttcaagcattccgaaaacggcggcttcgatctgaataatcttgaacaggaaaccacttggctgtttaaggtattaaatgagctttgccagaaattcaatatcgattatgagcggtttattgtggtgggctattcaaacggcgcgaatgtagcagcccgagcccttttaactcgcagtgacacttttcacaccggaatctttttccatcccatggcgctttcaaccgttgattccaaacaggatttaagtgatgtcaaggtttggatgtcccatggcgatcaagatccgattgtgccggcgcaaaacttcaaggtgttagatacttatcttgaagaacaaggcgccgaggtcaccattttccgccatgatcagagccataatttgaatgaagcagagttagcaaatgccaagtcctggttggctaatagcggccgattgcaggattggcaacggaggtgagccagatggaacgttttgggtttgaacaatatggtaacccaagtgtctttgaaagcattgaggcgcctgtcccggagccaaaagccggtcaggtgcagttgcaagtgttgggctttggccttaacccttatgacgcttcgttgcgccgtggtgaacaggcggcttttcgcaaggttaagtttccggtcgttccgggtacggatgtgcttggccgcatcactaagcttggcgaaggcgttagtgagtttgcagttggcgatttagttatgaattatcgacccattggcggttacagtgaatttgtcacggcatcaacttctaagatctataaaaagcccactgccttgagtttccttgatgcagcagcgcttccccaagtcgggttagccgcatttaatattttgcattacatgttggcgcttaagcctgggcaaacgttggggattgtcggtgccagcggcggtgtcggagcgattttggtacaactcgccaaattcgagaaactcaaggtgattgccgtagcgggtgagcagcatcgcgagtatctacgtcaattaggcgccgatcaaattttcagttataccgatgaactgcctgagaatacggccgatgctgtggtcaatgcggtttttggcgcagcagatcacggtgccgcattgaagctggtcaaggctgacgggcagtatgtgacgactgcctatgccgacgttgatctcagcaccaaaccaaccgttgaacatctgcagttaaatccatccaagacctactcagtccacgatggctttgcttatctcgttgacgtcgcgcaaaaatgggggctgcaagttcgcgttgcccagaccttccccttcactgtcgccggggtcattgccggccatgaaatgttagagacccatcatgcgccgggcaagctagtcgtcatgcaagagcggcatgtgacgcacccggttcgaaaagaaatcaatcacctttaactagcacttaaaaactgcttgcgactcgccaatctgcgccgtatgataagcgcgtgactggaaaggcgggacgatatgaaaattgcagtatattgtggtgctaatcgtggtgtcgatggcgcattcgtacaagccgcaacacgtgtaggtgcatggattgcccaacgtggtgataccctgatttatggcggtggcaaactcgggttaatgggcgcagttgctcaaagcgccttgaaacatggtggcaaagtgattggcatcatccctcaagtgctggcagatcgcggtctggctctaccgaatctgacccaattagaagtcgtcgaagatatgggcacgcgcaaagcacgcatgattgcgttagcggatgctgacattgcccttcccggcggtcccggtacgcttgaggaaattaccgaagcgatctcgttttcacggatcggattaaacgctagcccgacgatcctatttaaccaaaatgattattaccgtccgttacagcaaatgtatcaaactgcggtaactcagggcttctttgatcaggacgcctttgataatgtattgttctcgtcggatttgccgacaatcagcagcttcattgccaactatcagccactgggcgttcgtcaataccattagcagctggttcttgaatgccatttcaacttgatacaaaaagcacgccgttccattcacaaagaatgaaacgacgtgctttttaaatacttaggccaaagccttcttagcagtgtctgctaatgctttgaaaccatctggatcgctgactgcaagatcggcaagcatcttacggttcatgtcgacattagccactttcaagccgtgcatcagcttgctgtaggaaatatcgttcatccgtgctgctgcgttaatccgggcaatccatagacgccggaagtcacgcttgcgagcgcgacgatcgcggaaagcataacggtatgaaaccataacttgggcattagctgccttaaacagcaaatgcttggcaccacgataacccttagcgagcttcagtaccttcttacgacgcttacgagtaactgttccacctttaacacgtggcattagaattcctcctcaaatcaaatccgattgctgattatttcatctggctgagcatctggcggatccgcttcatatctgagtgggataccaatgctgacttgcgcaattgacgacgctgtttcttcgtcttgccgtggaaacggtgtgacgtatacgcgtgaccgcgcttaagggcacctgatgcggttttcttaaaacgctttgcagaagcgcggtgggtcttgaattttggcatgtctttttcctcctctaaacatcaacgcgcgcacagccggttagggctgtgcacgcctttgtatcattaaccgatcagtaattacttttcggctcgcggtgcaagcatcaagaacatgctgcgtccgtccattttcggatgggtttcaacagcagcgatatccttaacggcatccgccatctgctcaagaaccttgcgaccaagatccttatgcgtgattgcccgtccacggaaccgaacgctgactttgactttgtcgcctttattcaggaacttagtcgcgttcttcaaacgggtattgaaatctgcttcaccaatagttgggctcaggcggatttccttgatggtgacagtcttttgtttcttccgagcatcgcgctctttcttctgcagctcgaaccggaacttcccgtagtccatgatgcgggctaccggtggcttggcattaggcgatactaggacaacatctaagtttgcatcctcggcaatggccaaggcgtcacgcgtactcttaacgccgagctgttcaccggtctgggagatcaatcgaacttcacgtgcgcgaatactgtcattgactatcagatctcttgctatggttgttcacctccgtgtgaatttcagagaaaaaacaaaaacagcgtagccacaaaggccccgctgttcattaaataccgaactaataagcctagaggtctaaagacttgggcgagaagcgggaacttctgctttttctcaacgtagacaactatacaggagtaacaacacggcgtcaagctcctgtcggttaaaatgcccacattatgtctttgcccaattgcgtatgtggcaccgcggtgattgccgacagcggcatagcagagccaatcttatcatggtgagaaagatgggttgtgctatgccgtcaaggtgagtttgggccaaggtgggtgggcaaattgatttttgactgaggcgattccctcggcgaagcggcatgggttgatctaaaaaggcctacagtttcaatgttggatatcctccaacactagaaagtgtagaccctaattttttcatcatcaggggtcctttgcgacaattacgaccacgaggaactgtcaaccaaaagagcgtctgaaatatgatgaacatcgagatttggttctttgtcgagatggtcagccagccacaacttgtgttgggaaatcagtttatcggcgaagttgcgggcccagcgaccgttgctttgtttgttggcaggcagctgtttgtagtttttgacgacaactgtgtgcaggagctcggtgttgatggtccagtgcttggtgacgatattttcgacgatttgggcaatttcgtcaggagtgtaggcctcaaactccaacgtcagcgggacgcgtgaacgcaggcccgggtttgcttcgaggaaatcgttcatgtcattggtgtaaccagcaaaaatggcaataaacttgtcacggttattctcaagttcggtgatgaacgtttcgatggcctctttgccaaaatcgttttccgatccctgactgagctggtaagcctcatcgacaaatagtacaccgcccatcgcgtcacgaattgccttaccggttttctgagcggtttggccgatgtactggccaacgaggtccggacgagcaacctcgctgacggtatccttcggcagaatgccaagattgtaaaatagttgggcaatcagccgcgcaactgtggtcttaccggttccgggcgggccagcgaacaccatgtgataggtcggcttcgtggcatcaggcagcttgtcttgcagtgcctgatcaaccttaacctgcttaaccaaatcgttaacaaacgctttgacggaattcagtccgaccatcccattgagttggccaagcaacgcatcaactgcggctgccttttcttgacggtcaccaccggccagctggtcgatgatcgaattaggaatcgtgaacaagttttgggaatcttcagggagactaacgacgaaggtctgaattaatttttcgttgtaattgcggacccagcggccgttgctgtggtcgacgttgccgatgaaggccttggtgacggcttgggtgtaatgatccttatcgactttgtagtcttggcggtgcaggtccatcaggccaatttgcgcgatttcggcaggggtgtaatcctcaaactcaaagacattcggcgcccgggaggtcagaccagggttcatgttcatgaaatcctgcatttgcttggtgtagccggcaaaaataatcatcaggtcatcgcgatggtcttccatatacttgagaatggtgtcgattgcctcttgcccccagttgacagagccgccttcttgatacagggtataggcctcgtcaatgaagagcacgccaccggttgctgattctaggacttttttcgtttgcaccgcagtgccgccaacattctgtgacacgaggtcttcgcgtgagacttcgacatagttattcgatggcaacactccgttttcatacatgattttgccgaccagtcgggccaccgtcgtcttaccggtgccgggattgccaagaaacagcgagtgcagcgactgggccgtggctttgctgccttgagccgcgcgtttttgattgaagctggcgaccttgatgaacgtatcaacttgtttcttcagcttggtcaaaccgatcatctcgtgtaactggtcaatcgccggtttttcggcgggtggttgcgcaggtgcactcggggccttcgcgggcggtgcggccggcgtttcaaccggtttatcatctgcaggcggctcggcttgggccggttgttcctcaggggttccattactggtggcaacttgaggctggctgatcgctgccccaggcacatcaacgtctgcatcgtcttcaaccaagatattcaatgtgtgtaacgggtcgatgttcgaccgggtcacccgcatgcgactatggtcaacattggcatcgctttggccttccggcaccaccagctcatccacctgcaggaccgatccattactggcactaatcatgaaataattcctgcgccgatccgtcaggtacaacgtatccgcattgaattcgctgttgtcttccaaatgaatattttcgtggatctgattacgctgtgcgtccagctttgaaccattgacatcaatgtccacaatatcacactgtgagatcagaccgtaagcaccgtcaaccaagtataaaccggtacccgctaaaccgtcgttggcatagcgtgtttcatgcgccagctcgcacgcggtcaggctgaccgttccactgacgtagacgacaggatagtcggctgcgacacgattgtaaaaggcaacgcttgtggcaatcatctgaccgcctttatccacataaaccacgttgcttttaggttttgtgttaatcagggtgacattttgaagcttcaacatgcccccttctttaacgtcaaattctgtgtagatcacgacgtctgtcggcgactgaccggctccatgaatttcaagcgtgccacattgaacgccatcgactgacttatactccccagggtcaatgaccacgacatcgccttcttccgcctttatcacggcatcatcgaaacttgtcttgccgaaccccatgccaacactgattgcatgacgcatacgcatcactcctttgctttttgatgcaagcaacaacaggcctgaccccataggtctgacctgttgttacgattacccgttgatttttttggcttgtgcccatatgtaaaccaagccgattgtccccaacaggaaactgaacgtgaactttagcatgaaaatgatgaaccgaaacgccccatagatgaggatccaccacagtgactcgccgatcatcgcgactgagaagccgaagaaaaagtcacctaacgtgcttcgcttgtcccgcctttggccgatcgattgcagaatggtgacggtgaacggatacaagatcaagttgatcaccgacagcatcaacggcaaccccatggccatccctagtagcaagccggccacgccgaatgcgtattggatgatccaaaactttatcggttgcatggtaaaaatacgcttgaactggtcgccctttgacaacgtgttttttggggcggcttcggtaccaaactttggaccttggggagtcgcagtgttcggtttggcgttaatcccaaaggcctgtttgggttggtcttttgaagccgcagattcggctaattttggcttctggcctggttgtgcacctagtccaaattttggcttattgtccatttgttagttcctccattcgctaaatttggctgaaaaaatggcaaaaaaatgaatacctcattcgttcatgtttctgcccaaatagctggcaccactgttgctcaggtgccggttactttgtcatcagctaacaacaacttagtttaacgaatgatagcgacacaatatgacattaactcacttggcagccgaaaattgccaaaaaaaaacaggacacatcgaattttgatgctcctgcaattgcgattcattgcttgtattgattaagtgcagccattaattcttcacgcatgcgtttgatcaaagacggtggcgaaattacttttagtgcagcgccttggcttaataaccaaagtaaggcgccgtctaatctggcgaaggcttcaatgaccacgctcccatctgcgttgtgacgaatcacccgcgagccgggaaattgatccaaagcagtctgcggatagtagcgataaacaaactgaatttgcattaaatcaccagaatccaataaataggtctgacgccggtggtcttgtaatgagaatctggtggcgtaatccagcttgtctccttcgctcacagccttgatctcaccgatccggtccagtcggtatagccagtaaccaccacgagtctgactcaacatggcaacataaaaataatgcacttcaaaaaacaacgccactggctgggcatgatgaatcagcggtgttggttctgttgcctggctgctgagataagtgaacgtcaagcgccgatgattggcgatataagctgcgacttcagctaagcgactcaataaaagtttgggctgagataacggtgtgtagctgccgcgagcaatgcggagctgttgacgcacttctacttgcttaacgggagacagtcccgaaaacaagtaattgagcgcagcatccaactcactcggtaataatgcgcgactgcccagcaggatattactgatggctaatacgatttgaccgttcaaaggggtggttggcggttctagtcggtaagtgccttgatgttcgacgagttgaccggcagaagaatcttctaacgccgctctgatatgtgcaaggtcgcgttgacaagtccggcggctgatcgcatatttttttgaatatcaactgagcggatggtcatgccacccatcagttgtgccattagcgctgctatccgttgattactctgcactagttccacctccattcattcgactggccaagggtcacaagtcactcacgattgttatcgagcagctcaatgactgacaggcgccaattttgtcgggctttattatagagtcaatttatgataagtttcaaggttaaaaaagcaatagcggccctgtcggctaaaatgcccacattaacgctgattttggcatcttaacgttgataaaacggttcaaattcaccactcacataccggccaagctcattatcagccggactgacatgaaattgcagcgtctctggtaaataggcttctgcaaaagcaacaagcgcatgcaagtcggcgttttcgtcagtatccactaccaacaataaactcttggcatcgttggctcgaatcatggttgctaaatatgcagcatgaatcgttgccattttcggcaagtacgtttgcagacgtgaaacaagatcagccgcttctttaggcggttcagaaagacgaacagcctcgccatgttcggcttgatccggtttagcaacataaaacaggttggcgcgggttaagaccatgttttcgccatacggattgattacaacgccgtgaatatcgtggtcttcatagagaaaatttgcacaatcgtcaatggttgcaaccgcaaaatggtcatgatcagggctctgggcaaaactggcctggtcggtaaaaataggcagaaaatcacgaccgctatcatccgtcaacaacaccacagtcggatcccctgtccgcgccgtgccaaccggtaacataaatttagctgtttttaaccccgcgtaaaaagctgcgcggggttcatcattttgatctgcacgtaataaatgcatcaggtgaatcaattggggatttttaacttgtggttcatcactcatcatggtcatctcctttatcctgctgttgatccgcgttaattttttctcgaaaagcgcgtaatttcttaggcaatccaagtagccaggacaataagacgatcccgacactaccgaaaaccgcaacgccttggggctggaattcgatcttgccgaaccaccaatttgcaatcccatatgcgacaaccgcggttaacaacatcacgaatcccatgatcatcaataatccgcggccacgatgagcgattagccagtagccgcgttgattaggggtgcgccacggcagtttcatatagatcagcaagacagcgaagtacaagaccgctgctaatattttggtaacgaagaacaagacaagccaagaagcccataacgcaataaacacctagtcaccctttctttgatgtgggttttaaatgagtttagtgtatcatacatcacaaaatgtcgtgaaaccgcgagatctttatcctaagattgcgctaatccttcaacggcaattaaaaagatctgagctaaattgcccagatcttttcgttggagctaaatgaattagtcacctaaaaccttattagcttcgcccggcttggttttgccgtcgcgactgtagttcttaacctcagctaccatcgcatcaatgaacatattacctgcttcttcttcagtatgttcatcgccataccgccgtacggataccgccgcatcgttgagttctttgtccccgacaacgaccgtgtacggaatcttcttggtttgggcttcgcgaatcttataacccatcttttcattgcggtcatcgactttgacgcgcaacccggctgcctgcatctggcgtttgatgcggttgacatagtctaagtgcagatcattgttaaccggaatcaaaacggcctgtgttggtgccagccaggttgggaaagcacccttataaatttcggtcaagtatgcgatgaatcgttccatcgtgccgacaatcccacggtgaatcatgactggccgatgttcctcgccatccttgccgacataagtcaagttgaagcgttccggcaacatgaagtctaactgaatcgttgacatggtttcatcgttgccaagcgcggtcttagtctggatatccagctttggaccataaaaggctgcttcaccctcggcttcgtaatagtctaggtgcaagtcatccatagcgcctttcaacatgctctggctacgggtccacatttcgtcatcatcaaaatacttttcggtattcttaggatcacgataagaaagccggaagctgtaatcggtaatgttgaagtcttcataaacatccatgatcaggcgcagaatctttttgaattcttcttggacttgatccaacgcaacgaatgtgtggccatcgtttaaagtcatttcgcgaacacgttgcaaaccagacaaagcacctgatttttcataccgatgcatcatccctagttcagcaatccgcagtggtaattctcgataagaccggatgtgatggttataaatctgaatatggcttgggcagttcatcggacgtaattcgagcatttcgccatcgcccatgtccatcggcgggaacatgtcttcacgataatgatcccagtggccggacgtcttgtacaagtcaaggttggcaagcacgggggtgtaaacatgttcgtaaccatcggcaatttctttgtcaatgatgtagcgttcaatgacccgccgaatcgttgcgccatttggcatccagtacggcaacccagcgccgactttaggatcaacgaagaaaagatccaagtcgcggccgataacccggtgatcacgttcagccgcttccttacgccgcttagcatcatcttcaaggcctttttcgctccaataagcggtcccgtaaatccgctgtagcatcgggttgctgctcttaccttgccaataggcgccggcaaccgacagcagcttgaaatgcttcaaatccttaagactaggaagcaagactttttcttcaaaatcaacaaaatcgcctagcttataacccttaatcggatcgccggcagcttcgaccagttgctttttgaacggatcgtccttaaaacggtcaaaagcctctgcccgactgagctccactggctccaaggcagcgttagccttaatgatttcttccattttcttttggactgtcggtaaatcatcaacactgacttgtccatccgcacgatcggtatcatagtaaaaaccgtcttctatggcctggcccttgccaaaatggatatcagggtacaatgctttgagtgctgctgctaaaacaaatgccgccgtctgccgcaaaaccgtgagcccttctgcatcatctttggtcataatctgcagtttgccggaatgggcaatcggttcattgtatgcaatcaattcatcgtctaatttaccagcaacagccttttttgccagactattgctaatgccttccgtgatggcttttaccgttgtaccatcaggaaattgtttgacactgccatctggaaacgtaatatctaatgccataagtaagactcctttgtcgttttttcgaagaaaccattttaccgagtgccacttctgacttggggaggaaaatcgcgctggctcgcgcttactttctataacgcgctccccggcgcaggaatctgcgtgtaaggaccttgaacgcaatggccaaagcccggccaacacgctcaaggccacttacactccgattcctaagcgcgccggatcgcgctcacaaaaaatccctgatatctcctaagagacatcagggacgatttgtgatcgcggttccacccagattgccgacagtcttgctgcgggccacttcattagcgcgtaacctgcgcaacagggccattagggcaatctcgagaagtggttcggatcagatcttgcaaggctttcagccacggccttactctctagtagatgatcctttattgcttccgtcttcgatagctacattgaaccacaatgtccgctttggtgcaagcaagtttcagaaaatagttttgccggctcgatcgtttcataccggcttgtcatgatcttgatcaatctgccaaagggttccggcgattttcaccgtcaacggtaatttcttttgccaagaaccgtacccgctccataatgcgtttggcttttaacatttccgagttgccccggtccgtccctgccaatgactcggttaattcggccatactcttgtttgaactgaacagcgtcggcattttctcctgcatgcgatattgcagaataatgcccagtacgtcatcccgaacccatggactgatgctttcggcgccaatatcatcaagcattaaaatcggtgcccgcttcacgctatcaatctttttcaacacgctgttattgccgattgcattcttcatttcaacgacaaatgtcggtacatgaattaatgtggttgcaatgccgcctttgcttgctaaatcgttggcaatcgcacctaacaagtatgtcttgccaaccccaaacggcccacttaaatataatccctgatgaaacgccttaggatcggcaacaaccgctaaaacaaaccggtttgcggccaaaagtgcatcaagtcggtcatcggttggatcataactgtccaagcttgcatcgcgaatatctttaggcatgttcacagaggtcaccaatgaggcttgcttggcctcttcgtctgccgctactttcgcatcagtcggttcatacgccacatcaatcaaaccatttgccacgacaagtttgggttgatagccaggcgccaatggtaattcgcctcgggcaatcttgttacgctcactgacaaattcataaatcttggcagttccgcggtcaatggcatcattggctaaatccgcttcatgctgcttcaggaaagtctggacttccggatcctgcaatgcttctttgaccatcttaaaataccgctcccgccactgtcgggaatccatcaacatggccagacgcttacgcatatcttccattagttcttacctcctttatcaccaagctgccgaagtttctccaattgggcagccaaggtttgccgatcagcttcactgaccttctttttctttggctgataaccttccttagcccaatccggtagcttttcttgccgcgtgccttttgtttgagtttgacgacgtttttggtcagtcgccttttgctgctcaaacgcatggatctggtttaaggcagcttccgggctggttacattggcttttaaccagctgttggcaatcgcatccaacaacgcctgattaatactgtcgttggttctgagaatataatcaatcagaatattaatcgtcggtgcgtcaaaaacattgcgctcactcaattgctgaatggcgcgcagttcgttgttagccggatacatgcgcgcgtttttagcctgtttcgccgcagttaaaaactgccgcggtggcatacttttggcccgcttaagcaatgcctcatcagcacttgctacttttggcgtctgggttggagtttgcggtttggcatgtggctgctggcgcgtatagctttgttcggctagccggcgcagttgattcaaatcgatttttcccgtcataacatcggttgcgcgactgatcaggcgggcaaaatcaggcggttgcaagccgtaaaatgccgctacctgatatagtgccgcttgatgtttagtcagttgtccggtttgcagattgctattggccaacaacgattttaataagtcccaatcgtagccatccccgcttcccaaccgtggacgacttgccggcttttgggtcacggcttctttagcggccacaacagccggtggttcctggctgagatcatggtcaaagcgaaacacatccaagaagctggcggtaatctcttgccattccggacgccgcaccggtttcaagctaaacttggctaccaattcatcgtagcgattctcgcccactttgtcatacagcaggagtcctaacaggtcatctttgaaaaaggcatcgggactcaccggtgggtaaagttcatacgcataataacggcccaatgagtcaacttgcgaataagtgcgtaataaccccactgcttccaatttcacgcgcgcaacaaacagctgctcaatgtcaatatccaaaagatccagcaaccaaagttgcggccgccgatccgtgaccaaggcgcggtctttgacttcttgccataagctcaggtaaagcgccatcggaaccgggccaactaagggttgataaagcgaaactgccactttttcgtcaaagtcactaaaataacctgctttggtcaacacaaacccggcttgcggaataaacgtatcagggcgctgcatgactttcacctcttttcagacaacggacctgagacaatcgcctcaggtccgttttgttgattgcttcaattacgtttacttcttagtcttttccttcttcatcatatcctgaagctcttgcatgaagacggacatatccttaaattggcggtaaacactggcaaagcgaatataagcgacatcatcgacatccgctaatttcgacatgacatattcgccaattgcttgactggaaacttcattttcaccgatcgcgcgcagttgattttcaaccgaatccacgatcccttgcatttgttccatggtcaccggccgtttttcagcagcccggatgagtcctttgagaatcttctcgcggttaaattcttcccgcgtgccattctttttgatgaccaataacggggtctgttcaacgcgttcaaaagttgtaaaacgaaacccgcagttctcgcactcacgccgacgccggattgcccgaccgccgtctgtgggacgcgaatcgacaacccgcgaactattatgatggcaatggggacattgcacgactccaccttcttaatcaaagtttgatagcttattatagcacgtgcaagccgcttatgatagttgctcaagccggtgaatcaaggcttttgcctggtcaatcgtcgctgcttgtgtcccgttgttatcgatcacaaaatcagccattgccgcttttttggataacggtatttgagaagcgatgcgttcttgggcagcttctttggttaagccatcgcgcgtcatcaaccgcgccaattgcacttcaggatcaaccgttaccaccgcaacgccatcaaacgcatcggcatagtcagcttcatacaaaagcgggatatccccaacaacgatggcagcaccgcctgctttggcttgagcaagcgcttgattaatcgctgcacgcaaatacgggcgattaatttggttcaatgcttccatacgtcccggctgcgaaaacacaatgtcgcccagtttggcccggtcaagcgtcccgtctttgcgtaagacccccggcccaaacgcttggacaattcgcgcaagcaccggttgacccggttcaacaatgcgccgggcaatcacatcggcatccaccaccggaaacccagccgctttaaatgtccggcttaccgttgatttgcctgacgcgatgccgcctgtcagccctaacaaaaaggtcatgccagttgcccccttcgatgtagcggctggcaatgcgggcaataatgcgtgccgcgttgaccgactttgattttgacaatcgtggtgccgcaacgatcacaaggcgtcccttcacgatcatagacatgcaaagcatcctgaaacgaaccgcgattgccttcagcatcaacgtaagtatgggcactggtcccgccagcggcaatggcgtcgtccaattccttgataatcgcatcatgtaacgtgtgaacctccgccttggttaaggtattagctggctgcaggggattgagcttgctgagccataagacctcatcagcataaatattgccgattccggccacaacagtttgatccagcaaaaccgatttaatggctttatgatgccgttttagtttctgggcaaagtcattttcgctaaaagtagcagcagtcggctccggtcctagcttggccagcgctggcaccaattgctcctgacccgtgtgaatcagccgcatccggccaaacttgcgcagatcgcggtaacgcaactggctgccatcctgaaaggtaaacgtcacatgatcatgcttatccagcggcgttttggcatccgaaacaacgtaatagcggccttccatgcgcaaatgactgacaatcgtcatgccgttgttaagccgaatcagtaaatacttaccgcggcgatcaatcgtggtgacggcagcgcccacgacctgtttttgaaaagctgtcaaaccattgatgaggattttctcccagtttgtgctaatcgcggtgatttttttatctttgactaacggtaacaaggaacggcgaaccgtttcaacttcaggtaattcaggcataagatctccttatttcgcatcaaaccaggtcggtccataatgactttcgactttcaaaggtaccgccagcgaaacagccgagtccataatcttaggcactaattgtccaagttgcgccatttcagcagtcggagcttcaaaaatcagttcatcgtgtacctgcagcaacattttcgcctgcagatgggcctcatccaacgccttttgcatgcgaatcatcgcgactttaatgatatctgcggcactcccttggatcggcgtattcatcgccgttcgttccgcaaacttgcgcaagttgaaattgcgggagtgaatctggggcagataacgacggcggtggaagagcgtttcaacatagccatcttcacgcgctttcttgaccatattttccatgtaatcgtggactttcgggtactgttcaaaataaccgtcaataaacgccttagcctgcttcctggaaatcccgatattttgcgccaacccataatcgctgatgccgtaaacaatcccaaagttcgtggccttggcttggcggcgcatatccggcgtgacttcatcaggagaatcgaggccaaaaattttcatggcggtattcgcgtgaatatcaacgccgtgtttaaaggcttgttgcatattctcatcacccgagatatgcgataacacgcgtaattcgatttgcgaataatccgagctaaaaatctgccaatccggatgagaagggacaaaggctttccggataatcttcccttcatcccgtgctggaatattttgcatattcgggtcaacggaactcagacgcccggtttgcgtcagtgtctgtaaataacgggtgtgaattttatgatccggcatttgtgctttcaacaagcccaccacataagtcgagtttagtttggcccagccgcgataatccagaatatcctgaacaattggactagccgatttcaattcgtttaaaacatcgacactggtggaataaccggttttggtctttttaatcactggtaaattcagcttttcgaataacacttcgcctaattgcttcggcgaattcagattaaatttaacgccggcttcaccataaattttttcttccaacaccttaatgctttgcgaaaattcggttcccatatcctttaaggtttgggcattcaacgtgataccttgaatttccatttccgccaaaacccgcgccagtggcatttccatgtccgtgaaaagatccgtctgttcctgcttagccaaatcttcggttaaatcaggacgcaaggcgaataaggcctgagacttacgagcgaattgttcaaacagcagtttatcttcaggcacttgacgcttagcacctttaccatatacatcttcatcgcgaggcaagtcatgataatcatggtcttctgcaattttacccagatcattgctattttcatctggattaatcagatacgaggccaacaaaacatcgaaggcaatgtcaggcagatgcaagccaagacgatgagcggcgacaatattgcgtttaccatcaaacaccgttaagtcgcggtttgaatcaccaagccacttagcaacttccggaatcgtcaacaatgacacatctgtactaacataggtttcttctttggttccgatgaaaaagcccacttgttcagcggtatgataattatccgctaacatttcaatctcaaaggttaacggttcggttgttttcgtgagcgccaaaattgattggtcatccaaaacggaataatgtaccggttgtgacggttttgcgacatccccgccaattttcttcaacaaggaattcatattcatcttagtatagaaatcgcgtaacttcgccaaatcgggaccgttatactttacgtctgcaagatcgatggtcacaggtgcatcgcggtcaattgtggctaactgcttgctcaggtacgctttgtctttgtcattgatgagattttccttcattttggaagtcttcatcgcatcaatgttagcgtaaaggttttcgatactgccgtattgctttagcagttttaaggccgttttttcgccaaccttggtgacccctggataattgtctgacgtatcacccattaacccctttagatcaataatctgagtgggggtaatgccaagcttttctttaacgtgttccggcgtgtacgcctcaagttcattaacgcctttgaccgtgacctgcaccgttgtttgatccgtcgttaattgggttaaatcacgatcgccagtcacaatcgttgtctgccaccctgcatcatcagcacgcttagccatcgttccgataatgtcatcagcttcataatccttgagttcataatgctgaatgcccatatcatcgagtagttccttgatatacggcagctgctctaacaactcgcttggcgtcttcgcccgaccgcttttataatccgcgtattttgccgttcgaaaagttgtttttccggcatcaaacgccaccaaagcagcgtccggtttaaccgactttaaaacaatctcgagcatattgttaaatgcgtagatggcattggtgtgcagcccatcttgattggtgaaacgatcgagttgattgtacaaggcaaaaaaagcacgaaatgcaatcgagttgccgtcaatcaacaataatttagtttgactcgtcatatatgagcttccttttcttctcaaaccaccgctatcgatgacatgagttaattgtcatcattattgtaccaaattctttgcccttgtgacggcacgttcctagttaagggggatcatctctcagccgttgcggtttgataggttgcagtgggcggtggccgtccattgatacacgtttcttcgtgcaaaagcttacgtgtaaggacattgaacgcaatggcaaagaccggaccatcatgcttaaggccgcttacactctgagtccttgacactcactttctataacgcgctccccggcgcaggggcctgcgtgtaaggaccttggtcgcaatggccaaaacccggccatcacgcccaaggccgcttacactccggtccctaatcgcgccggctcgcgcctactttccataacgcgctccccggcgcagaagtctgcgtgtaagaaccttaagcgcaatggccaagaccgggccatcacgcttaaggccgcttacactccgacttctaaccgcgccggctcgcgctcacataaaaaaaagccagtttctgaccggcttttgcttttattaattgttgttgtcgccaacgcctagaatctgcaagatggcggtgaataggtttaagaaatcaagataaagcataagcgccccgacaacggctaatgaactggtggaaatagttgcttgtccatcgctgccagccgtcaagtataagttcttcaggcgctgagtgtcccaagcggtcaacacgatgaagatgatcaagatcgcataagaaatcaacatctgcatgccgcttgaacccataaacatgttaacgaacatcatgatgatgacgccaaacaatgctgacatcgcgatatttcccgccttactcaggtcacgcttgccaaaatggccaaccatggacatgacgagaaagactaccgccgttgttgccaatgcaactgcaaggttagatgtctttgcaaccatcgcaacggaagcaaaagtgaaaccaaaacttgcagacatcagataaaacattaaagttgcataacccggacttgcttgggcccgccgtccagtcacaaagaaggacaggatcagcggcaatgctgtcataatccaaaagataattggatgagcacccacaaaattgatgtaatcattcttaagggtaactcctagtaaataacttacgagcgccgtcacaaccagcccgctccccatcaaggtgtagatgcgggagaagaactgcgtcaagccggcctcgtttacaacacggcgttcttgcatattgcgttcattcctttcaactatctataactattataaccagatcaaaacattttgtcagtcaggccaaagaccgatttgcatcttggtgagtcaaaccgtcaagccctgatactgactttatcatgctagtgctaacattaacagcccgacatgcgcttgtccactggcttgtatagatcgtcattgctttattgcatatgtgtgaatgcgatctttcggaggacaagcaagggaaaatataagatttatttataattaattactattaatttactaaagttcacatccgctcgtaaaatcattgaccggcatacgtttatctgttaatttttaatcatcgaaagcctctctcttaaaacaaaggatgtgaataaataatactcatgtttttttatggcaccctagctatcatactaattacgatgctcttatttagaaagaatccagcgattaatcgaatctcaagtactatcatctcgtcatcaaaagtgggagcgctatgtcgaacttgctttttaatcgttaatttcattttcttttatttgtttgtgacccgcgacttgttgactttatttacaatcgcgatggtcgccatcatgtatcttgccgttgactggagtcgtggtctacaaagaagttgaacgcatttcggttaataaagtacgccttgaatgccacaatgagtcgtttttctcttcatgcaaaatcgagctgcgaaaaaagctaacccgcgatggattagcttttttgtttaacccaggatcggatttcttttcaaagatagctgcattgccatcacacttagcaacgtagaacagatgtcttgaaaaacttcaaattaagcaccgcgttgatgccgggcataacgtttaaacgcaatcacattaatggtgaggagtacgactaaccctgctaaaatcaataagcgccagtcaatcgcattcgcttgggcaggtacttttttaacagcggcagcattcagatcggcggcctctttttgcgcgaccacaaatgttttcttgaagtgccatgttctaccggctgcctttgcgactccctcaaaacgatatttacccggttttagcggttcatcattgagatcaaccttaaaattaaagtttgagttcggtgccatcttgagttgctgcttgtgcgtttgatacagtgctttgcttccgtctgcctcaaagatcttcccttccacagtcaggtctttgagcatcgccggttcaaagttctgaatattggcttgaatggcgttgtgaccatgatcactgaccgccttcacttcccgcaacctcaagttcggtggcacgacttgatcagattcggttaagaccacaccgagtgcgtagacataacgattagcaactgcgccactcgttgtcgctttttcatctggtttagccataaattgcaggccaccaagaaccgtcccggcaaatgcctgcgcgggcagctttaattgcaaaggtactgtttgttggcttaaagccgggatcgtcacttccgttggtgcctttaataacgttttaaaattaacctttaatgacgcatccgttcgccccacctgttcgccgtattcgaccaccccattatcgtttgtgaaggcggggttcaccttgatgagcacggtcacgggatcagcttggcgattttgaatgacaacgtttaacgtctgcgcttgattcggactcacccgtaaatcaaagtagctcgcacttgtatcccgctgattttccggcaactcagctttgaccgtaaacccttcgcctgccgcttgtgcagattgctgccacatgccggaaaagagtaccatgacccaccccaagagaccaacgatccatatactttttttcatcttttgtgtggcaccatcgacgcaaacgtgcaacggcgcttcctttcttagtgttttagttttcgagattgatacagataatatgcccgtaggagacccaaccagaaaaagacgcctgctaagacagttatcagatatgatgattcttgtagcgctggcagttttgcatgcttagtggctttcttcttgtttgtatcggccattgccggtttctggcgagaggtaggcagccgatcatcgcttggcgaatccggcgttacaaccttcacaattttgggatcgctcatcggctcaaccagaatgcgaacatgagccacggaagtcttttcgtcagcatgggtcatcgttgccggtgccgcaacaacaatgccaattaagactgccacccacactagcctttgatttgctctcattcggttttacagcggcgcactggtcagcgtccaagtcagcgtggtggaaaaatctcccgacttgagcccttccgttgcataacttttggctggcaccgtcaaggcaacccctttatctgcttgtttctgattaaacagatccatgaaggttcctttagccgtttgaccgtcactaacactcaaaatatcaaccgcttgcgcatcgccagtgtagaccttaatcgctttgttgagtccgaaacgcgcactcgcatctttggcttggccatcgataacgctgctttcaagcaaggagattgcggcgtctggtaagaccacggttttggtcactttgccggcctgatctttttcttcggacttcagatcggtcgcttttaaactgactttccaacgatcactaccaagtcgcttgtcagtgacctgaatgtgattaggcgccgctgttttcttgccgtctttagtcacccattgatcggcttcggcgtatgccacggcatcattaaccgcatccagtttcaacggtccaaaattgaagcgagaaacatagtccagtgttaaaccttcgccgccagcatgagtcgtgttatccaccccggcaaaggttcctggcgttttgttttgtggcgctaacgggtttaaaatatccggtttggtgtcggtttgcatgattttaacccttccttgggtggtaacagtacgcgcatcgtcagcactgacggttgttgcgccataagccagtagccctgccgataatgcagcagtcgcgagtaaagcctggtatccataacgagtcattagttgattcctccataatttctaaattgagttaaagtggtgcatcgcttagggtccactgcagaccaaaattgtacgtaccggccgtaaagtcaaagtcattagcaggtattttgagcagtacccctgcttgcgtatcatacgtaaacgtgtgttggatcgtttgagacgcaaccgccttaacttgctgatcttgcttaagtttgatcggatagtcatggccgtcttgtctgaaaaagagtaattcttgttttaattcatgctgatgacgatcggtaaacggctgactttgttgaatcaaaagttgccatggcttcttttgactgcggccgtccttaatccgaatcgtcatcggcgtatcgccaattcgaggaacttctagcgtctggccatcaatcttaacggtgccaaaattgagcgctgccggtgcttgggtaaaactcaaggtgccttcagtgacttccaaagggatctggtagtcataactgatgtgcttattagcttctgtcaaacttggttggctaacagttgccgtaacggttttatgccccacggttttcaaatcgggaaacttaatattttccactttcaaatgtggctgttgctttttgacggtattcgtcaccgcttcacgaatgggctgcgggtcactgttgttttcgatggttaaagatttgaagctgacctgattcagtgtcaaaaacttgtaacccgaagccgtcacctcaaacagggactctcttttgttggcgcgctttttcaagggttcgcgtttgcctgcatgcgccacacttaccttatcttcacgatgattcaccaccacgacatccccgagtttggctttgaccacgcgcttgtctccccattgatcaagcaattgctgcttaggggtatcaccctgggctgccatgctcgtgacttgttgctttggatcctgcaggttaagcacatcaccagctgcttcgtacagactcacgcttaaatacggttcaccggcaaaaacatcgtggacattgcgattgtcatcttctgcgccatcagtagccacgatcaaccagtcgttgccttccttcaccaacgccaaggcaccaccggcattacgcgtgaatagttcgtaaccgttgaaaacaagtgcatcgccatagtcggtcagcaccggactctttgataacaccgtgccagtgctggcctcaaacttcatggtcacgtcaattggtttgctgatctttgtcaatcgctttgtatctttgcgtaagagcttagccaacttgtcaggcatggtgacactcagcgctttatccccccattgaatgcggcgatcatcgtactcaagcgcgtcttttagcatgttgcctaaagtatccgttgtaacgacttcacctaacttcaaagtttgcgattgggtcgaaaatgttgcgcgtttcaccacggccactggaacatcatagtcagcttcgattgttttatctttgccatacttctgggaaaccgtcactgtagccgtggtatccccaagttttgaaacatctggtcgttttttaaaacctttaatcttataggttgatttatccgataatttaaagaactgcgatagtcgcaaatccatttccgctgctgaagcattaattggaatattggctttttgtggtactaattgattcacccgcaacaattggtagccttgatccgtaatttcaaaataaagttcattcttgttggccaaatcgttgaggggctgctcttgtgaatcatgggtatacctaatctttctttcaacgttgacgactttgataatatcgcctgcttgcacaggctgaacccgatctttaccccataaattaaggaagtcttgcttacctaaatcaccagacgcccatttcaccgccacctcggataagtttttaactttttcatctttcataggaacgtgggtgatgcccaagtacggctcgctcgggaatcggttatgaataggttgattgtcttttgacccgcctgcagtggcaactactttcaggccgtcatcatgaatcaaggcaaatgcacccccggcatcgcgtcctgaatgcaattcatagccttttaaaatgatcgcatcaccataatttgctgtcgcggttggccgtgcagttagatgtccggttttggaatcaaactgaattggggcagctgcatctttaaacaactcgtcaatccgctgggtacccggttgtaaatgtttctcaacatcgggggctttcaatggataaagctgcttatccccccacaaaaccggtgtaccatctcgctgttgcgcctgagtgaacatacgctcaatactttgcatcccccagcgctcgcctaatacatattgcccagatttgacggtcaactcgcctgccggaatcacattcagttccacttcataatcaaacttggcatacttgccgtcatacaatttttcaattgcccgtacaacggctttcgttttacctggcttgctcacatccggccgtccagcaaaacattctgcaatgatgttatcccgcaagttcaaggctttaggaaacgcagcgtctaattctgcatccgttgcgttctgcggcacatcgactggacgggttttcagctggttcacatgtaacggtacaaatccagccggcgtcatttggaaaaagatggcctgatcaatattcggaaagttttcttttttcagttgatacaccttagagtcacgtgcaaagctgatttttccttcagcattgcagaccttgatgatatcccccattcttgcctgctgaacccggttaagtccccactgattcaaaaagtcttgtttgcgagtagtcccattggcaactgcgtcattgatattgaaatagctcagattaatactttgatgatcccgcatctgaacatattcataactaccatagaatcggttgccaaagtgaggtgcgattggctcattgtcattacctttaccggatgtcgcgatcactttagaaataccatctgcatctcgatcaatgaaaaccaaagcgcccattgcatcgcgaccattcttaggatcagatgcaccggcaatcaccgcatctccatactgggtttgcgctgtacctttacccgtcgccaccccgaacttagaatcaaacgtcaaatcaaccggcgtttttgcaaggatcgtgtcaaatcgggcataacgttcctgtaaccccatcgaccgcgtcgcttgcttaagcttctcaggcaaaactgcccagattcttttatccgcaaatggaatcgatagaccaccaggctcagtggcttgtttaaagagcctagcatgtgactccggcgtaaaaaattcaccaagcgtatacaccgcatcttgaccggtaatagtagctcgtggtcgttgtgggtttgcaggttgatcatcggctgcatacacagagttgctggttaaatgaaagaaacgtttaatatccggctgggtaccgccgagaacggtaagcgttagtaagatactgacgccaatcaacccaataccggcagtttttttgattacctgccacatttttttaaatcttgacggcacttcggacaccccccttttttaaaaatccatctaaaaaatataaattgacatggactccattctaggggagtagttgttctcataattctcacatttttgcgaaaaactttaatgatttgagctaagaatcgcatttgtattattttaatcttatttattacattatattttattgattaatcctgtacggacaggtctttttacggatggccttcttccgtcacttcattctgttacaaacgttatttcataaggtcgaattcatcttttagccgagccatcgttgcaaataatccatatcaaaaaggcgaaaaggcttcgcaacatatccgaaaagcctcttcgcctgaaaagagttagctgtcaaatgtaaaattctggacacttacccaaatatgaagggttatcacacgttcattgtttccgcttttgatcaatcgttgccaataaagccataatttgttccagatcataacgattttcaatacctgtcaataaatagcgttcttttgcctttatctgtctagcagccgttgcggagtttgtaatcaataaatcgtacacgcgatcggtcacggcattgtcaatgatgacgtgataataaccggctaatgcaacgcgcaaccgggccaccatacctgctgtgatggaccagtcgtcatgcatgcagatgccaacatacaacggcgcatcactttgtacgtgaattaacaacaacacattcaaataccggcgcttcaaaaacagcagctgctcagggctaggtgactgctgtgcatggttaaaagtcagcatcgccaattcaccagccatcttttctaaatgttgtaacaccgctggatcaacttgatagttaatgcgttccccatcaaacagatgaaaatggcccgaaaaaaagcgggcatgcatctgaatttggttcaaaatgtaccgaattcgcagttgcgtgtcgcccgtaaatcgccgtttaaaagctgggtaagctaattcaattcgagccattaactgggcacgaatttttttaatttcaggagttacctcgtccaaatattgagcaaccggtgataaatcacgatcatccaggtccagaatctccatactcgtcataaagatataaaggctggaaacttcaaattcatcaatgacaagtgcatattggcgggctaaatcaaacaaccagtttctaatcccgcggtaaaggtggttgtgatccaagctgagcagcggttctttgctggtcttaacgcggttttgctccgctgcaaaatgccgcttgagtgcaatgtccaaccagatacttaatttgagtcgtccgatcatcgaaaatttcaaatgttcccgagcttcaaacgctgcgataaactgccgtaacgaatacgcttccgtaaacgaggctaaggtgtcgtaatcatggctatttagcagcagccgataatacaaatagcgcaacgcaatctccggcccaatgagggtaccgcccttaatctgtagtgaaaatgctgccaaaacctgattcaagagtttgatccgacgaaaaacagctggtttactgatgtatagcaactgtgccagttcatcagcactcactttgcctttttgcagcaaggttagtaaaatccgataacttttcgattggactaacaattgccgatagagctcactaaaattaacgggtgtgcgtgtttgcaaacaaatacaacgctgaccgcctgaatcagtcacgctaatatcagcggcagcatcgaagcctctaatccgctgctgaagtgcggcgacggttgttcccattgtgcttgctgacacccccagcgttgtgatggcggttgtgtacaagcaaccggcagcccccgcctttagcaataactgcaacaactgaacctcccgacgttcatcgttctccagaaaatcatcaagattcatagcctactccccctcatcaatagattccctgaaaaattcataactccttcgttcgacactgatattagatgaatcttaacataataattcgttgaaacaaatagaaatgtaagcgaattcaagtcagctaaaatttagtcctcttctgattacaaaacaagcagcgcgcattctcccttttgtcaggataaaaccgtcacaactcaaaaaacggtcccagagcaagcacttgctccaaaaccgttaatcaaacacagcttattcaattgtcatggccgctcatactgtctcactatcatgtcacatgcagcacaccagcttggcaataaagccatttatgttactcctgactcagtagatcttcataagccttttcatacttctgaatatcgcctgcgcccataaagacaaccacagcatggtggaatttcagcaacggtcgcatatccgcttgctgaatgacagcggcacccttgatttgcgccacaatgtcttctgagcgaattttaccattcttttcccgcgcggagctgaaaatcggagtcaggaacgtctgatcggcttggctcaagacttgaacgtactgcggttcatatgcttgcgtccgactataagtatggggctggaaaacagcgatgatcgctttgtcaggatatttctgccgggccgcatccaatgttgcttttatctcattcggatggtgcgcataatcatcgacaatgatcatgtctttaagatctttttcggcaaagcggcgtttaaccccactgaagttaccgagttcgcgcgcgatcaagcctgcatcaagtttctccatatgcgcgacagccacaactgccaaggcattcaggacgctatgttcgccaaacagtggcacaaagaagtggccgatcaattcatcatggaagtacgcgtcaaaactgctgccttttgtatcacgcttgacattgcgggcctgaaaatcatcacggtcactggtgccgtaataataaacaggaactttagcttttagtttgcgcagccaaggatcatcgccccatgcgacaatcgccttttggacctgatttgcttcggtttcaaatgcatcgtaaacatcttcaaacccgtgataataatcggggtgatcaaaatcaatgttcgtcatgatcatgtaatcgggatggtaggccagaaaatggcgccgatattcgtctgcctcaaaaacaaaaaatttcgaatcgcgaacgcctttgccagtcccatcgccaatcagataactggttttagcaaccccgcttaacgtgtgggcaagtaaaccggtggtactcgttttaccatgcgcacccgccacgccaatgctggtataccccttaatcagctgaccaagaaattcatgataccgataaatcttaagccgcatcgctttggcttgcttgatttccggatgctcatcggtaaagctgttaccggcaatcacagtgtaaccgggctttagattagccggatcaaacggaagcatcgtgattccggcagccgccaagcctttctgggtaaacgtatattgggtaatatcactccccaacacttgatgccccaaatcatgcagtaccaatgccaatgcgctcatgcctgaacccttaatgccaataaaataataagttgcctctgtcatcacgaatgttcctcttcctttgcttgtgtgtagtaaacttcgcgcggttttgccccttttgctgcggagaccagatgtttggcctccaacgtatcaatcaggttggcggcgcgattatacccaatagaaaagacgcgctgtaactttgatgtcgaaatatgccgttcaccagcaagataatccagcacctcaggcatcagttcatcttcatgcgtattgctagcctcagcggacttgaccctgccggatcaaaaagataccttggaccgcggtgacttttgacatacgcaacaatgctatcgatttcccgatcgacaaaggtgccttgtagccgaattggctgactggcaccattgcctaagtaaagcatatcgccacgacccaacaaccgctcagccccagccgtatcgataatggtccgggaatcaatttgactcgccgtcataaaggcaatgcgggtagggatattgttcttgatagtaccggtgatcacatcgacacttggccgttgagtcgcaacaagtaagtgaatgccggctgcccgcgctttggctgtaatcctagcaatgtcgtcttggatctcagtgccagccgccagcatcaaatctgccaactcatcaatgataatcaccagatatggcatcacttgagcaaactcatgatgccgcttagcctttgcattgaactgttcaagattacgtacgcctgctgcagccagttttttgtagcggtcattcatcgtcgtaaccacccacttcaatgccgcgctcgccgcttttggatcagaaatcactggcgagaccaggtgcggcaaaccgttataaccggctaactcaactgctttgggatcaatcaaaagcagccgcacctgttccggagtcgctttatacagcagcgacaccagtaagctgttaataaagacagacttaccggatccagtcgctccggcaatcagtccatgcggcattttagcaagattcgtgacaaccggctgaccaaaaagatccacgccaagcgcaatggttaacggcgacttagctttctgaaatgccggcgtgtccagaacttcccgcaacatgaccggacgcggtttcaagttaggaatttcgatcccaactgtattcttaccgggtatcggtgcctcgattcgaatatccttggcagctaaggctaacttcaaatcatcattgaggtttgtaatcttgctgactttaaccccactagcaagactcacctgaaattgcgttacggttggcccaatcgtatcggcaacgacatgcgcatcgacattaaatgcctgcaacgtttgatccaaccgctgccgctgatgatgcacccagtcttgttgggctgcttgatcagcaacaactggtggtgataataagcgaaccggtgggattgtttcagaactctcaccttgatcaccgcttgaaacgggcgtggcttccggcgtcgtcatcgaagcaggcagctgtgagctaaccgcctgctgctcggttgtttctgctgacaagctgcttttcgttggctgtgtgactgatgccgtggtgccagccgtactttgcggcctggaaaacgccttttgggaattgtctttctgttccgatgcggattccctagctttttgggcggccaatgctttccgcaactttttggcttcgtgcttacgccttaatgcctcaatgcgggctgcttttcgactattagggccatgagatttgcccatcgatgtcaaagaagtagctatttccgcagtatggcgtgatgcttcgctgccgctcacactggccaccgattgaatcggcggatgcggggcactggtgttatcggatgccgaggagctcgatgttgtttcattggaggcttgttgtgttgcgccatccgcttccgtttgttgtttcgagtcggtcgcttctgaatgctcatcagggctctcagttattgacgccatgctgcttgcacttgtctccagcgactcacttgaacgcgtcgcttctggtgccgccactgacgaagccacggcgatcgcaaccgggtcagtggcggcctgcgaactgggactgaccccatgtccggcaaaaagataaaggctttgttcatccggtttcaataccgccgcaatttggcgatagtccgtttgatcccgctgcacgtttctgacagtgctgttgggtgttgtcagccgcgctaacccattgcgctgatggtcggctcgcggatgtgtcattgcgcgcaaatccgcctgtgcctcagcgactttttgcggattcacttcatgcgtggcttcatgcgtaatctgcggtggcaattgatacgcgtcattttctgattgctgccagttcgcggttgtttccccggattgcgatgctggcgatttattctgatgtaaaaatgccggcccatcataatgcgccatgatcaaatcccctttttatcgtgtttcgacagtgtctctattttagcataagcatcagttcgccgaatcctggattgaaaaataactcggcaaaatcagcgttagtttgaaaatagcctgattctggcattgccttttaacgttaataaaggtaaggatcaaaacgacaccggtagcgccttttcccggaaaaacgtcggcttgtacggaacaggaaaaatgattgacacttaatctataatggagcagattttagttgtgacacaagttgtcgttgctacaaacattcattggaggctgacaacatgcttttcctaattcttgatgttctactgatcatatgcggcattgttctattggtatcctgttatcggttctctgaagaagagttcagggaggccttgaatgactgggcactaaatacttttgtattcgcccctgttttgggctggattggcaaaaagatgaatgttaggtctccttatcgaaaagccatgttcttactaggattagctatgaccgtcatcttcgcattgaatctgatcgcaggactataggtattgatgccaatattgtcactataaccgtctaagaatcgaaaaatggctcgtgagcttatctgcccacgagcctctctttaaaattttttgtattttcaccgtagcaattacgcctgagccgcaaccactgccgccgcttccttggcatcgaacggacttccggcagccagattgtccggcatcaccaaaataccacgccgctgtggtgcccctggaatcgctaattcacgcgcactgctaatcatgccgtaagacgcgaccccacgtaaagaaccctgccaaataatcttaccatctggcatcatggcgcctggcaacgcaacaaccaccgtctggcctaacgcagcattcggcgcgccgcaaacgatttgaacctgttcatcaccaatatcgacctgcgtgacatgtaagtgatcagaatcgggatgatctttgaaatcaacaatcttaccaatgacaaacttgggcttttcgtcaacttcaagctgacccggtaaatcagcttgctggatggcaacatttaattgagccacctgttcagcggtcaattgaatctgcccgtgtccatccacggctcccaaccactgactgacattaaaaaagttgtagccaatcacatgattctgatcatctaaaattgccacaatatccccgctgcgttgcgatgtctgggtctcagtatccggtcccgtgatggcaataagcgtatcaccaaaagccggttgattataactggtaatgagcatttgaacctccaaaattaattcaagccggtgatgaaatcctcgacttgttgttttgttttacgatctttgttaacaaagcggccgatttctttaccgtctttaaacgcgataaaacttggaataccaaaaacacccatctcctgggcaacttccagattcttgtcccgatcaaccgcaacaaactcataatccgaaaagtctttttcgatctctggcattgctggtttgataaaacggcaatccgagcaccaattagcagagaagaaaagcattttcttaccaggcttttttacctcatccaaaatcgctgcatttgaacctaattccttcatggccaacatcctttcgcttactaattataagtagactatagcaggaaaactttcgcagcgcaatgccgctcaccgtcttttacattatacttaaaacagcggtgtggcaatccataagcaacagagcgttcgccaaggctggcgagcgtgtttcagcgcaacgtcatcctgcgcttatccaagataggcatgtaaaggttccattttcagcagtcaagacgtgaacacactgaaattacaatggctaaacgcaccagctcacgtcaaaaggaggacttcacgatgtccatttcaaggtctcgattactttccggtattgggctgtcattagcatttattgccactggtacggcgcttgccgggtattggtgtcaccgcaatcaacgaatttccaaccgcattttaaccaaggtaaaacgtaattttgcgaaggaaggaaccattgaaacaagttggatcgagctacaaccgctcaccatcaatgaccatcatcagcgtatccaagtgtatcgcggcggtatgattcttcgtcattcgaaactgcaccgacaaatagcctttctagccttggctgatggttcgctatggcgcatcaaacagcaacccatcaccactgcctagattcatgataaaggctgcacgccttagttgccacttaatctattatcaatgtcaaaaatgcacgctcactcaggccttaaagcgcgcaaccagttcataaattcggccaccatcagcgctgaacttttcttcgtactctgtcggcacattatccggaatgcgttgatcatgatgaacatcaagcgagacgagttcaaaagtcatgccgaaattgttcatactaaccagcgagtattcaaataagccttgattgtcagtcttaaattgcagccgtgcatctggtttcatgatcgtttgatattgttgcaagaaacgccgatatgtcagccgccgcttttcatgccgcgtttttggccaaggatcagaaaagtttaagaacaaaccgctaatttcagcttcagcaaaataatcggttaagtcggcaccatcccccaaaaccagttgaagattgggaagttttaagactgcctgtttcttcaggatcatggcaatagcagcctcttgtaattccaaagcaataaaattgcagtccgggtgagcctgcgccatcgcaacaatgaattggcctttgccagaaccaacctcaagataaagcggttgattctgtttaaatcgcgattgccactgccccggcatcttttccggacgaacaagaattagctcaggatgctcggctattaatggtttcgcccaagttttgttacgtaatcgcatgcatgtcttcctttatttcataattgtgatgattcttcgcggtgatcgtttgtcccgtgtcgacaatcaaaaggcctgagacaaaaccggattttgccacaggccctttgccacgcgcttacagcttccattcaatgggtcgactgcaatgtctcaaattgttgcaaaacttgtgcgacctcatctgttcgctggtgctgtgctgctgctttcatgtcgttcaataaatgcaagtcgccataccaataaagccgattttccaaagattcatcattgttggcaccataggctcttagaaacgctggccatgaattgcgatgaccataatgcgccatgacatcagcaagatcataagccggatcacctaatgccacctgctcccagtcaactaaataaagtcggccaccagcacgcaaccaatttttatgattgagatcgccgtgacagacactttgaaccgtcacccgcggtaaccactgttgtaagtcgctcaaagcacgcttaacccgcggctgatttgtaaggtcacgggggaagtcttgcaataaatcgtggcgtaaccgcgctggatcaagaatttggccaccgacttggcgaagcattcgttttaataaacttgaatggtgtacctgcgccaacattttggctaccaccggctgcatcatttgctcgcgggttaatgtttcaccgtccaaccattcttgtgccgttaacacatcaccggtgctaacccgacgcgtccataataggcgtggggtaatatgctcgactgaaagtgccgcaagaaatggcgaagcgttacgttttaggaaatacttttgattggcataaaccccaagaaacgcactaccggtggaaccgcctgcaggttgcagggaccacccggcatctaattcaaactccataggcactactccttatatctggccgcaggaatggttctaatcgtcaaaaagacactcccaggcgctcgtgcgtccacgttcaatattactaacttgagaaattcacgtcaagaggcaaagtgagcgcgagccggcgcgcttaggaatcggaatgtaagtggccttgagcgtgatggccgggctttggccattgcgttcaaggtccttacacgcagattcctgcgccggggagcgcgttatagaaagagagtgcgagccagcccggttagaaaccggaacataagtggccttgggcgtgatgggcccgggcttggccatcgcgttcaaggtccttacacgcagacttctgcgccggtgaacgcgttatgggcgtaaaggcggacttgcgaccaacgcccttacactccgattcctgagctggcgagcgcgtgatgacaggcgcgagccagcgcacttaaacaagagagccatccaaaaaccactcgcccctataccaccacatgatgctgcttaagtcgcattcgtgcataccaccgtgtaaagccccagacaaaaaccacgccgcaaatgaaaatagcccctgctgccagccattgaagccgcaacagtgtcactaaggtgaacgtcgccacttcgattaaaagcaacaccgtcaacaaccgctcaaatgcagccggtttttggtcaggcgcgaccggatacagatgggtaaagacaatctcatcatactgataataaaaaggtaacagctggaagccgaccatgtaaagaaacaagatagcaaaacccaaagccagccaccatggcgacagcaccgccacaatgacagcaccgatcaccagcaggcgaagatataagccgagatactcaccgccacgtaaaaagccgcgtagatacaatgagagccatgttgttgcttggcgtggtttgactaattttaagaatccatccaaataacggcgccgatgcacactattggctaatcctggtacatcggtaaataagttatagaaccgatatacccgacccattcgatcatcttctagtttgatcaaggccatgaaattcaaccgtccttggtccaaaatggttcgcaattgccatctgaaaacaagatccagaatcaatgcaaccaaaagggtcactgccggatgcaaataaaacccggcaaaaaacgcggccccggcaattgccaacaacagtaaccgttgatgatgccactgggtcggtaattgatagcgttttagtaactgtaaccacaagtcaagatccttaaacagccaaactgccattagtaaggtaaccgtcgcactggccgggtctttacccagctgcgcaaacaacggccacatagcaagactggcaaaggtcagcaaaacgcctggcagcagcaagctataatggcggctttttaataaatattgccgaaacgcctccgcttttggcaacaaaaaaatttgatccggtgcttctgcaagggtcgccagctgaccgaagctaagtaagccagtgaaaataattgccaagcataaagctaaccaccaggaaggctgtaaggttttgacaatttggctatacacataaagcgcaccgccgaataaaatcagtaaaatcaagacaaagtgatcattaaatacaaggcgtaaatatttttgttgtgcctgcacatgttggcggaggcgcgcacgccacaagtcaatcatgcttcttcctccgtcatcttcatataaatgtcatccagactgccatcttttaagtcaaattgttgctttaatgatgccatatcaccagtggcacgcacttttcctgctttgatcaaaacaaactcgtcagcatattgctgggcagttgccaagatgtgcgtcgacataagaatcgacgccccctcctgttttttttcggtaaccaaatttaacaagtcgtgaattgccaatggatcaagaccggtaaacggttcatcaataataaataacttggcatgggtcatgaacgccgctacaatcatgactttttgctgcatccccttagaaaacttagccggaaaccaatctagcttgttatctaagcgaaattttttaagcatccgatccgcagcctcccaagccgctttggcatcaagatcgtaagccatgatggtcatttcaagatgttcccgtaacgttaattccggataaagtaccggcgtttccggaacataggcaaggttggcccgaaaatcagtgggattttgcttcaatgttgtcccgtctaagtcaatcgtgcctgcctgtggcgtcaacagtccgataatatgtttgatagtggtcgattttccggcgccattcaggccaattaagcccacaattttgccggatggtactgtaaaactgacgtcgcgcaaaacggttagattcccgtagccgcctgttaatccttcaatttttaaagtcatcttaccagttccaatctgtataatttcagttagggatatgatagcatgaaatcaaggttcctattaacaaaagcacaaggagaaatgaggtaagagcatgaacgattgcattttttgtaaaattgttcgcaatgagattccaaacgttgcggtctatgaagacgatgtggtcaaggcattcctggacatcactcaggtcaccccgggccatacgctgattgttcctaaaaaacatgtgccggacatttttgcctatgacactgagctggcagctgcggtttttgaacgcgttccaaaaattgcgcgtgcgattaaagccagtaatccggcgattaaagggatgaacattttaaacaacaatggcaaagtggcttatcaaagcgtcttccattcacacattcatttaatcccccgttacagcaatcaagacgatttcgggatgcattttggcgatcacagtgctcaatatgacaccagtaagcttgaagaagtggccgccaaaatccgcacccaactggaggcttaagtatgaaatttcgggatgggctcttgttaggtgctcttacgggtacgatttatggcttattgaccgcaaaaaaaaccggacgacaacggcaacaagcgatcgctgcttattttaacggcatcgctaccggtgtcggtcaggttcgccaaagtatcaatcaagtcagcgcggcgttaacgcaactatctgccgaagtcgaccaaacccttaaaccggcaatgaaagatattacggccagcgttgagacattcgaatttgaaaccgcaccgcgcacggaagccatcaaagaacatgtggacaatatcaatgatgcgatcaccggacttgaagaaaatcaatctgcgcatccgaccaaaccttaaccaaaacattgaaaataactaccgttgcctttatacaagccgtgacggattcttgaaagttatgtgaagatccgcgtacggccgtaagttatggtatagtagacggcagtgttaaccgaaactttttagattaggatgtgtgattacatgaaaaaatggattctcggtgtcgttggcttgttcgtagcagtgaccctagcaggctgttccagcagcacggttgcaaatatgaaaggcgccaaggtcaccaaagacgagtactatgacgccatgaaaaagaccacaaccggtcaggcaacattgcgtaacatgatcgtcttaaaggctttagaacaacaatatccgaataaggtatcggataaaaaggttaacagccagttcaacaagctaaagaagcaatacggctcttcatttgattcaactttggaacaaaacggctacaccgaatcaagcttcaaggatcaaattcggacaacactttactctgaagttgccctcaaggatatgaaaaaaccgacgaccaagcaaattgaaagtcagtggaagaagtatcagccaaagattcaggttcagcatattttagttaagaccgaagatgaagctaaacagatcatttcagattatcaaaaagatccaaccgaaaagaacttcgaatctctagctaagaagaactcaattgataccggaaccaagaataaaggtggtaagttagctgcctttgacaacacggacaccagcttggattccactttcaaatcagctgctttcaaactcaagaaggctggcgacattaccacaacaccggttaagacgcaatacggttaccacgtcatccgtgttatctccattgccaaaaaaggtacgatgaaggaacacaagaaggatcttgaaaagcagatctacacctcatggcaaagtgattcaaccgttatgaacggtattattaccaaggtacttaaaaaagccaacgtttcgatcaaggacaatgatcttaaagatgtgctttcaagctacctcagcaccagctcaagttcttcaactagcaaataagtaagaaattgagtcatgcaaagaggctgagccataattcacagcttcaaaataaaagcgaatcgtttctcgctaaaatcgagaaatggttcgctttttagattccttacattagtgtaaatagactttaaggactttagtgccaaggcggagcaatcgtaggccagatggggctcagccgtggaaacaacacagcgaccggtttttgtcgctgatgttgttaggcgacttggagactgccgggcttgcaggctccaagcgccgtcacagcgttccagccccatctggccggagattgcgtagtttggcacggcccggaactgttttaatgacccgttctattaaagtattcggactttagtaagtatcacatcctgagatagaattatgtcccagttcctttttttgttccggtaaaaccatgatttaagtttgacgacggctttctaatcacaagcagtttgtctttagctcttaatgcggatccggatatgtttgaccatttgttggccggtagaaacgccgattgtccatgccaaagagtcgttcagtaaaggtgcctggatcgacatgttggtaggcagtcgtcatcatgttgattgaggcatccatttcgtccaaatcgtgcaacacctgggcctcaagtagttgcggccgcaccggcgagccatattccaataaaccatggtgcgctaatacaacatgccgcagcaatagcatatcctcactattaatatcgatctttagttgatgggctgccaacacaatttgttcatcaatcaggacaatatgcccaatcagattcccgggtaccgtatattcagttgaaatcggaccacttaattcaatcgtcttgcccaagtcatgtaaaatcgcacccgcataaagcaaggtcttgttcaaacttgaatactgggcaaccacatttttagccaagcgcagaatactcagggtatgaaaagcaagcccaccggcaaaggcatgatgattcgacttggcagctggataactgaagaacgcttttttatgatcttgaatcagttttcggacgattcgattccaattggcattagtaatttcaaaaatgaaactgtttagctcttcttccatggcattgggcgcttctggtgcgcgttcaacgaaggtacgcggatcatttccttcttcttgagttgccaagcgcattgagtaaatcttgatctgcgggttgccttgatacaattcccgctttcctgacagctgcaccacttcaccggctttgaactgggcaatatcattttcggttgcatcccagaatttacccgaaatatggccggaattgtcttgaaaaatcatggcaataaatttcttgccattttttgctacccggacttccgctgatttaattaatacaggaagtcgcacatcttcttcattatggtaatcaaaaagccgttttgccacggtcgtcaccttttcctttactattcaagctaattaaatcataccgatgttagttggaaagtacaaggaagggatcgttcaggcacatggcagcatgaacacagacacgattcttcgttttcaattcctccaccacttcgagccgcttgcacgtggcttttatcggattccatcgcataaaaaatcggttccaaaaagacaagccgtctaaaataaaacgagctatgtcttctcagaaccgattttacttgatctttatcgacatgccacttcgctaacccaagttggtatgttgtttaagtgagccaataacttatggcttgctttgataaacgtcaataattggttgggagatgatcttattcaattcgtccatcatctgggaaaggccttgttctttagccatcaagttctggatcggttgaatatcacgcatcttgtcgccaagtgcctgcagtgatttcacttcttcatcggtaaaatcctgtccctgcattgacttttgttgcatctcatattgcttttgttggaactgctggaacaagccatatgcaacggtgtccaatttcaaaagatcaaatgccttcttaagatcttggaattcctgagttgtcttgatatctgccgccatttgatttgcggtgtcgtaaacgtttgccatgctttacctcactttttgagcctatttgaaccagctcttaatattatcataccattttcccacagtttccttggcactgtctatacctttatcgatactatcttgaattccttgccaagtgtcatcactttttcccggtgtttggatgctggccatttgggcggcatccttggtgtcaaaggcagtttgaggtgtattgggcatcagcttcgacatttcaagcttgaacaacggggccacaccggatgtgctggtaccttgcaaaaagtgctggctatccgttgtcggataaccaatccaagttgcattcacaatatccggcgtataaccaactacccactgatccttggtgccataaccccaactgctaggaacctcggtactgccagttttaccagcaattgtatagccagacggtttagccgttttcccggtgccttcgttaaacgtaccgatcatcatactggtcatttcctgagcgacttttttggacatgatctgacgcgttgccggatgggaattatcaaccaccgtttcgccgctcgcatcaacgattttccgaataaagtgcgtggtcggcagcttgccatcgttagcaaacgccgcgtatgcccgcgccagcatcaacggtgaaaccccgttttttaaaccgccaagggctgcggctagattctgatcactcgatttgagctgaatgccaaaacgatcaaggctggcaacgcctttttgtaccccgagtttgttgagtaaccaaacagcaggggcattgatcgaatccgccagtgcttgatacatcggaacggtgccaaggtatgtgccggtcgcgtttgtcggggtataattatttttgccgtagctaagcttttcgtctttcagaatcgagtcgtagtgatacccgttttctaacgctggtgtgtacaccatcagcggcttgatagtcgatcccggcgaattacgcagctgagtcgcgtaattaaaccctaggaaggtatgttcgccccggttgccgacaactgcgcgcacgccgccagtcttgggatccagaataattgatgcgccttgaacctgtttaccatctgctgcattagccggaaaagcccagtcctgttcaaaactggtttgcagattctgctgataggtttgatccagattggtgtagatcttatagcctttattcagaatatcatcaacgctaatcccctcactgcgcgcttcttcgatgaccgaatcaaagtaagatggatatttctgtgcgttggcgtttgaaaaagcatccaccacctgaaccgattgcgctttagctgcatttgcctgcgcctgagtcaatttgtggttatccaccattagctgcaaaaccacattacgtcgcgaaatcgcgttgtctttatgatcagccggattataataactcgggttacgtaacatccctgctaaaatagcaccttcactggcatccagttgactcgcattcttgccgaaataacgttttgcagcatcctgaacgccccaaaccccattaccaaaataggcattgttgagatacatcgcgagaatatcctgcttggagtaaactttattcagttgaatcgccatgaatagctcttgtgccttacgcagcatggtctgcttttgcgtcagtaacgtatttttggctaattgttgcgtgatggtgctcccaccacccataatttgaccatgatggataacatagttcaacgccgaccgcaaaattcctttaatggaaaagccgccattcgagtaaaacgtccggtcttcggttgaaataaccgcattttggacttgcggactaatcgcactgagttcaacatacgtccctttttgaccgtacaatgtccccgcttcttcattgttagcatcgtaaataactgttttggtctgtaaggtgctcttgatattttgaacatcagcggtttttgctttataagtgaaccaggcagagaagatcaggatgaccgtcaacccaagtaaaatgagccagcgaatgacctgaaatcggcggaagaaccaccgaatgctctgccagacacgtgatagaacctgcatgtccttcctcctattatgaatcttatttattgtagcataggccgttgtcagccaagtctcgaccggctgtttttaagcaaactttatgaccaaacgaatcgaggagtcctcttgttatttcaaacatccgccattgcccagaatcacgccagcctccgggatcaacttcaagactggctaatcccccggaaacgccaacatcagatgcgcgtggcacaaaccatccaggtcaacggccactaccgccattttaacgagcccgttaaaaatggtgaccttatctcgctgacttatgatgagcttgtccatcgaacctatgtcccggaaacgccgcatcttaacacccgttatgaggatgacgacttattgatcgtggacaaacccgccggcatgaaaacccacccaaatcaacctggcgaaaccggcaccttaatgaatcaggctgctgcttatttggctccttttccagcgcttatcacccaccgacttgatatggcaaccagcggcctattagtcattgccaaaaatccgttagcacaagccatcattaatcggcaactaacaacgaaaaccatgcaccgtgattatctcgccgtggttccgagcgggattccggaaaaaggaacgattcaagctcctattggtcacgatcctgacgataaacgtaagcggatgattcgcgctgatggtgcctttgctgtcacgcactatcatcgaattgccgaaaccgcggatactgccacgattgaacttaatctagaaaccggacgcacccatcagattcgggttcatctagccagtatcggcttccccatcattggcgatcctttatatgcagccacggaaacagccactcggatgcagttacatgcgtttcgcgtacgtctgatccggccgctgacgattgagcctctaacggtcaccagtccaagcccgtttcgtcaataagctatacgatcagcgctctttgaatcctcaacccatcatgtcagttagaacctgaaaagctcccataatcgctagcgtttttagctaaccattatgggagctcttttaaaccacaacttacctcaactcaccgatcaaaagcatgacgataagcctcttcaaaccattttgcctgtttttcatcagggctaataacgacaatcgtatcatggccggcgatggtccctacaacttgatcaaaatcgatatcatcgataatggccgccaacaaattaccattacttggcagcgtcttgatgacattcaggaattgaacccgagtgatcgtcaagccgacttcccgaatcgagcgccccagccgttcaagctgtgactcctctgacccgcgaaaaatcgtatagcgcagagttcctttggcatcttgggctttaacaatttgcatttcccgaatatcacgcgaaattgtcgcctgggtggcatcaataccagccgccttcaatgccgccaaaagctcctcttgcgttgcgatcggtttttgattaataatccatgccaatgcagcttggcgttcactcttattcattcaacaacctcctaagcgcgacccggcgcgctcagaagtcggagtgtaagcggcctcgaacgtgatggcccgctcttggccattgcgttcgtggtccttacacgcagacttctgcgccggggagcgcgttaatatgagcgcgacccggcgcggttagaagtctctgccgggtcgaccgcgtcatgaaacaagactcaattcatccacacaagtgattacatttcttcaggtgccgccactcctagcaagtgcagggcattctccaagacttgagtcgtcgcggagaccattgccaaccgagccggcagttcactgtcttcaaccaacaccttgacgttggcataatatttgttgaatgccttagccagccttaatgcgtattttgcaatcactgaaggctcatactctttagccgcccgcaccacgatacttggataatcacccaaagcccgtaaaacatcccacgcagccggatcactcaaggctacttccggcgccggtgcaatgttggccttgcgcaagatgctgtgtgcccgggcgttggtgtattgaacgtacggaccagtttcgccttcaaaacgaacgacttcctctaggttaaagtcaaagttatccagccgttcattcttcaaatcatggaaaataaccgccccgacaccaacttcatgggcaactttttctgcattcggtaagtccggatgtttctcatcaatttgctgctgggcaagtcccactgcatcttttaagactttttcaagcaaaatgatgttaccgcggcgggttgacaactttttaccattggctgtaatcaagccgaatggaatgtggtgtatatcattggcccactcgtaacccatttccagcaagactgcttttaactgttggaaatgttcgcgctgctcgttaccaacgacatagaggctctgcacaaaatgataatgttctttccggaaaatggctgctgctagatcacgggtcatataaagggtggcgccgtctgattttttgatcagcgccggattgaggttgtatttacttaagtctacaatctcggcaccttgactggtttttagcaaatgcttatcttccagggttttaaccacactatccatcttgtcgttgtaaaacgcctcgccattatatgaatcaaaatcaacgccaagaattttatagattcggttaaactccgccagtgaaaccgtccggaaccaccgccatagcgtgattgcctctttgtcgccatcttccaatcgcttaaaccatgcccgcgcttcatcttccaactcgggatcggtttcagccacttcatggaacttaacgtaatactgcaacaggtttttaatcggatcagccttaacatcggcttccgatccccattttttataggcaacaatcagcttgccaaattgggttccccagtcacctaaatggttaattttaatcggcgagtaaccgaccttctgcaagatattagcaagtgcattcccaataaccgtcgaccgcaaatgccccattgacattggcttagcgatattagggctgctcatatcaatcggcacattgccttcaccaagcttagcatcgccaaaatgctcgccggattgggcaattgcttttaaaacttcatgggcaaaactgatcttgtctagataaaagttaacatacccgcccactgctttaacctgctcaaacggggacgcgtcaatctttgcaaccaaatcactggcaatcatcttcggcgcctgatgcaagatctttgccaatgaaaacgttggaaaggcaaaatcgcctaaatcagatgacttgggtgtttcaactaacgcggtgatgcccgcctcatccagctgaccatccaaaaccggaacaagcgctttaacaacaagttctttgaaatccataatttcctcctaaatcatgatgccacgaaaaaagacccatctctccctttacgaagagacgagcctacacccgcggtaccactctgcttgacatgagtccactcaaaacactgatcctcaaaagcgcgccaacaggttagacgtgatcgtttgcactagccgatctcacttttaaacgtcaaatgacctgaattcctctttctcaccggatctatacagcggtcgacgagaatcgaactcgcgacaccagcttgggaagctggagttttaccactaaactacgaccgcaaatcaacgcatataagtgtatcacggcgaagcaggtttgcaaagactcaagcggtacttttttctatgattttaatgagaaaacatcttaaaaatgagtacgggtaattttgttgttaatctttctcaccgtgttataataaaaagaaagaagaggagtggttgagatggcaaagacgggatgccactattattttgtggcgcgcaacgagaaaaccaaaactggttatcacattagttttcctaatattcctaatgctgaggcggtcgggacaacgtatgaggaaactgtttattattcatatcgcgttctggccgatttcctaagccatctgccaaagcaagaagctgaaatccgcgcttacacactctctgatattcccgacaccgtggcaagcaacgttttctactctttggttagcgtgacaccagacttcgatccccataaaatggaaacgcactttacgcttccgcaaacgccacccgccgacattcgtcaaaaagcggctaaacttgccggtctcgtgacccccaatgacaatttggctttgtaggcagacattagcatgcaagttattcgaattggacttttgattattttcattggtgcgagtgttctgactctgattggtttattaggctggctcattttaatgctcagtcatcatcatccagaaaaaatgcggcgtttgacactaattagcggtggcattgcgttggcggcgttaatccttaatgccttcacctagcatgccgcctgatcatgaatttgcatataactcaaaacgttcctttaaacttcacgaacagaagtttaagggcgcttttttggttacgccggggtgagtgactggtttctgaggcttttctatgcttaaatgggaacagcaaatattgaaggagtgggcgaatttatgactgatctgcgtacaagtattgatggctttaaatttgataatgtatttatgaatgcaagcggcgttcgctgttacaccgaacaagaattagacgaactggtgcaaagcgatgccggcaccttggttaccaaaagtgcaacccaagcaaagcggctaggtaacccgagtccacgctatgcccgtctggaactaggctcaatcaattccatgggcttacctaacgaaggcttggattactacctcaactacgccttgaattttcaaaaagcgcaccctgatcagcccattttcatttcagttgccggtttgtcgatggaagaaaatctggcgatggcacacacgattgaagattcggattttaacggtctggttgaatttaatcttagttgccccaatgtgccaggtaagccgcaaaccggttatgattttgaccgtacgcaagaagttttgactaacctgtttagcttcttcactaagccagccggggtcaagttgccgccgtatttcgatttggctcagtttgaccaaatggcagctattttaaatcagttcccgttgaaatttgtcaactccatcaatagtctgggtaatggtttgatgatcgatccagaaaccgatactgttttaatcaaaccaaaaggcggtttcggtggtgtcggcggtgcttatgctaagccaatcgcccttgccaacgttcgcgcttttgcccaacgacttaacccgcaaattcagatcatcggcaccggcggcatcaccaatggccgcgatgcttatgacttaatccttgccggagctagtctggttcaagtcggtaccctcttacaagaagaagggccagcggtgttcacccgcctcaaacgagagctagcggcggttatgcagacaaaaggctacactcaaattagtgacttcaaaggacaactcaaaaccttatcatgaagaaaaaaatcaaagtctggtctttgtttacccgaaacaccaaagactttgcccatcactggggcgcctactttctactaatcagcgtaaccaatctcgcagtcgggctggcaattatcccgctgctgacttttagtgcgcaacaaatcctgcgtctaggaaatgttccctacatcactttaaccaacttaggcacgattatcgtggaaaagccaggtaccgccgtcttactcttgctaattggcttgctattactgctgttcgtctattggcagtttgcgtttctaattctcggcattcaaaacattcaccggcagacgcatttaaattttcgccagctggctttagcaacgatcaaaaagacccgccgcttgacgcccacaaccattatgattttgattgcctattttgttttggtttttccattctcgagtatcgtgtttaaaaccagtttattggccaaattgacgattcccgatttcatcattgatttcattttggaccgctggtattttgcaattctggttgttttgttatatctaattggcacctggttggctgtgcgcctattaccacttttaccagctttaatccttggtgatgagcatcccgcagcaacggttgttcgcagctggcaagcaacacgcggtcaggcttggcgaacactcttttcaatcatcctcattgtcattccggtgatggtgctgacggtgttgctgatccttggattatatgggtttcagacatacctagaccagcaatggcagcagtggtcattattaggtgcaaccattaatcttggtttattgcaggtcacacttttgctgatcacggttttctttactgtcatgctgtatcaattagcaaccgcccaagcagaaacttttcaactcatttccgtgcaaacgattgatgcgccagtgtcgaaacggcggcggacggtactttttcgtctcagtgctttagcgctaattttgctggttgtcgctagcaccagtgctttttaccacgcttatctaaccggagccttaacgacccagccattaaccatctcacatcgcggagttgacaacgaaaatggcgtgcagaatacgatcccggcgttggaagccactgctaaggaaaaacccgattatgtcgaaatggatttgcacgaaaccaaagatcaccaatttgttgtgatgcacgatgaaaatctaagcgcattaaccggacgtaatgctcggccgcatgatttaactttggctgaactaacacagctaaccgcgcgtgaaaatgggcacgccgccaaagtcgctagtttcgatgactatctggccgccgctgaagcagtccatcagaaattattggttgaaatcaaaacaaccccctgtgacagcccagaaatgatggatcattttatccagcgatatgcgcaacgcttattggcagatcatgatcaagttcattcgctcgactatcatgtggtcaccactctgcgtaagaaggtcccgacactcaagacgttctttattctgccatatacactggttttccctgcaacgccagcaagcggttatacgttagaatcaaccaccctttcaacgaccgtgactgatcaagcccatgcacggcatcaggcgatttatgcatggaccgtcaacgatagcgatgatatgcagaaaatgacgtttatggatgcagatgggatcatcactgaccaactggcaacacttaagacgaccttacgtcagatgaacgatcaccctagttatgccgatcagctgctgaattacatgaccagtttctcctctggggataatagtccgttttaaatgattcgcgtcatgtttttagagatgctaagtttaagaacacgaaaaaacccactcatttgagcgggttttttaaaccatctttacttaaagtaataccgcgctgtttctaatgcgctggtttccatcaatcgtttgccgtactccgacaaaaccgcagatgacaacggtgaccgatcaccaaattccagtgcgactgccatttcatcgtgcgcttcattagatgaaatttcgtttggatagaaagtcaaaacaaggtagtagttttgcttgtaacgataaagatcactcttaccgccttccaagcgaagcgtctgagcaaggctgatgaaatcttcaaaatcctttaattttaagactaattcggtttgtggtgctttggcagcatcaatataaccgccttcgtcaacagcttgctgatcatgttgatcgttggcatctaacccctgcagctgctggcgaatataatccggtacctgggtatccgcactatcaccatcagaaccggtgtcgctatcatcattcttttgtctgttcttactgatcaacaactcgagtccggactgacttggcatgacttgaaacgtcacggcctcgtttgtcgcaaacgtatgatctttatcgacttcatcgaggatactatagaagaagctttcaatctgcttgtgattaccaagcaaatccagcacggtaattccccgctgcgctagatcatcgttgcctaacatgacccggatcgtatttgcgttaatccgttccatttccatgattgctgcacctcactttagtcacggaaccctgacttttgtggttcatcacatgaccacttactacattatagcagatttcgtacttcacggcattctaccgcacgtacctgttatgatcaagtcgcaagctttgaaatcttaaaatcgcactcattttgtacgcaaaaagaactgcctcggcgatccattgtgccaaggcagttcttttttccttccccacttgagcaacaaaagcgctcatcaagcaagtgtttgtaaaaatgtcagtaatttaatcattaaaatccagccaataattgcgcctgttgcaattccaaagtccgaacagatcgtggcaagaagcggcggatttcatcctcgttatagccaacctgaaggcgtttgtcatccatcatgatcggtcgccgtaacagacctggatatttcgccactaacttaatcagagtacccgttgacagttcatcaatattaacgccgagctcctggaagatctttgaacgtgttgaaataatttcttcagttccttcttcggtcatcatcaataaccgtttgatttcatcaacattcaatggatcagaaaaaatatttcgttcttggaatggaatcttattttcctttaaccaggcgcgcgccttccgacaagatgtgcaacttggggatgtatataaaataaccatgagcgctcgctccttttctttgacgaggtatctttctcaactacaggtatagtatacgagattgcctcaaagcggcgcaatcacatttagaaaaataattttccaaatgatgaaaattctgcgttcaaagtcttgatattgcgcgatctatcaacgtctttataagtttaattgtaataaataccccaagttataataactaaatttttaacattttcctctcattttaaacgatcagttatcatcactatcagacattaattgtcaagtcatccccggcaacgtcaattggtataccacccgctactgcttgtgcctgatccttcaaagtgacaagatctagctgttggggcaaatgcgttaagagtaaacgcttcacctgcgcttcttttgctaacgttccggcttctggagcggtcaaatgccatcgtggcgctggttgatcggcaaggaaattggtatctgccatcaacaggtcagcgtgcttagcaaagggaaccaatccagaaaaatagcgcgtatcactcgtattcacaagtactttgttggtgccttcttctttaatccgtaccgcaaacgccgggaccggatgctgtgtctccaggaaggttaacgtaagcggccctaaatgtaaggtgctgtctccggtataaccgatcccttgcgtaaacgaaccaaacgttaagctcccaaagttcaaaggatcctttgtgtgcccgtaaattggcaatggcgacacttttttgttccccttgcgcagttgatagaagtactgcaaaacgccgacatccgccgtatgatcatgatgatagtgcgtcaacaaaaccgcgtccaattgcaatgggtcaaaaaccttttccaatgccagcaaaccgccactacctaaatccatcagtaagtgatagtcgccactttcaattaaataagtactcgttgcatgtccggcatccggatagccgccgagataacctaaaactgttaatttcatttagtttttcctccctttcaaagtgaaatgccgccaagaagtttataataaaagtggaggtggtcgttatgtccacaatacaaacggttttcggcagcaagtcttttctgactaaattgcttgatgaacgccatgatccgcaactaaaactcttgaaaccagcacaaagcggtctagactatatgattttcgatcccagcggtcaagccacattcagtgctcccctacgctatgaaattttagctagcctagggaaaaccgagcaaagcggctatgtgcatttcatgtactttaaccttgatacggatgacgtcaaagtcttcttatccaaaattaaacaactgatcgataatcatgatattttgttgggcgaaaatcatattttactagcgcaggaagccaaacatccggacaatttcctggtgatgtcagtctggcaaacgagcaatgactattacgaattcaagaatacgccggcactcgcatcagtcaaggaattcattcgccgtgctgcctctgccaatggttttcatgaggccggttataccgtgatcgacccgcacaaaaagtgacagtgtcaaccgccaaatcattttcgtagcggttgctgcgtttgatggaatgaaaaatttaaacccgcaccaagctactcgacaccagaagtttgccaccaagattcagcgtccggctttacagactgggttttggcgattcaaacatgctggtgtttttccatgccagaaattcattcagttcgccaccgcccaatcggtaaatcgatcatgcgaaccatcacatgaacggttgcttcgtaaaagagccaatcaaatgctgcgtaaatgccaatcatgacgcctaaatagcgcgagggtggattatcaagataattggtcatcacactaatgacacataaggcgatcagaataccgcagatgagcggaacagcaaaaataactgcagcctggcgataaagcgtgacccgaatctgatgaggatccatccctaactgtttcagaatctgaaaatggcgaatttcctgccgcaccgcgatcacttgcttcaacaacaagatgcttccggttgccacgacgaatacaccgctaagcaataagatcaaaaatagtaagaacccatataaggtactgacgaaattctgctcggccgcctgaagaccaatggggttgcgccaatataccatgttggtgctcgctcgatccgtcaccgttaaatcatcgccttcacgctgttgtatgccaatattaacaaactcttccagattcttactgttgcccaaatgctgcagcaaggtaagtgcgcgtttggcagcttttgtttttggcaatttagccatatacaagcgatccggcgttccattcaacatatcaaaggttcgattggtcaccaacagaccacggtcaaaataattattgcttccggttggaaaaagattggtcgtctgcgtcagacgtaacgatgtatcactgccaggcaggataatggcgcggttcggattacgtctggcgccaactggccgaaagccgcttctggtcggaagcatcaacttagcctcttgtgaatgcaaccgaatcggtcctaattcccgttgaatcttagccgcgcgctggtaatcacgtaacgcaaccacattatagacccccggctgtttacgcacttcaccaatctgattacggagacgaatttcagcataaaccagctttgaaggaatcgtcatcgcctgcttcggtttgacttttgcctgtttcaaaatatcggtcacattatcaacaccgacacctgatgcgactatggttgtcggaatctcacgtaaaaccaaatcctgattatattgaaaaagcatgactgaactacctagcatggtaatggtgatcgcacacagcaacgtggttaaccacaacgaatgagcattcccctgcaggcgcttaataatcagatgtcgggaaataccgctcgcattatgggtttgcatctcgtgccgtttttgataccaggctaccagtcccggcaggaaataagcaaaaaccaaaaacaacccgagcaataaggcgccgatcaccaacaataaaaagagtggtaacacaatcggtcccggaagccaggagagtatgcgcatcaagcgaccgccaattggaagcaaacgcaacatcgtcaacaaactgccgaccaacaacaaaaagccaaaaataccgacccagaagcgccagcgggtttgcggttttggtggtgccgggacatcttgctggcgaataaactggcgtaacggactgcgaacataaatcgcattgatcgcaccgactaaaagataaacaactcccatcaacgtcaagacgtccattaatgcggacaaagaaaacataaagccgatgggtgtgtgcaatgccattaaccggatcaacaccatccctagcaatggcgataaaatcaagccaagcaaagccccgacaaacaggcccactatgccgatcatcacactttcaagaaagacaatcagcccaagtttggcgcctgataatcctaaaagacggtataagccaatttcctgatcacgccggccaattaacagactattcaaataaagcaggaaactgattgaaaaaagtgccaacaccatcatgacaatcatcaacaggctcggcacaatatccaagctaccaagtcgcttactggcatcacttaaaattaaccgattattggcaactgcaccgatcgcgtacataatcgcactaatcaaggcagcaatcagtatctgtaggccgtcctcgtgccgatgccgaatcagattcgttttaatctgttcccacacgtgaatggcctcccccactaacggtcgcttccatatcaatgatgcgatcaaaaaattgttctcgcgacttgccacgggttacttcggcaaaaaaggcaccatctttaataaaaataatccggctcgcaaaactagccgtaaatggatcatgcgtgaccattaaaatagtcgttttctcttgctgattcaactggcgtaaataacgcaaaaattctgttgctgccagcgaatcaaggctgccagtcggctcatcggctagcaacagactgggttgtgtaatcacggcacgcgctgctgctacccgttgccgctgccccatactaagctcacccggaaaagcgttcaacaaagcatccagattaaggtgttttgacaccatttgtaaccgttcggcccggtcaggctgcacatgatgttgcaacgtcagtggtaataagacattttgggcaaccgtcatatcatctagtaaattaaagtcttgaaaaacaaaaccaaggtgatcacggcgaaacttagcttgctgccgttcattaagcgcctctagatcatggccggcaatcctaaccttccccgtacttggcgtttcaatagttgccaaaatgttcaaaagggttgattttcccgcaccactaggacccatgatgccaataaactcacctgccttaacctgaaagctaagatcgtttaaggcccgaacccgatcgtggcgctggccgaaaatcttacttaaattagatacttccaaaattgccatgggcttacctccgtcatcatcataccaaaaaccgccacattcaacatgccagtgcgaccttcaaatgttctaaacgggaaggattaaagacatcagaaaaagtttcgataacgtttcaccataatacgctcgccggcgcagggatctgcgtgtaaggaccttgggcgcaatagccaaggccacttatgttctgtcttacgcccataacgcgctccccggcgcagaagtctgcgtgtaaggaccttgggcgcaatggccaaggccacttatgttctaacttacgtccataacgcgctccccggcgcagaagtctgcgtgtaaggaccttaagcgcaatggcccaagcccggccatcacgcttaaggccacttacactccgacttctaagcgcgccggctcgcgctcacttttgtttgtgtctcggccacaaaacttgtacgataagttcaggaatggagttggtcgcgtgtttaaaatcatgattgtagaagatgatcagacaattagcggtcttatcgctgacaacctcaagaagtggcagtttgagcctgtcgttgtgactgattttaacgctgtcttcgatgattttctgcaggaaaaaccacatttagtcttattagatatcaatttgccggtttttgacggctattattgggtccaaaagattcgtgaagtctcaaaggtgccggttattttcatctcaagtcgcaacaccaatatggatatggtgatggcaatgaacatgggtgcagacgactttttgaataaacctttcgcgatggaagtcctcatcgcaaaaatcaatgcgctgttgcggcgaacttataattatgccgatcaaggaaccgatgtccttgaacacaatggactcatgctgaatctaaaaaacggcatggcccaaattggcgaaaaggaaatcaatctgtcgaagaacgaatataaattacttcaaattctgatgcggcaacatggccaaattgtcagccggtcaagccttttgcgcgacctctggcaagatgaacgctttgtggacgataacacgctcacggtcaacgttaaccgcttgcgtaaaaaaatcgaagaagcaggattgaaagattatattcagactaaagtcgggcaaggctatatcgttccctaggaggcagccatgcgttttcgcgattattttaaagaccatatttgggcgattggcggctatattttatgcgtcggtttagctgccatcatcgtttggctggatccgcaacaccgcgttaaattggcaacggtctggtatgcggtcttactcgtcacgttggttgcaagtgccttctttatcgcccattttgtccgtattcgccagtttgctgctcgcttgcaggcgcgccagaatgctgaagatgctgctttggattggccgctaccagggggtcaatccggactggaacaggttgtctcggatacttacaacaaaattctgaccttgcatcggcaacaaattaccgcgcttttggctcaacatcaagaccaaaaagatttcattgactcgtgggtacatgaaattaaagtaccgttggccgcggtttcattgcttgccgaaagttttgagggccaagttcccgatgacaagctggataacctcaatttacaactggatcaaatcgagttttatgttgagcaggtcttatactattcccgacttgacagcttttcgaaagattacttgctgcataatacgcaattgaaaccgctgattaatgacgttgttgccaatcaacgtaatggcttcattaacaaacgtttgtcatttaaactgaacggcgatgaccaaaccgtcttaacggacaacaaatggctacggtttattttggcacagctcatttccaatgcagtcaagtataccccagaaggtgggcgcatccaggcaaccattcgcgacaccggcaaggaaacccagctgatgatcatcgacaacggcatcggcatccctaaagacgagcaacatcgcgtttttgaaaaaggctttaccggcagcaatggacgcctgtcaaatcataaatcgactggtttgggattattcttagcagaaaagttggccgaaaagttagggcatcacttaacgttgacgtccgtgatcaatcaaggcacaacggtcaccattcattttccatatgtcagctattacaatgatgctggtcaaaccgttgaacatcccaaaaaggcacttcatcaaacaacagatacatctgattcatccaaccaaaatgagtaggacatcttctttaacgataaagcgagtagctaagcacacgaccgtcattgttgtcttgtggctagctactcgcttttttatctgtctatattttgtttgcagcaaagaacccaaccaccagcggcggcgactttaattggggtcaaactattatcgaatgaggtttttccaaagcttgatctcacccgccgcctgggttgccggtacatcaataatccgttggttggagctgccgcgaaattgcagtgttaagtctttttttgccaataggaaacgcccatccaccaatatatcgatgaggctcagtaacgttaacttgtcttcggaatcctgcatgagttcttcgtaagtgtaaccgctccaactccagatatccttatcatgcccaaactcttggcgaatccggcggcaaagacgaatgcagacctgagtattcaagaaaggttcgccgcctagcaaggtcaagccttgaacatatgactgacccagatccgcaataatccgatcttccagttcctgagtgtatggctgaccataccgaaaattctgggcaacacgattgtaacaacccgggcaggcaaagcgacagcccgagacatataaactacaccgaaccccttccccatcaacaaaattaaacggcttgtaatcagcaattcgttgttgtgaaagttcactggcaagccattctttcggttgcggattctgcggtaaacgagctgtggtcatcataagatctgcctttcttaacaggttgcgttagtcacgttaaagcgcaaccgtgcgtgttcttgattcaatcaacgcttcaaaaatgaacgccaacgaataagtctttttcatcgtatcatcttttgaccacaagatgtagtatcgattgtacacaaaataccggcctattatctatatcttgatagtaggccggtatggatgctgtttttaaatacgattacgcgcgcttcaaatgcagtgtcatggcatttaacgccaccactatggttgataacgacataatcgcggcaccaacagccgggctgagaatgaagccaactggtgctaaaatacctgccgccagtggaatggccaggatgttgtagccggcaccccaccaaagattctgaaccattttacgattggttgctttagccaaagataagaagttaagaatatcggctggatcactatgaaccaacacaacatcggcagtatcaatggccacatcggttccggcaccaatggcgactccgatatccgcttgcgctagactaggagcatcattaacgccatcgccgaccatcatcacaacgccacgtttttgataagcttcgacttgcgccactttgtcttcaggctttaattcggcttgaaaatcagtgatgccgagttgatcggccacttttttggcggtttcgtggttatcaccagtcagcatgaccggtgtaattccttgctgcttcaacgcggcgacaaacgacttgcttgacggcttcagctgatcgccttctgcaaccatccctagaacttgatcatcctggatcagaaaagccagtgagttaccggcccctgctaattgatcagcctgcgcttcatcataagccaagtgatgatcttttagataccgggcattgacgatcgtataacgttggccatcgatttcgccttccagaccgatgccttttaagacttgaacgtttttcgcatccggcaggtttaacgcctgttgcttggcggcagctttaatcccggttgccagcgggtgttcggaatgattttccaaagcagccatgacagacagtacctgcgtttgatcgtgaccggtaaaggcaattgttttggcaacggtgaatttgccttctgtcaacgttccggttttgtccatcaagataaactgcgcccgcttcgcagtctcaagtgcctggcgattacgaattagcagtccattcgttgcgccaatactggtactgcgtgcaatgaccagcggaattgctaacccgagtgcatggggacaagcaatgataaagacggtgaccattcgttcaaacgccactgccgccccgcttggcaaccacaggaagaaagcaagtaacccaactgccaatgcggcgtagaaaagccagccggccactttatctgccataccctcggctttacttttattggcttgcgcactttgaactaacttcatgacttgcgacagatagccgctttcgcccgtaccggtgaccttgatttcaatgacgccatcaccattgacggaaccgccaatcacctggtcaccttcagccttgcgaatagctttagcttccccagtcactaatgattcgttgacactgctattgccactgacaacttggccatcagccggcatttgttcacctgctaatacccgtaatcgcgcgccaacctggacttctgataatggcatgtccatcacgtgatcaccatgaaccacatgtgcctgattcggcaacaacgccgccaacttctcaaccgcgttacctgcagccataacggcattcatttcgatccaatggccaagcagcatgatcacgatcagtgttgccaattcccaaaagaagtccatgaccatcccattaggcgcaataaagttattcatcaaaaacgcataaagcgaataaccgtacgccaccgtgatgcccatcgcgatcaacgtcatcatcgccggttgtcgctgttgcaattctgcctttgcgccggtcaaaaacggccagccgccatagaaaaacagaaaagacgacaaaacaagaacgacccaatcagaccccggaaagacaatcggcaattcaatgaccccgagatgaatattcatgcccataaactgcgccaataacagcacggggatcatgacaatgaggctgacccaaaacttctgcttcaaattgcccatatgcatcatatgcccaccaccatgatccatattgccatgatccatgtgcatatccataccactgtgatccatcgccatatggcccatatcgtggtgactcatttgcatagatgccatatccgtttgctgatgcatatgttcgtgatccattgacatatccgtcattttcccggcatgcatctggtcgtgatcactcatttgcatctgtcctttgtcattagctgattctttcattttttgtgaagggttcatattatctttcttcatcaattgcctccttgcagccgtctggtaagcagttacaatgaaccgttgtcggtgcaccaggcaatttagccgccaaagtttgctgcactgcttgaatatctttcttggaaagcgtcacttgcgctaccaaatgattcacggtcgtaccgatcttcatttgacaaagatgactaaataactccgcaacggctgcatccattgaggcttgctcaccaactgttgcatgatataaaaattcgcgcccttgcttttcggtgaccagcgcaccctttttgacgagtcttcccaaaaaggtcttggtggtcgctatcttccacgccattttatcagcaagaatcactgcaatggtgctgctttttaatggtccaagcgtccaaataattcgcataacttcccattccgactgggagatttcaactttcggtgtttccatccttggcctccgtttacacttgtaatctttcgacacttataatttacaactgtaaacgatgattgtcaactcataattaaactatttctgaaaataggccgcttaagtgccaaatctgggcctagctgttttctgcaaataaacaagcaccgaagacggtggcattggtcttcggtgcttgtttatttgctttttacataaaactagcggcagttatcacttcaaggcatgaaagccgatgtcggtccgataatccagcaccccttgaatactttccaagtcatgcttggctttggcaactgcctcaggtaaggtagcggccccggcaacaaccgaaaaaattctcccggcgtcactgatccaaccattgtcggttcgctctacccctgctggcaaccaagtaccgattggccaatttgttggcacaatgacgggaacggttttcaggtttgcccgcgggtaatcgggattcaccgcgacaaagcaggcataggctaggccattcaatttcagcgttggctgctggccatccaacaagtcgctcacaagctgataaaagtcattttcgatctgtggcaataatacctgagtttcagggtcaccgaaacgcatgttgtattcaagaatcttgggtccttctttagtgaagatcagcccaatatacataaccccgtgtccatttaaaccatcttggtgcatacctgccaatgtggcatccaccaaggactgagccgcctggacttgatcgggcttaaattgtggcaacggactaatcgcacccattccacctgtgttaggtccacgatcagcagcgtggcgccgtttgtgatcctgagacaacggcaagatcacgcgcttttggtcattaaaaagtgccatgacggaagcttcttcgccagcgagatattcctcaagcaaaaccgtggcatccgggtggccggcgtaaaactgttcgatcgtatcatcaagtgtcgctgcatcattggcaatgacaacacctttaccagcggccaagccatcttttttcagaacaagcggtaaacccatcaaagttgcttcggcatgtgcttcaatcgcattgtgaaccgtcttgctggccgcggtcggtaaatgatggcgatgcataaacgctttggcgaacgttttacttgattcaagttgagctaatttttgcgtgacgccaaagatcggcaacccgattgcttgaaaatcatcaacaatccctgctgccaagggcacttcaggaccgacaaacgtcaaatcaatctgatgcgtttgcgcgaacttgattaaagccgggacctctttttctttaataccaatcggctcgacaccaagcagctccatcgccggattgcccggcgccacgtagacatgatccacttgtggcgactgactaaatttcaaagcaagggcactttcacgcgcacccccaccgataaccaggacttttttcataaaaacctcctaaaaagtgagcgcgagccagcccggtttctgggctggggagcgcgttatagaaagtgagcgtgaaccggctcccgcttaatgccggaaatgccgaacccctgttgtcaccatcgcaatgccatattcattggccttcgcaattgaatccttatcccgaatgctgccacccggttgaataatcgccttaatatcatgtttagccgcgtaatccacgcaatcatccatcgggaaaaaggcatcgctggccatgaccgcaccggcaaagttgtcgttttgctgcgcttgggttaacgccaattcaaccgagccaatccgattcatttgaccggcgccaatccctaacgtctgatcagcctgtgccacgacaatcgcattactcttaacatgtttgaccaccgtctgcgcaaatgccaatgccttgagttgagcttcagtcggcttgacctccgttaccactgtcatatcggctggtgtctcagctttgtcgtcacgtgtttgaatcaacaacccaccataaattgaagtcgtttctgttcccaattcttctggcgtatcagcagtattaatcgtcaataagcgcacatttttcttcttcgccagaatctcataggcatcatcatcaaatgccggtgccatgatgatctcaaggaaaagtttatgcattttctcggcagtggcaagatcaacccgccgattcaaagcaatgatgccgccaaaaatggacatcggatcggcggcatatgccttgtcccaagcggcttcaagcgtatcgcccaagccaatgccgcatgggttcatatgtttaacggccacggctgccggttgtttgaattcccgcaacattgccaatgctgcatccgcatccttgatattgttataagaaagctctttaccgtgtaattgcttagcagcggcaagactagttggatcaggattcggctcaacataaaaggcagcttgttgatggctgttttccccgtaacgcaagtcctgccgtttgtgataagttggcgtgaattgctctgggaatggctctggatctaagtaatgggcgatttgagcatcgtaagctgcagtgacggagaagactttggctgccaaccgttgccgcaaatcagcatcattttgatcgagtccggctaaaacatccgcataatctgctggatcaaccacggcccagacactgtcactatttttagctgccgcacgtaacgcagacgggccaccaatatcaatttgttcaatcgcttcggcacgcgtcacacccgcacgctgaatggtcgcggcaaacggataaagattgacacaaaccacatcaattggctgaatatcatgatctgctagtgcctgcatatgggcaggatcatcccgccgcgccaagatgccggcatggatcttaggatgcagtgtcttaactcgaccatcgagcatttctggaaaaccggttactgcttctacgccggtcaccgcaaccccagcttcagccagtgcgcgatgggtaccaccggttgaaatcagttcaaaaccgcgttcaaccagaccttttgcaaaaggtaccaaaccagttttatcagagacacttaataatgcacgcttcacttaaatcgctccttcttcaatgagttgcttgacagttgcgggaaaagtttgatgttcctgatggtgaatggctgcttctaattgtgccagcgtcatccccgggcttacgcggaccggatcctgtgcgatgatttcgccggtgtcgattccggcatctacgtaatgaaccgtcacgccggtcactttgacgccataatcaaacgcatctttaatgccctgccgtccgggaaaactaggcagcagcgcgggatgcaaattgataattcgcttgggaaaagcatttagcaaggttggcccgatgatccgcatataacccgctaaaatcaatgcatctacaggcggcaactggcttaaaatataagtttcggccgccgctttattcgcatagtccttaaagttcacaactaaagtcggaatatgacgagcagccgctttttgaatcaccggtgcttgcatttgatcacagactaagaccgcaatttgatagtgactgtctacagcctgcgcggcgtttgccaaggcttcaaaatttgtgccatttccggacgcaaagacagctagacttttcatttgcttgccacctgccattgtattttggcgcttggatcagcaaccacgtgaccgatgactttgctgcttggtaacgccgcctgaatcgtggtggctgcatgttccgggacgaccaaaatcatcccgatgcccaaattaaacgttgtccgcatcgtggtttcactcaaatgcccggcatgttgcaggcgatcaaataactccggtcgatgccatgcctggggattaacctgcgcacacaatcctgccggtatcacccgcggtagattctcggtaataccgccgccggtaatatgcgctgcggcgtggatcaaaccttgttgcatgagcggcagcacctgcttaacgtaaattctggttggccgcatcaacgcctgcatgacttccgatccgtcttcaagcgtctgactccctaaatcagtttcagctaacaatttacgcaccagcgagtaaccattgctgtgtacgcctgaacttggcaagccaatcaagacatcaccagcagccacatccttaggcaaacgattctgttcggaaaccaaaccaaccgcaaacccggccagatcataatgattttgtgggtacatatccggcatctcagcggtttccccaccgatcaacgccatttccgcctgctgacagccataagcaatcccgcgaacaaccgcttcggcccgggttacatcaagatgatcaacggccatgtaatcaaggaaaaataatggctgggcaccggatgcgagcaaatcattggccaccattgcgaccaaatcaatccccaccgtttcatgcgcatcacattgcaatgccaacaacagtttggtaccaaccccgtctgtcgcactaatcaaggttggctgcggcacggatggcaaccgataagcggcagcaaaaccgccaacactggccaaaacattgtcattggctgtttctttggctaacgttgcaatacgttttacggctgcatcgccggcttcaatgtcgacgccggcatccttataatctgtcatgcgctaacctccgctacattaactttgagtgatgcgacttccttatttaacgccggtgcataatcatcaagagcagttggatatttgcctgtaaagtaggcgacacataaaccgccattaggagccgtcgttggcaatccgacgctttcttccaagccttgtgtcgaaagaaagcctagcgattcgacatccagtaaatcgcgcatttccggtacgctatgattagccgcaaataattcactagttgtctgaaaatcaatcccataaaagcaaggaaagcgcagtggcgggctggcaattcgcaaatgcacttcagcggcgccggcttctttcaacaatttaacgatttgcttagaagtcgtgccgcgaacaatcgagtcatcaactaacacaatgcgttttccggcaacaaccggtttgatcacgctgagtttcattttgacgcttttttcgcgtaacgcctgcgtgggttggataaatgtccgagcaacgtactgactcttcaccaagcccatttcataaggaattccgctggctttggcataaccaatcgctgctgacagggatgagttgggcaccccaacgacaatatccgcatctgccggctgttcccttgccaaccgctcacccatccgcacccgcgcctggtgaacattgatgccgtggatgtctgaatccggacgggcaaaatagatatactccatcgagcaaaccgctaacgatgtgttggtggtgaagtgatccaaatgcaagccatcgtcatcgatcgtaatcagctcaccgggttggatgtcacggacaaaatcagcccctactgcatccaacgccgcggtttcgctacaaacaatatagccgccatctggcatgaccccaaccaccattggccggaaaccatgcggatcaaccgctgcgtataagccatgctcggttaacaagacaaaggcgaacccgccgtgaacttcattcagtgcctttttaagttgaaccagccacggttggccaacctgacgccgaatcaaatgcattaaaacctcagtgtccgaggtggattggaaaatggccccttgactttctaactcacgccgcaaactgatggcgttggttaaattgccgttatgcgccaatgcaatggcttcatcagaaaaccgaaaaagcaatggctgtatattttccaagacgcggccgcctgctgtcgagtagcgcacgtgacccaaagctgcccgccccatcaacggtgtcaattgatcggtattggtgaacacttcactgagcaagcccagaccataatggcgccgcataccatctttagttaagccgacaattccggccccttcttgcccgcgatgttgcagcgtatgcaagcccagatgggtaatgctcgcagcattgggattgccccaaataccaaaaacaccgcattcttcatttaagccttttggttcagatagcatgggagtgcctcctcaaatgcagtttgcaattcttcaagcggaaccgaaaattgatgactaaccgtggtgacgtcaaattgcggggctgcttgtacccgcccgattaactcagccggtccatttagcgcctcaaacgctgcttgatcttcaggagcaacggtgactaagaaccgcccttgagtctcggaaaagccccaactcgtcggcaaatcgaccttaacttgcgcgcccagctggttcgtaaagcccatttcagccaacgccactaacaagccaccatcgcttaaatcgtgggctgctgtcacaaggtgttgccgaatcgccgttaatacaaattgctgattggccttttccgcatcgagatcaaagtcgaacaaccgcccggcaacttcaccggtttgcaatttctgtaattcgctgccattgaaatcgccgtgggtttcgccgacaagataaagcaaatcatctgcatgtttgaaattcgccgtggtaatggtgctgagatcttcaatcagccccaccatcccaatcatcggcgttggatagattgctttgccattagtctcgttataaagcgaaacatttccggaaatcaccggtgcgttaaaggctttagtcgcagcaatgatacctttagctgcttcggcaagttcataaaacgcttccggcttggtcggatccccaaaattcaggcagtcggtaatccctaaaggttccgcaccgctggccgccagattgcgcgccgcttcggcaacactcatggccgcaccgacttttggatccaaatacagataacggcctttgctatcggtggtcatggcaagagcgcgatgggtcccgcgaatgcgaatcaccgcggcatcgctaccaggcaagacaaccgtattcgtttggacttgtgcatcataacgccgatacaatgaagacttatccgcaatcgtcggcgtgcccatcatggctttccaagtcgccaccggatcagtcacaatcgggtcaaaatcaggtgccggttcagctaagcgcgctggcattttgccgacttgctcataaatcggtgcatcatcagtcaatgaactgactggaacatcgcaaaccaatttgccgtgatgataaagtcgatattgatggccttcaatcacatgtcccacaactgcagcgtccaaatcatacgctgcaaacacatcaaggacttcctgttcaaaaccggcccgcacacacaacaacatccgttcctgcgattctgataacatgatttcaaatggcgtcatattggcttcacgctgtggaattaagtcaagatccatttccatgccgctattcgccttgccagccatttcaacactggaagacactaaaccagccgcgcccatgtcctgaataccgactagtgcctgttgatgatcctgcgtaatttccaggcacgcatccatcaacagtttctccatgaatgggtcgcctacctgaaccgccgaacgatcagccgcctcttcatcggaaaaatcaccagaagcgaaactagcgccgttaatcccatcacgcccggttttggcaccgacataaatcagtgcattaccgactcctgccgctttgcctttttggatctgatccttatccataatgccgacacacatcgcattgaccagtggattgcgggaataagtgtgatcaaaattggtttctccgccgaccgtgggaatgccgattgcgttcccatagccaccgataccggccacgatgcgatcaactaaatgctgcgtgtgcgggaggttgagatcaccaaaggccaatgaatccagcatggcaacaggcttagccccaatcgagaaaatgtcgcggataatgccgccaacacccgtcgctgcgccttcataaggttcaaccgcggacggatggttatgactttcggctttgaataccactgccttgccttcgccgatatcaattacaccggcaccttcgccaggtcccatcaaaacgcggtcatttttggtccagaactggcgcaaaatcggcttactgtatttatacgcacagtgttcactccacatgccgcttgctaatccgatttcggtatcatttggctgatgaccaatcaactcagcaaaccggtgatactcatcttccgtcaatcccaaagccaaatacggtttcttttcagcgatggcttctggactcatctcaacgtgcgtcacggacatggacccctttcgtttgttgcatcaatgacttgaaaacgcctaggccatccgtaccgccaagtaatgcttcaacggcgcgttccggatgcggcatcatgcctaaaacattaccggcttcgttcgtcaccccggcaatatcatgaagactgccattgggattgtcagcataccggaaaacgacctgaccattggcttccaaagctgccagcgtcttgggatcggcgtaataatttccttcaccatgtgcaatcggcaatgtcagttgttcaccaacctgatattgattggaaaatgctgtatccgcgcgatcgacaagcaacgtcaccggttcgcaaatgaaattcaaatcccgattccattgcaaagcgcccggcagcagacccgcttcggtcagaatctgaaagccattacaaatgcccaacacatagccgcctgcttcggcaaaagctttcaacgccgtcatcactggcgaaaaccgggcaatcgcaccgctacgtaaatagtcaccgtaagaaaaaccacctggcaccatcaccacatcataacgacttaaatcggtttgactcggcttgatcagctcgcactcagcaccggcaatggtctgaacggcccactgtaaatccaagtcacaattagatccgggaaaagaaataacggccgctttcatgcctcatcctccgtaatgggttctaattcaaagcgataagtttccatgttgacattggcaagcaactgatcgcaaatcgtatcgacttgcttttctaccgcttctttggtgccggtcagctttaattcaaaatatttgccgtacaacacatcgtctacattgtgataatccatgcgggtcaaagcagtcttgataacttctgcctttgggtctaatacagagggtttgtacgtcacataaactttagctttaaacatgagccgctcctttttcttgtaacctggcaagcacttcttcataaacaggggttaagggaccgcgcgcttggcggaaaacatctttatcaagcgaatcaccggtcttttgatcaaccagacggaagttatccggtgacaattcatcggctaagaccaaagtgccatccgttaacgtgccatattcaagtttaaaatcaaccaacgtgatcccgacttcatcaaaacgcttggtcagataagcattcacgcgatcagtcaaagcccgaacttgtttgagctgttccggggtcgcttcgtgtaaagcaaaaatctgggcttcgttcatgaacggatcgcctaattcatccgacttgtaataatattcatgaattggcggatcaagcttcatcattggcttgacattgaacttggtcacaaaatgtccggacgcgtaattgcgcaccacaacttctaacggcagcatggtcgcctttttaacaatcatggtagtggcatcgggagaatcaatataatgcgtaggaattccggctgccgtcaattctttaaacaacaaggtcgagatggcgcgattcaattcacctttgtgggcaatctgcgcctttttctcgccgtttaatgctgtggcctgattcgtatacgtcatccataaaacatccggatcatctgttgcaaaaacctgcttggccttgccggtatatagtaatgtggtctttttcaccatgctgcctccatttgtttaagtatgtccataacatcgcgcgcatcggtcaccgtgatgtggcccattttacggccaggacggatctcggcttttccataatcatgcatgtgccattctggatgttgcggccattttgccttggcttgggtgagatcatcgccaagcaggtttcgcatcaccgctggctgctttaaggtaatcggcggaatcggtagtccgcagatacttaaaatgtgagcgtcaaactgggaaaagttgcaagcttcaatcgaatagtggccggagttatgtgggcgtggtgccaattcatttgcaacgacattgtcaccttcgagaaagagttcgaccccaagaactccgcgtaagtcgagtccaagtgcgattttagtcgccagatcatcaatcttttcagccaaaaccggtgagatatgaggtgccggtgctagtgtgagatgcaagatgtggttcttgtggcgattttcaacaatcgggaatacccgtacttgatcgcggccatcgcgggtaatcatcaccgaagcttcacggtcaaactgttggcgtttttccaaaatgcagggaccgtgggctagcaactgctcggctgcgggtacatcagccatggtgttgatgtcttgctgaccatgaccatcataaccgccagtcgtggtttttaagatgcttggcaagccgattttctcaatggccgctgtcaacgcctcaggccgatcgactgccacaaagggggtgaccggtacaccatgcgtctgcaggaatgttttttccttgatgcgatcgcgggttgttgcaagaatagctgttccttgagggattcgggttaaatcacgtactgcttccaaagctgctaaatcaacattttcaaactcataggttaaaacgtccgattctttagccaactttgtcagtgccgcttgatcgtcgtatggtgccgtgatttgaaagtctgctacctgaccggctggtgaattcggcgtcggttccaaaatgccaactcgatagcccattgtcttggcactttgggttaacatacgtccaagctgaccgccaccgataatcccaatcgtggcaggtgaggtaaccacatcaatcattaagtgtggcctcactttcttcagcccgttgcgtttgtgcctgacggaaggccgccagccgctgacttaattcaggactttgcaaagcgaggattgatgccgcgtacaaagcagcgttcacagcgccggcatcacctattgccatcgttccaactggcacacctcctggcatttgcacaatcgacaacaagctgtcaacgccatttaatgttcgtgttttgattggaacaccaatgaccggtagcagcgtgttagccgctaacattcccggtaaatgggcagcaccacctgcacccgcaataatcacgccaaaaccttgatcagcagcatgtttgccaaatgccgccagctggtccggcatccgatgagctgatatcacgtgcttttcataaggaatatcaagcgcctctaactgtgtggcaacttgtcgcatggtcggccaatctgaacttgatcccatgaccacggctactttttgcatctcgtcccctgctttctttaagatgttttgagaatagcacgttaagcaacaacattcaacactaaaatagaactataacgcatattattcgttttaatgttcgtgttttgctcaaacctggtcgagaactccagctttttaaagcaaaaaaatagccttagagacaatctcatctctaaagctaacttattttgagagcacacttatcccccgacagcgccttaacaaactaattgttttaggctgctttagtggaaagtgatttaccatcctttgctataaacagttgtggtgccaccgtgagtaaaataccaacaaccacgattgccaaaacggtgctgaacaaagccgatccaccgttgacgatcagtgaataaatccacacattcatgccttttggtgcgtaactgccccaaaaaacaactccagcgatgaaatgaatgaagtacttagcaaaggttccgacaataatgccagcaaaagcatagccgctagcttttactttctcaccgccgcggacagccttttgaaatgatgcaaaagtcaagcccatcaagccaaccagcgtaaaggcaattggatattccaaaaagccttgaaccggattcaaaacactgccaccactaaggccgcggaggatcaaatcaagaatcccccatacaaacccggcccacgctgcaggaattgccccgcgccgcatcgccaaaaccgcgatcggaatcaacccatagttcaattcaatcgccgaaacaccggttgtatgcggaatataagtcaacgccattgcaaacgccgcaataatcgctgtttccaaaatcacaaccagacgcttatgttgttgcataaaaaaagcctcccagtgaatccccactcacaaagaaggtcgtttccgacattcacaaatccctacgctcgcactaacgaacaggttcgaagggtccgggtctccccgctctcagccaatggctcccctttgtgaaggttcatctaattaattgatacattgtcatcgtaccagactttataaaaagcgcaaacattttgtccagaacagagcgtgagccagcccggttagaaaccggagcataagtggccttgagcgtgatgaccgggttttggtcattgcgctcaaggtccttatgtgcaggtttctgggctggcgaacgcgtttatgagcgtatactggagcgcttagaaaccggagcataagcggcctcagacgtgatggccgggctttggccattgcggctgaggtccttacacgcagacttctgcgccggcgaacgcgtttatgagcgtttactggagcgcttagaaaccggagcataagcagctttgagcgtgatggcctcctcttaaccattgcagtgtgatccatacatccagctttctgcgccatgaagcacgttatggtaaacgcattttccaaattcacaaagcaaccggtctcaccatcaaaacacaccgcacacctcaccaaaaattttcagctcaacttcaaagctaccgactcagacgaattttttcatcccgatgaagtgtctccaaagattttcctgctgtctccggcacacacaaaatgacaaacagcaaagaaacgagattggtgccaatgaaacaaacaaaagtccaaaacataccaatgcctgccaagccgatcgggaaaagaacgccgaccgcaaaattagcgagccacaggaaaaatgtcgccgttcccattcccaaaccgcgtaattgctcgggaaaaatttcggatagaagcaaccacgtcatcgggctaatagcgccttggaagaacgctagaaaaatcatcatcatggtgatggttgtaaatgcgcgccatgaagagcctgcaggtaagcggctcgcgaaggtcacgccagtaattgcaatactagtcccgattaagccgatgatcagcaatggacgccgcggaacatgctttagcaactgtaaggtgacaagggttgctgcaactgcagttaccccattggcaatattggtgattaaggcactattacgaccaaatccggtcatttgcaaaatcgaggtaccgtaatacatcatgacattgatcccggcaatctgctgaatcacgcccaatcctattccgattagcactagccgccgaatccacttaaccttaagcgccgtgacccggactttcttgtgtttcgcgctggccgcaatggtttgctccaaatgatcaagttctcgcggaacctcttgcggtgcacgaagaaccgacaagctcgcctttgcagctgcctgtcgccctttcatgactaaccaccgtggcgactccgggacaaaataaatgccgattcccaagacaatagcaggaataaccgccaacacaagcatccagcgccaaatcccaggcatatcaccaaagtttgtccctaacacggcattaaggatgaacgcaagcaactgaccggtgacgaccatcaattcattttgggtcaccagccgcccgcgatggcttgttggcgcaatttcggctaagaaacttggcactaacacggaaacgccaccaaccgctaatcctagaatcaatcttgccccaatcagccaaatagcacttggcgccattgacgaagcaagcgttgccagaaaaaataatccggctaatccagcaattaaccgtttgcgtccataacgatcactaatacgccccactaaaacagcaccaaatgctgccccaagtgtcaaactgctggtcacccagccttgctgacccggagccaagtgaagttcactggaaataaatggcaaggcaccattgatgacgccggtgtcatagccaaaaagaaggccacccattgttgaaatcagggcaactaaccttaaacgaacacgtgcgctcatcaacgaatggtgtcgttgacgcaagcctgtctttgtttgattctgcaaatacatgcaattccccctcatcgactaggtgaaccgccatacctactagcaaagatccgcatcgcagctcgaccatttagtttacataataaccatagcacttttctgaaaaatctgcagagcgtgagccagcccggttagaaaccggagcataagtggccttgagcgtgatggccgggctttggccattgcgctcaaggtccttatgtgcaggtttctgggctggcgaacgcgtttcaacaagagcgtgagccggcgcgcttagaagtcggagtgtaagtggcctcagacgtgatggccgggccttggccattgcgactgaggtccttacacgcagacttctgcgccggcgaacgcgtttcagagcgtgagccagcccggttagaaaccggagcataagtggccttgagcgtgaggaccgaactttgatcattgcgctcagggtccttatgtgcaggtttctgggctggcgaacgcgtttcagaacgccacaatccagacttgtgccccatcttccgtcaagagatcacaaccaatttttcaattccaaacaaaaaagcgtcaaccctagaaaggattgacagcttctttaaatcaatacattttattgtccggtagtcttcttaaccagatcagcgttttcgtcgtttgaaatattttcattcaacgcaacgtcagccatcttggccatgtcctcggtggaaagccgcttcatcaagctgcgaaccttaagaacagaagttgcagacatggaatattcatcaagtcccataccaagcaataatggaaccatgattggatcgccagctgcttcaccacacataccagcccatttgccttccttatgcgctgagtcaataacatgcttaaccagtcgcaagatggatgggttatatggttgatacaagtatgaaacatgttcgttcccacgatcagcagccatcgaatattgaatcaaatcgttggtaccgattgagaagaagtcaacatacttggcgaactgatcagccaaaacagctgcagcaggaatttcgatcatgatgccaagttggatgttgtcggaaaccttcacgccatccttgaccagcttttctttttcttcagtaaagatctgcttagcctgtttgaactcggcaatcgtcgcaatcatcgggaacataatccgtaagttaccaaaagcagacgcacgcaacaacgcacgcagctgagtccggaaaatatcctgacgatcaagactgatccggatcgcacgataacccaagaatgggttctgttcttgcggtaatggcagatatggcaagtgcttatccccgccaatatccatggtgcgaacaacaaccggctttggattcatcgtttcaagaaccttcttgtaggcctcaaactgatcgtcttcagtcggtagttcagcagaatccatgtataagaactcagtccgatacaaaccaataccttcagcgccattcgccaagaccccatcaagatcttttggtgtcccgatattagcagcaacatcaaagtgcttaccatcagcggtaaccgatttggctgtcttcaactgcgcccattcagctttttgcttggcaaatgcttcagcagcctgcttgaatttggcaacttcatcagcagtcggatcaatgacaacttcgccagtcaaaccatcgacggagatcgtttccccgttggtcgctttcttagtgacatcgtccgtaccgacaacggctggaatttccagcgaccgtgccataatcgcactgtgcgctgtccgtccgccgatgtcagtgacaaaggccttaacatatttcttgttcaattgggcagtatcagaaggcgtcaaatcgtgagccacgataatgacttcttcgtcaattaatgccggattcggcagtgtacgtcctaacaaatgtgccatgatccgtttggtaacatcgcgaacatcggcagcacgttcctgcatatatggattatccgtcatgccttcaaaagtctgaatgaagaattcagaaatttctttcaatgcctgttcagcattgactttttcatctttgatcttggactcgatctgacccgtaaagtcaggatcagccaaaatcatcatatgggcatcaaaaacttgtgcctcttcttcgccaagcgattcagcggcctttgctcgaataacctttaactcatcattactttgatcaagtgcctgctttagccggtcgatctcctttgaaggatcatcaaccgtctttttgtcaaatgataaatcaggttgaaccagtaaataggccttcgctgtggcgatcccatcactagcagcgattcccttcaaatgttcagccattattcagccaagccttcctttttcattgtgtccgtaattgcagcgattgcatcggcttcgtcagcgccttcagcagagattgtaacatcggcaccttgaccaacgcccaaactcataacacccatgatggacttcaagttaacgctcttacctttatattccaagttgatatctgagttgaacttgctagctgcttgtaccaacaaggttgccggacgtgcgtgaatcccggtttctgcaataatgttaaattcgcgtttttccatgactgatctgctccttcgtattaactagatttttctagtgtttttccgaatagtttgtgtgcgtactcgtacccaaaacaattcatgtaaaccttaccatttttttcagcctatcacaagcgccacatgagatttggcacttacttagcgggaatcgaccgaccggtaatggtactcgatgacaccatcgcgtttggccatccccacaatctcttcacgatcgggatagtttgtccatgccgaccgaaacgccataaacgtttccggcgtcaccgtgatcttgtcacgctgaccagtctttaactcatccattaaagcgacataatcctgagtcatctatttgcctcacctcacttcataagggtagcataaaagtaggcattgaaaaagcgctaaggcctgatatcactgaaatttttgcatctttttagcactcttgcggttagagtgcttgcattctggtaatgagggtgtatactattgccataggtcaagaaaggtcaaacctttttgaccgttatgtggcacctaattagacaggaaggttgtgacaaaatgttatgtgaaaactgtcataagaatccagccactattcatctttcaaccgttgttaatggtactcggcaagaaatcaatctttgccagaactgttatcaattactcaagaaacaagcaggaggaaatatgaatccaaccaacgcatccgatccatttgggtttggaagcttagatgatattttccgtgcgatgaatcagggaatggatcaaccgcaacagccaaacgcacaggttccgcctacccaggcaggacgcggcggcaacggcaacaatggccgcaatggcaacggcggtaaaggcttgttaggtcagtttggtgttgatctcactgaacaggcacgcaaaggtcaaattgatccagtcatcggtcgtgataaggaaatttcacgcgtgattgaaattctgaatcgccggaccaagaataatccagttttaatcggtgaagccggggtcggcaaaaccgcggttgttgagggactggccttaaagattgctaatggtgacgttccagccaagttgcaggatcgccatgtaattcgccttgatgtcgtttcactcgttcaaggcacaggcattcgcggtcaattcgagcagcgcatgcaacaactgattgacgaactgaagcaaaataagaatattatcctatttattgatgaaatccacgaaattgtgggtgccggtaatgctgaaggcgggatggacgccggcaacgtcttgaaacccgcattggctcgtggcgaattacaactagtcggggcaacgaccagcaacgaataccgtcagattgaaaaagattctgcccttgctcggcgccttcagccagtgatggttgaagagcctagcgttgatgaaaccattaaaattctgaagggtctgcaaccgcgctatcaagacttccaccatgtgaaatacacggaaggtgcgattgaagctgcggcaaccctcagcaatcgttacattcaggatcgcttcctccctgataaagccattgacttgttagacgaagccggttcacgcaagaacctgacaattgcaaccgtggatcctgagaccattaaagctaagattgctgatgccgaaaagcaaaagcaagccgcactcaagcaggaagactatgaaaaagccgccttctatcgtgatcaggtcaccaagttagaagacatggccaaaaagcaatccaacctgccagataatgaaatcccaacagttaccgaaaaagacatggaaaaaattgttgaagaaaagacaaacattccagtcggtgaactcaaagctcaggaacaggcgcaactgaagaatctcgccagtgaccttgagcaacacgtcattggtcaaaatgaagcagttgataaagttgctcgagcaattcggcgcaatcgcatcggcttcaataagaccgggcgaccaattggctcattcctctttgtcggaccaaccggtgtcggcaaaacggaactggcaaaacagctcgcgaaagaactattcggttctgaagatgccatgattcggtttgatatgtcggaatacatggagaagttcagcgtctctaagctcatcgggtcaccgccaggctatgtcggctatgaagaagccggccagctaactgaaaaagttcggcgcaatccatacagtttgattctgcttgatgaaatcgaaaaagcccacccggatgtcatgaacatgttcctgcagattctgaatgacggccgcctaaccgattcacaaggtcgaactgtttccttcaaagatactatcatcatcatgacttctaacgccggatcaactgatgcggaagctaacgtaggctttggtgcaacgttaagcggtaaaacccacagtgtgctggatcagctgggtaactacttcaaaccagaattcctgaatcgctttgatgacattgttgaattcaagccgctttctaaagacgacctattgaagattgtgtcactgatgattaatgacactaacaacaatctcaagagtcagggattaacgattcatgtcaccgatcccgtcaaggaaaagcttgtcactctgggttacaatccatccatgggggcacggccattgcgtcgggttatccaggaacagattgaagaccgtgtggctgacttttacctcgaccatcctaatgccaaggaacttgaagcaaggatcagcaacggagaaatcacagttggcgaaccagccaaggcagaagcctcttcaaaaacagccaagaaataatccgattgttgaagattgaaacgttctcagtgcgaccaattggttatcgtggtcgtaaatgaggctcgcactaaatcggttcaagcataaattgcttgaaccggtttttttattccgcagcttccaggatcaactatcaaaataaaaagttcacgctcttttcttgtcagtgcagcagcgatcagcgcttttgcttactgaatatacgcctagaaagctaaagttagtggacctcaacgagcgtagttgtatccattccgtccagtcatcacgatgtcaataatattattttttcttaaactgttttataataaaaccagtagggagagaaatggagggcatgaccatgcgattaattaacgtaaccaacagcttcagaaatttggtaaaccagcagctgagcggtaccgatgcccgactcgtcaaagtcttttcactcggtcaaaccacagttgtttatacagaggccccttcgcatattgagctattattcaccaatgaacgccgcaacatccagcgtgaagaaattgccttcacgttagatcgcttgctaaagaaatcaatcggtgatgtaacgccaattatgggacaccacctagcagaggtcacggttcccaagcttgagcgccaggcagaataagccgctgtcattatcagataactttttaggtgaggtcggctgttgatcctcataccgataagattttcacttactagtactccaagtcctgttggccggtcagtccggaagcacaggcatcaaaaaagcgaccgtaaatggccgcttttttgatgcctgcttttgattatagtttcgccgttaacttgacatccggatacttgtcagcaaaccagcgctctgcatattgattttcaaataagaatagcggatcgccgtgaacgtcttcaacaagcaggttacgggaactactcatcttttcgtccatttgctcagggtcaatccagcgagcaatgcgggagccaattggcgtcatgaccacttcagaatgatattcatgcagcatccgaaattggaaaacttcaaattgcaactggccgacagcccccaaaatgtattcattggtgtgataagtcttatacaattggacagcaccttcttgaaccagttgttgcatacctttgtggaacgacttttgtttcatcacattcttcggggttacacgcataaacagttccggcgtaaactgcggcaacttctcaaactgaatcggcgttttcccttggtaaatggtgtcgccaatttgaaaattaccggtatcatacaaaccaacaatgtcccctgctaccgctgtagaaaccgtttcgcggctgtcggccataaactcagtcgaattatttagccgcatagttttacctgtgcgatgcaagataacgtccatcccccggtcaaattcaccagagacaatccgcacgaatgcaatgcgatcgcgatgagccgggttcatgttcgcctgaatcttaaaaacaaatgccgagaattccggatcagtcggtttgatttcgccaccttgagcagttttctttggccctggctcaggcgcgtacttaacaaagctatttaaaaaggtttcgacaccgaaattggttaacgcggaaccaaagaagacaggtgtttgatcgccagccatgatcttcttgagattaaactgattgccggcatcgttgagcaactcaatatcatccagcgtctgcgtataaatcgaatcttgggtcaaaggctcgctggcatccagttcgcctctgtcgttaagcggcaaaaagcgatcggcaccttcctgtcggtacaattcaatccgattattgacgcgatcatataatccttttaaccctttacccataccgatcggccagttcatcgcatacccttcgattccgagcaagtcttctagctcggcaattaagtccaaaggttcgcggccatcacgatccagcttgttcatgaaggtaaaaattggaatgccgcgctgtttgacaaccttaaacagttttttcgtttgtgcttcaatccctttagcagaatcaatcaccatcactgccgcgtcaactgccatcagcgttcgatacgtatcttcagagaaatcctcatgccccggcgtatccaaaatattgatgcgcttaccttgataattaaactgcatgacggaactggtgacggaaatcccacgtttcttttcaatttccatccagtcagatttggcaaaatgaccggatttccgtcctttaacggtaccggcttggcggatgacaccgccaaataacaacagctgttccgtaatggtggttttcccggcatccggatgtgagataatcgcaaacgttcgccgttttgctacttcttgtgctcgttcttgtggtttcataatctgtttccttccaaaaataacactacgactgccaacatacttttaactctcagtgctggcatcgctaactatccgcctccttggaaacaacttctaaaggcggcgtctcacttaaatgaatatgcacattgaccagccgagaaccttcgactttaccagtggcaagccgcacccccggagccagttcgagcttttcactatgatgggtcgaaggaatggccccaagttgagtgagcacataaccggcaatcgtgtcaacatccggtgcatctaagttagttttaaacagctcattaaattccgaaatcggcatccgtcccgaaacaatgaagtcgtggtcggtttgtttcgtgtatagcttttcagcctggtcggattcatcatcaatatcgccgacaatttcttccaacaagtcttcaatcgtgacaatgccaacgaccccgccatactcatccaaaagaatggccatctgttgttgcttggtttgcatttcagtcaacaacacgtcaacggggatcgtctccgggacaaacaccggctcaatcatcaccgattcgatcttaacctggtcaaagccaacacgccgggcttccttaagcagatttttaatatgaacgatcccaataacgtgatctttgtcttcttcataaactggaattcgcgaataaatgttattcaaaattgcatcaatagcgctttgatccggttccttggcatcaatcataaacgcatccgtacgcggcaccatgacttcacgcgccatcgtatcagacaacgagatgataccttcaaacatttggtactcgtccggttcaattgcgccggcattgcgaccattttcaatcatggcaaccatttcttctcgggtaacggactcgccttcatgactaaactccatgggggtcagcttcatcagcaatttagtcgaggcggataatagccagacaaacgggcgcattaacgttgccagccaactaatcggggtgacgctgatcttggcaacccgttccgtcatctgaagcgccacctgcttaggataaagttccccgaaaacaagcgagaaatacgacaaaatcaacgtcactaaaatcactgccgcttcgtgtgcaaacgaccaggacccaaaaatcggagcgaccttatcggctaatgtcgtcgccgctgaagccgaggcaaagaaaccggcaaaggtgattccgacttgaatggtagccagaaaatgacttgaatccttcatgatggcaactagcttggcggctttgcgatcacctttatcagcctgtgcctgcattcgagcacgtgaacttgagacaaccgcaatttctgcggctgcaaatcctgcattgattaatgttaacagcacaatgaggattaactgtccccatatctggccgtccgggtcactgcccatttcgaatccacaacctttcgtaaaaaaaacggggactcatccccgtagttcgatcactttagtatagcaagaccttatttctttttcaattctgaatcaggcttgtcagcgtgcgtcggggcttcaagtgacaattcatggtcctcatcaaaatcctcgtcattcttatgctcctggtgaaaacgatacagctcatataaataagtaatgaccgtcttaatgacagcgtaagtcggcacggcaagaatggtgcccagcaagccccacagattccccgctaccatcagtaaaataatgatggtcaacggatgaatatcaagcgagcggccaatgacattaggataaataaaattgccatccgtcatctgaataatgacgacaaccaagaccacgagcaacattttagtccatccttcagtagcagcaataatcaaagccggcgcaatcccgatgtaggggcctaaataaggaataatggtaacaacaccggcaataaaaccaagcagatacgcatacggcatgccgataatcaagtagccgataaaggtgaacgtaccaacgaacaaacattcaatcgcctgcccgccaatgtaatgcgataaggtcgcgttaagtcgggtaaagacagtagccacttcagcatgataacgccgcggcagcaagcgctgaatacttggaacgaaattttcgccatctttgagaaaataaaagagcatcaccggaatcgtaataatactgataacggtacttgccaacgagccaatcaccccaggcaggccacttgaaaaaccgccaagtacctgactcagcagtttacttggggaaatctgcaaactcgcaacatatttaccgatgtttaaccgctgataccaagtataatgcgatgctttgctgataaatgtgcggacaccttttaagaagtcggggatattcgtcacgaattgggttatctgatagatcaggttcggtaacaccgccatgacaatcaaaacaatcgcaccaatgacaactaagaaaatcagtaaaatcgaaacattgcggctgatatgcaatcgctgtaataacttcacaatcgggttaaacaggtaaaacaagaatcccgccgaaatgatcgggatcagtaacgttgaaaagaaagtcgcgaccggtgcaaataaaaaagaaacctgcgttaagccgatcacgacaaaaattaagactaacaattcgactgaccagaacattaattttgaatggcgtaacttatcgaacataatcgacctccccaacgtcttctcactagtgttataatagcaaacaatttatcaaaacggaaagaaggctgacgtattggaagtaaaatcaacaacagacttagactctcaggttcatcacgacagcgtacagataagaacccatgtatttgtggaagaacaacacgttccggcaaatctggaagtggacgcggatgaaggcaaagccacttattttgtcgtctacgatgctggcttaccggtcgcaacagcacggattttaccagaaggaaccggttatcacgtccagcgtgttgccgtcgaaaaggcctaccgcaaacacgggcttggaaaaatggttttaaatgcaattattgcctatgcccgcgagcaaaacgttgcgttcctgaagctcggagcacaactgcaggcaatcggtttttataaaacattgggctttcagctaaccgaccagcctgaatttctagacgccggaatccgtcatcgcgaaatgcaattacagcttacgtaaccttgtgtatgatttgattaaaccatccgaatgtgaaaaaaatacgcttctaatttgattttcttagaagcacaccctgacaagccgcttagttcgtgcttgtttttttattcatattcatcaaccccggttagctgatgcggattgatgtacaggcgataagccacctcggcaaccttaccaccgttcaagcgataactttccagatagtaaggatgatccgtttgcccaagccgctccggaagcgggtatcctgcttgttcaataacgtgtaacccttgattaaagctggtcgctaacggcaattctttcatgagcacgcgatcggcagactgcttcacctgcccggcagttgcggctggcagtttaaaacactcataattttggggcactttgacgtcaaccggtaacaaactgccaacccaataaataaaggtattgtacggcgaaaaaacaaccaaagctgttcgattaggtgttttagtcaactgatccagtgttttaaaaccaaactggtgttcaaaatccgcccacgccggtgcaaacgtccccagttggtcgctatcttcggttgtatatgcgtgccctgccaacaattgtgctggctgttgtggaatctctttcatgttgccctccaaaacctagtggactaaatccgatgtgcaagctgaatataccgccgataccataaatccacgtatgcctgcgaaaatggtcctttaccgtgattaatccaatcgacaagcactttgacgtttgcctttaagattcgatccgttgttgcaggataatgccacaatttccgatgcgcttcatactcatcgacatctaaaaggcgtttttcaccatcagcaaaaaccttcacatccagatcataatcaatatacttcaatgcttcctgatccatcgtaaacggggtggccagattacaatagtaagaaacgccgccttcacgaatcatggcaatgacattgaaccaataatgtttatgaaagaaaataatcgccggttctcgcgttaaccaccggcggccatctgattcggtcaccaatgtatgatcgttacagccgattaaggcatcttcactggttttaagaaccatcgtatcacgccaggtacgatgcaaactgccatcatgtttataactctgaatggcgaacgattcgccttctttagggattcgcatacttaacccgctttctaaaattccgtgtttcattataacaaacctcatgaaaatacgacagcgcgtaagtaagtcggacggcggtaagtgtcaacttttcctcggttctactctcattatgtgatttccgatactccgagctggctccgcggtggctgggctggaacgtggtgggcacgacttcgaacccgcaaagaccgcggtttcgaagctcggccttggtctaaagcggagaagcccactccgcttaagaccaatttcaccactgagcccgccaccgctccgccagctcttgctttctatcctaatattgaacaaggtgactcagaatcgtgtaaactgatgctcccttgtctgaggccacatgcgcaaaaaactttagactaacagcaaaacatgtctgaatggagggcggtgagtaccgtttggatcagaagctggcctcctccccaacagcagcctttcgcctcagccgttttacgattcatccaccagctcacttaatacatcatcaatcgcggccaaatcaaaccccttccggaacaacgccgtcttaaccttctgcttacgggtgcgctcatcatagcgttgctttaagcgccactgtttctccgcctctgtctttagcatggccaactcggcttccgggtctggctgcggatcgagttttgcgatggctgcctggatggtcacctcatcaaatcccttttgcatcaggttcacgcgcagccgctgcaattgatctttgtacgcgcggttttgatgatgccttaagttcttttgcccggcgcgaacggcaactgccgtccactcatctgattcgatgcctgccagctgatcggctaacagctccgtagcaatgcctttttggcgaagcttgtattgaacgacccgcggaccggtgtcacccattttgagatcggcctccagatagcgtttcacatagtcgacatcatccaaaaaacccagctccgtcaaacgggttaaaatttgtccgatcacatcttctggcagttgttctttctccaaccgttcccgaacttcttgacgggttcgactttgatgcgtgatataattcagcccaatctccaagcccattgcgacgacttcactgactttaatctgcgcgatcatatcttccgtgagcgtcatttccttggctaggtggtaagtcaccagcgttgtttcactgactggaaacgcatattggccgtccaaaaaaatattgtaccgaccacgccgtttttgtgccgttatcttggtgatttgtgccatgttactttgaccgcctctctaatcatactgtcagttatgttatacttttcataaatatatggaggttagttatgtttgaagccagtttctttgaccgtcatagtcttatcaactaccagctatttcgggcaatgaagaccttgccacaaacaaccttatcgatcaatgcactaagccgcgccactgggttatcgtattctcagacctacacggcattccagaccgttttggttcagttaaatcaaatgatccccgccgaaacaatcgacgaggctaattttgcgcaatttttaggcaatgtcacgattaatcaatatcggtttgcgttacttaaagaaagtctgccgtttgtcttctttgatgatgtgtttaaaaacccgcaccctgattttcacacatttaaagaggtacatcaaaccagcgtctccaccttaagacgacgcatcacgccatttcgtgattatctagctgataatggcgttaaccttaacagtacgacttgggcgatcgaaggcgatgaacttcatattcgtctggcaatgtttactttttttatgctcgcttatcgtggagctggttggcctttttcggctgaagaagaaaagcaagccaaaactttgctgaccgtcatcaatcaaactgatccggactttttactaatgcccgttgaaccaatgtcaaaagaagcgctggttgtgcttgccattcaacttatgcggattaaacaaggtcatcccttattacctaatcgccgaatgcaattgctattttccggacatgaggacctgcctgatctgatttttacatcagaacaatttccgaacttatctgactcgcagctgaaggccgaaaagcagttttattattttatgcggctttattttatgacggtcacccgccagccacagaaaatcgaccgccaattgctcactcattttggagaaaccgacaatctcgtcaatcggtttgtgaccggattggttgaccatttaaatgatcagcttaaaaaaaccgaccgccagcccatcgctgaaagccaagtgatgattgcaaatctgtatcggctcagctttaatgaatatgtccttaatggccgctttagtcagcgtcttgattttgcgcaatcgttgtatgacgaagccgatagcagcacgttggcaactgctattcagcgttatctaaagcaaattcccaagtcaatgccagagtcagtatttgcagatttccccgatcaatttattagcgggctctatttactggtcagcgataactatcctgaactcaaccatgatatgcaaatgattgtcaacgttttgattgaacatgactcatttgccaagcgcgacttattggactttttgaacgatttgggttttattcgggttgttccgccagttgaagcggtcaaacccgacttgatcattaccagtattaccaaaccaaaaagggtgatcccgcgtttgggccacccgtttgatcccacgacacccttgatcacctggatgccggaaccgactgatttggattattttcacctttatcagcgactcaaacaattacaacgccagcatcgatcaaccgctcgctcctaaattacctcaatgcaacggtttagccgtataccccacaaaataaaccagcgcttcataaccggctagtccaaggatgacagcggtaatcagtagcgtattgttcaaattactggtgcgcgtaaaccataaaaagacaaccatcagaaacatcaccacaaaataggcattttgcaaactgcggttaacctgaatttcaaacttggcgtccgggctttgataatcaatcgtgtgcaccgtattcaagcggcctactttatatgtgattttatcaccacgttgaactttcaaatccagtgtttcaccaacatgcatgatgtgcgcggtttcattttgccacacagtcgccgtcatttttttgctcatactattcgaataattaattttcacagtcaatcctcccgaatcttcattatactagaatcactcgggtatcgtcaccatttgtcagcgtaaaggagtatttcatggcaaccaaggttaaaatcggtcaacgttttcctttaacgatcaagcgtctggatattaatggcgccggaatcggatactatcaacgcaagatcaccttcgttaccggtgcacttcccggcgaagtggtcgtcgccgaagtcacagccattcacgatcgttatcttgaagcaaagacacacaaaattcgatcagcctcaccggatcgggtcaccccaacggaaccgctttttgggcaaatcggcggcgttgagttgaaccaccttgcctaccctgcgcagttgcgattcaaacgcgatgttgtcgcccaagctctggccaaattcaaaccgcttggctggcaacattatgatttaaaaccaactatcggaatgacgcacccaacgcactatcgcaacaaagcccagttcccggttcgcgaaattgatgggcatgttcgcgccggtttatacgcacctggatcccaccgtctcatccctttaacgcactttttaacccaggcaccgctgaccatgaaggtggtgaagactttatgtcaactactcgaagaccttcaaatacccatttataacgagaaaaagcacgccggcattgttaaaacgttagtcgttcgcgagtccttttcaactgggcaagttcaagtcacctttattaccaacagtgccaagttaccaaagcaagctcaattgatcaccgctattgccgcccaactgcccatggttgtcagcatcgcccaaaacatcaatcctagtagcacctcgctgatttggggaaaagaaagtcgtttgctggctggtcagccatatattcaggaaaccttgtccgggcgtactttccagctctcaccgcaagcctttttacaactaaaccctaaacagaccgaacagctttatgccattgccaaagacgccttgcaacttgcgccggatgacacgctgattgatgcttattgtggtattggtacggtggggatgagcctagctaaccgtcaccagtcgatttacggtatggatacgattcctgaagcaattgccgatgctaaagataatgccaaaaataacggctttaacaacactcattattttgtcggtaaagcagaaaccttattccctaagtggctcaaggaaggcattcatcccaatgctgtcattgtcgatccaccacgctccggactcgaacggccatttattgatgcgctattgcaacttaacccgcaaaagtttgcctacatctcgtgtaatccgtccacgttggcgcgggatttggtgccgctggccaagcattaccaagtcgactggattcaaagcatcgacatgtttccgcaaacagcgcggtgtgaagctgttgtcaaattcaccagacgttaatctgagtcacttgtcacctgactcgggattatatacccagttctggtttaacttgacgtttgtacgaatcatcgccattttccaatcatcctaagtgaggtccttttccaatgaaaatttattttgccaatgcgctgtttagccacgccgattttgactataatgccaaactagcggcccagatccgcaccgccattcccaaagtcgatttgtacgtccctcaagaaaatgcggccatcaacaataaagaagcgtacgcagactccaagatgattgctgaagctgacacacagcggttagaggcagctgatttaatgattgccattttggatggacccgtcatcgacaatggcgtcgcgactgaagttggtgtggcatatacacgacatattccgatcctggggctctatacagacagtcggcgtctgggcgctactaatcacaagaagctcgccgccttgcaagaagtggcagaaaaccaatttcattatctcaacttatacacgaccggcttgattaagctcaacggtgccattttcaccgatgaagcggccttgattgcagccatccaagcccgcgcatcggcataatcaaaaaagcttccgtccccttcactgactaggggtgcggaagctttttgaattaattcaattaaacatttgcagttgtcttttcagcatcctcgagtaactgtcggaaaggaatcaaggtttcggcatgatacttcttaacgaatgcgtcaacggcttctggatcctgcgtttgcttatccaaaaccagttgttcaaccggaattggccgtaaatcggaaatcttcacgtcaatgacaactgggcctttacgatccttggccttggcgaatgccgccttgagttcgtccaaattatgaacttcaaacccttgtgcgcccatcgcttcagctgccttgccataatcagcatcaataagatcaacccctgaatgcggctgacgggtatcgtcttgttccgcttcaataaagcctaaactttcattggtcaaaacaatgttgataatcggcatgtgatacttcacttgagtcataatatcctgcatgaccatcgcaaacccgccgtcacctgaaattgaccacacttgccgatccgggaattcagcttgggcgccaattgcagcaggtacagcatagcccatcgttgcgtaccagccggaagtcgtaaagatttgattatcgttggccttcaaataacgcatgccattaatcgttacgttaccgacgtccacctggaaaaccgcatctttgtcggccatctcgttgataagtttgaagatcggctcaacgcgcaatggggtctgcggatcgtcttcaaatgacgtcatccactcagcccagtttgccttgttagcaaccgcagcgcgataccaagcagtttccggtacggcatcagccttttcggtcaatgccttgatgaatttcttggcatcggctaaaaccgccagatcaactgtgtgccgccgcccaaacttgctagcatcaatatcgacttgaatatacttagcatttggcgcgataaagtaaggctggaatgggaagtcagagccaaggaacaaaaccgtatcggcgccgcgggctacttcaacccccggctttgatgcaacccgaccggcagatcccatgttggccttataatcatctggcacaatgccttttgccagtgcggttgtgatgatcgggatatgcgttttttcggaaaatgcaatgatttcatcgcgagctccacgcgcaccattaccaacgtataggatcggctttttggcatcctttaaaatgctccaagcggttgccacttgctccggatccggttcaggcaataacggcttttgataaagattagccgatgaaacataattatcatcgatttcctgccaaccgagatccttaggaatggtcacaacagcaacgccttgatacttataagcttggcggatggcttcatcgacaacgtgcggcaattgtgcagccgtcatggcagtccgattataaaccgatacatcggcgaacatcgggttttcattcatttcctgaaaatagttggtattcatggctgcagtcggcacctggcctaccaatgctaataccggtacatgatcgtattgcgcatcatataaaccgtttaacagatgaacggcaccaggacctgctgacccaaacgtggccccaatgcgtcccgttacctttgcttcgccagccgcagccaatgcgcccacttcttcatggcgaacctgcacgtaattaatggtgtggcggcgattgtaaagcgcgttcatggtgctatcaaacgatccgcccggcaatccataaatattatgaattccccagtcttctaacaccttgatcattgcgtctgcagcattgattttttctgtcatgacacttgcctccattattacttacattttgtaagttctttacgattatgagtataacaattaatcaataacaatgcaaaccctttcactcgattcgagatcaagtcacggctaaaagtaaggaaagcgttttagtcattgtcattatacccacgccaaggtaataacagtcaatcaaactgactgatacagagcctgttcgttccagatagtttgttagcagactgtattttgacttaaatatttccgtggccatttttatccatttcaaataacggcggattctaattgttatcactcgctttaacgcgttccgcgccggctcgcgcttcttcataacgcgctccccagcgcagggatctgcgtgtaaggaccccgaacgcaatggccaaagcccggccatcacgttcgaggccgcttacactccgatccctaaccgcgccggctcgcgctcacacaaaaaacgaatgaacgattccatttaatcggaaaagtccattcgctttctatgactcttttacatggcgccgaccgaaaataattatcaactaaaaaattggcgcttattaattctgaccagacaaaactaccttaacttttacacccggttcatcacgattggtgtttttcgtagtgccgctcctggccaatgacaccggtcaaaataaactgaccacgatagtatgccggatcagggcgatagtcatcggcatcatacgggactttatcgctaaagaccgcttcgtattccggtacaggcagttcttggcgtttagttagttgctgggcatgttcggcggcgtgtagttgttccttaaattgtggttgcaaaatgccgctgaagaactctgcgacggcaccggaaccatacgaaaacagtccgatccgatccccggcttgtagcgtcgtatcatgatccagcaacgacaacaaccccagataaagcgaaccagtgtaaatattgccaattcgccgacaataacgcgtgctggcttcaaaacggtttttcaatcgctgggcactcgcgtcatcggtggttggcaacactagatccaatgcttttttacccattttggtatatggcagatggaatgtcattgccgcgaaatcatgtgcacttaaatgatggtcggcctgataacgttcccagactgtcttgaagaaggcgagatattgttcggttgagtattttccttgagcaagcgccgtatcttggtaaaccggtcgccaaaagtcgttgattgatgccgatcgataaaccgaatccggttcaattgtcagcagacacggatcagctttgacaatcatcgccactgcgccggccccttgcgtcacttcaccggccgttgctaatccataacgcgcaatatctgccgcaataacgagcacacttttatcaggatgactcgcaacataatcacgagccatcataagcgcagcggtcccgccataacaagcttctttcagttcaaccgcccgcacccattcaggcagtgccaaaagatcatgaatgaataaggcggcggatttactagcatcaaccccgctttcggttccaaccagaatcatgcctaaactggcacgtgatgctggcgtcaatacttttgcggcggcattggctcccaatgtcacaatgtcttgactagatggcggaaccgcctgctcgtcttggccgatgccgatcgtatatttattcggatcatcaccgcgaaccttggcaagttttacgagatcgacgtaaaagtccggggtatccatttcgatggcatcaattccgattttcataatttcaatggcctgctttctattttgatcgaatcgttgctaaatacattttggcatgtgccagatccatttcacctgcgcgtaaggcggcgactagagcaggtacttcctgatcctgagctccggcagcaatcgccagtgcattggcctgcagtttcatatggcctgactgaatgccggggccggctaatgcgcgcaaagccgctaaattctgcactaatcctaatgcggcaattacctgctgcatggtggctaagtcgcgataacctccaagacggcgggccgcctgggctaatggtaatgcaccgatcgcgcctccgacagcacccagcggcaatggcatttgcagatagccttcaagtttgccatcgcgcatcaaccaacgtgataacggttgatactgaccagtcgcagcggcaaacgccccaacactggccgcaaccgcgcgcgtgtcatttcccgtcgccaagaccgccccaataacaccgttaagaatgcctttgttatgcgtcaccgcgcgctctggatcgacaaatgccaaatcgctcagctgcacaattttatgggcaatttcatcccctgacagtgtttttgtggcaagtgtcgccggtgtcaatttcacagttgctgtgactaactcgctcggtgcgttagttaaaatgctggccaaaaccgttccatccacccaggttgtcactgcatctgccacagcttcggcaaccgtattcgcataattggcgcccatcgccgctttaggattaagcgtcaggcgaagttttaaaaaccggttggccaagattgtcacggtcaggttgcggaagcctccgccacgctgcaccattgagggatgggcggcattggccacagctgcgatcgttgcttgatgggccaaaaggatctgtctagccgtattcaaatctgctaaatcagttaagaccacttctgccaccacttcatgggtacccacatgcgctaaaacgccgccgttttccgctaccattcgcgcaccattgctggccgcagcaacaacagagggttcctcattaacaatcggtacttgatgttgctggccattgaccattaaatttcgcgcaatgcccatcggtaaggaaaattcaccaattgcattttcaatcaaccgagtcgcagtagcatcaggaagcgtgcgtgccgcagccaataaagcggcatctgtactggttaatgacccttcttgcacaagttggtgccgcctagcttcgggcgtttgctcataaaacttcattttaatctgctcctaatcatgcaaagtaacttgcatcgccataccgataccaccaccgacacataacgccgcgataccggtttgttgcctgcgttcggccagattatacagtaatgaaaccataatccgcgcgccggatgctcccaagggatggcctaaagcaagcgctccgccattgatattcacctgttcgtcagtcagtcctaagtcacgcatcacggcaacactttgcgaggcgaatgcttcatttaattccacttgatcaatggctgttaaagtttgtccggttttttgcattagctggtcaatcgctaatttaggcgcataacccatgatgtccgggtcaatcccgacttctgtatagtcagtgatggtagccaaatagtggaggcctaactgctcggcttttgacttcgccataagaatcaatgcagccgccccgtcattaatcccgctagcattacccgccgtgacggtaccgccaacttcaaaaactggcggtaattttgctaactgggctaatgatgtatccggtcgaatcgccgaatccgtgtcaatcgtgacatcgccatgtcggccggaaatggtcaccggtgcaatttgtgatttaaaccggccttctgcagcagcagcggccgcacgcagatgagagcgcagtgcaaactcgtcttgcgcttgacgactgatctgaaagcggctggcaacattttccgccgtaatccccatcggttgctgactaaaagcatcgtttagcccatcgcgactaagaccatccaccaacgcagtatcgccaaacttatgcccggcccgcattgcctcagcataatacggtacctgactcatactctcggtaccgccgacaagtaccgcgttagcttcacctagttgaatcgccgcctgacctaaccgaattgcctttagcccagagccgcaaacttcattgatcgtcatggccgtggagttcgtcgccatgccactatgcaacgcaatctgccgcgcaacattctggcccgatccagcctgcaaaacattcccgaaaattgcttgatccagttgttgcggatcaagccgtgctgctttaatcgccgccttagctgcagtaacacctaaatccactgcactagcacctgctaactcaccgcccaactttccaatcggcgtccgcttggcactaagaatcacaactttttccataataaccccttttcaaaatgtgagcgcgagccggcgcggttagaagtcggagtgtaagtggccttgggcgtgatgaccgctttttggtcattgcgtccaaggtccttacacgcagacttctgcgccggggagcgcgttatggtgagcgtgagccagcccggttagaaaccggagcataagtggccttgggcgtgatgaccgggctttggtcattgcgtccaaggtccttatgtgcaggtttctgggctggcgaacgcgttatggtgagcgcgagccgcccagtcaagaacccaattcaaacatgcgttataatacatcgaagaagatcccatcgctgacctgagcaaccgctacataacaccaatgcccgctcagaaaaaccgttatagtttatcacagtccgaaaaacaaaacatctaaatcgtggcttgcaccgttaatcgcccagattccggtccctttagccgagattgcatttatgtctagctacataagttcatgttaaactgtttaaattgtatgcgattcttttcggaagtaacacccgtcttcaccaatccttaacttttagccatagaaagtaggtgccgttgatgcgcgtcattgatttgctcgccttactcgctgaccaaagtaaaaacgccccagtactgttaaatacaacaccagcaccaagtcgttttgatgattttattttgaaaacccaaaatgatcagccacaattaatctttaagcccaaacctgatcgaaaatcgccattacgcgtgtgggaattacaacttttgttaaatcagcctgacttacaatcacgttttctttatcttgcagatgcaggcggcacccgtgcactttttggctttatccaccggccagttggtcttttgcttaactaggccggatgttttgccgccgccaactttgctgcaaccttttccagataatggtgactggctatcatttcttggcaatcaaactgatttttcaaaccgatttcgtaaatccggctggcgttaggattgagctggggtaaaacgcggtaccaatcaattcgaccttctcccaaaggtaaactgtcatgcgtctgccccattgagtcaaccaaatgataatgccgtactaatggttttaggttgcgcagactggcgataagtcgctcattatccccgcgtaacgtgataaaagtatggctagtatcataagccaatggtagccgccagcgcagtaaacgcgcctcaaacgcaggatcgccatacctaaagattggcgacatcgagttttcaaataccacatgtcccggcgcctcttgagcaaacgcaatcatgcgagccaatgccacatcttgtgcttttgcaacgtcacgccatccggcataatctccgggggtgtccacgcggtaaccaccgtgaatcagtgccgtggcattcacttttttagccagtgtcataagcttaacggaactggtcatcagaaagtcatacctggctggatatttagtcggattcatcgctaactcattgcgctgaccacgaaatcgcatcgggtggtgaaaaacaacagtcggcacctgactttgaacccaggcaaccattttcaaaaaatgttgccagccactcgccgtaaaatctgcttccgtcaagtgaaactcaaaaacgtcaggatgatactgcaatcgatcacgaatctggcgctcatcggtactggcttttaaacccaacaacatgaattgccaacctccttaaaagcaatgaccattctagctcggtaatctgcgcatcaagcgtttaagcttcttgcgatcaattaacatcacccccaggtcgtcagctaaggcaatagcggagtcggaaaactcactgttggtgatgaccgcagcttgatcaagttgataataatgatgccctgcccaaacttcctgaaccgccttattcccaacaaagccagtgtatcgcttacattgaaagccgaatgactggccttttttttgtgcaataatgtcaatgccttgatcacccgaagcctgagtaagttgaatacgcttgaagccattgcgttttaataaataggcacaaaattcctcaaacttctcaccttccatgatgtccacgctctccatcttcaaatctcgaaaccgaaaatgatgatggtacagcaacaacgcattgatcaccacaaataaactaataatagtaaaactggcaggatcgccataaggtcgcaactgccgaggcaaaatagtgcgggcccaaaaactataaataagggccaatacaaacaacccccacaacaaatggtaggcctttttaagtaaaattctcatgcttctaaacccttctagttaagtgagcgtgagccagcccggttagaaaccggcgcataagtggccttgggcgtgatgaccgggctttggtcattgcgcccaaggtccttatgtgcaggtttctgggctggcgaacgcgttatgagcgtgaaccggcgcgcttagggatcggagtgtaagtggccttgggcgtgatggcgcctgggcttggccattgcggctgaggtccttacactccgatccctgcgccggtgaacgcgttatggtgagcgtgatccgacttctgcgccggggagcgcattatggtgaccgcaagccgccgcgacacacgcgatcttcacaccatcaaatacatgatccttatcaagcctagcagattcacgccatgtttgcattgaaactcaggtaatttttctgtaggcttaatttattgagaagggaagcgttttcgtcatgaaactaagcgccaaaatttttgccaaagttggcagtgagcgcattacgcaatacacattagttaacgatcagcaaatgacgctgcgatttttaactttcggcgctcgtgttcagcaagtccggttgcccactacgactgggttggatcctaacttattgcttggattcgtcactttagaagactatctgcatcaacccggtcttttcggcgccatgaccggtccgcttgcaccagatgaccctaaaacgatccccggagcttggcagaattggaattgggcggtgaaaaccagtcaaacggctgacttagccattaccttttctctaaatttacctgaaaacgctgatggacaaccgggcgagcgctcccttatggttacgcaccgactgaataatgacaatgtctggaccatcgatatggccgttaaaaccactgccgaaatccgacttcatccacgattgatattgccatggttattgacagccgatcccgcccaaacaatgttacacgctcagttaaccattgaccaccagcaaagtaccatcaagcaacagccagaaatctcgcctgcacatagattctccttagccaccggtgactggcaactgcactatgccaccgatgcgccggccacccgcattgactcgtttgctaacatcggacccgataacaactttaacggcattctgggacaacctcatgttgcaatcggattttctcccgaaaacaatttaaccggcaacgcgtggacacttgctgccggcgcaacttggcaacaccacgctgaatatcagttgagcaggattaaggccagtacgccagaccgttaatccaatcagctaaccaaactaatcgctacaaaaagccttggacgttgaatgagctgctcaccgtcacaaggctttttctactggtattagttgacactaataatttttaaagacatctttgtaaaccttaatactgtcgaacacgtcttggaggtcaacatattcatcggtttcgtgcgaagtgtcattacctggcccgtaaatagccaagtccaaaccatcgtggaaaaataaggccgcatcggttatgccggttcgataggccacagccccgcgctgcaaaccgatccgctgccgtgcctgctggactttttgaattaacgcattatcgggtgcagccgctgcggcacttaaaaccgaatcaatcgaaagtgataggtgaaccccttttggtactgatgttttagcagcctgcttcaaagcggcaataaacgcatcattatcagcaatcatggttgttcggatgttgccgcgtaaataagcagactccggtaatgaattaatctgattcccgccatggataatatcgatgttgtgggtagcgtgacccagaatcggatcatctttagcttgaagcggcgcggtggcagttaatgcggcattggcaaaagcaaataagccgtgaatggcattagccccaagatctggacgtgaagaatgcgccgccttgccctgagccgttaacgtatagtcaataatgccacgttcagccgcatccacattgctgtttcccggttctgcgaccaaaagaccggtcaaccgatcaccataaccggcagccgcaagttggcgggcaccgtagttatcgatttcttcgcccacggttgccatcaactgaacgccatgatcaagctcttcatgcgcgatttgcttaaacgcaaccacagcagcggcaagtccggatttcatatccgtcgccccgcggccatacaatttaccatcttcaatctgggctgagaacggaggaaactgccacttgttgggatcgcctgcatccacgacatccatgtgcccgtcaacccctaaccagcgctgcgcattagaatcaccaatcgtcaaaactaaattgtcgcgtcccggcgcataactgatacgttcacgcttaatcaaccctgcgcttagttccggggccaaaaaggcttcgatcaagtccgccacttggccttcttttgctgccacactggggattctaaccatcgcctgcaatagatcagtaacttgttgttcctcgtctgtcaaactaccgcctccacttttaaaatacatcatcttaacgatccaaatcgccaccatgactgagttcatctagtcacatcaggtgctatcaacaccattattccgaacacgcaacccagtcttttaacgcagccttattttcttctaaagcgcaacaatgcctgacctaagattggggtgacaatcccgccgagcaccgcctctgccaccgcattaatggccaaggcagtaatcaacagccaacctaaattcgttgcattggcccctggaacgatttgcgcggctttgctggcaaacaacaaccaggtaaagccgatcaccagcaatgtgttggttaaagcgcctgcaaccccggcgatgaccattttaatagtttgagccagcgtactctggtggcgtttgaataattgatgaaaaacaaaagctgcaaccaaaccaaccatgactcgcggcaccaacgcgataattggattgcgaaaaagcagtaaagttaccgggtcagccgctgatgtataagcgcgaatcagactcgttaatccccataataagccaaggctggcacctccgccatagcccaatacgatcccgccaatgatgacggtcaagtgaatagtcgaaatagccggccaagcgggaaaaatctgaacataaccaaccattggaatataggcttgcaaaataatcaaagctcccaaaataccaatgatcgcaatgttataagcttttccgcgacgtgtcatgctgacacctcctaatcgtttatagctaattttatcaaattatagacgtttacgtttgtttatattgtgttttctgctgttgctgattcaatcaaagcagaccattgccttcaggtatggctcatgttggggcaatagtccctgatttgacaatattgcttgcggtcgccagtgttagctaccgctgaggccgcttgtgttctggcttacgcccttttaacgcgcttaccggcgcagaagtctgcgtgtaaggacctcagtcgcaatggccaaagcccggccatcacgcctgaggccacttgtgttctagtttacgcccataacgcgctcaccggcgcagaaacctgcgtgtaagtaccttaagcgtaatggcccaagcccggccattacgcttaaggccacttacactccggtttctaagcgcgccggttcgcgcttagtaaatttctattgactttaatctcacgttttcctataatatttcttgtgcttaattagtcatgcgggcatggcggaattggtagacgcgcaagattaaggatcttgtgagcatttttgctcatggaagttcgagtcttcttgcccgcatcatagcaagatccgatcaacaaggtattactgttgatcggatcttttttattttatacctgatcatggcccggcttgaaaaatattaagcctctgaaaggagtcccattcgatgcttcgtgaagcccaatttgtcgatctgccggcgattgttcatctttatcagcagcttactcaagagatggctgcattggcgccggatacttaccggcccttaaccaccgacaatcggcagtattttgctgattacttgcagaatgatctggctcgcctattcgtcacggaaagccaaggcacacttaccggctttgcattggtcgttttagctcgaaccggggacagccccgaattcgttccacaacactttgcgcagttgattgacttgtttgtcacgccggatcatcgtcatcacggcctagccaaaaccctcatgacagcggtcgaggcattcgctgccagtcatcaagcctcttttattcaactgaacgtcctcagcggtaatcaaaccgcacgagaagtctatgcccgcgccgggtttcagccagtcaatttaatcctgcaaaagccgctcaattagttatttcgtgttgcctgcagtcgtaatttgccacggcagacaccgcacgcgtaccggttgacattaatccgtcggcgccgaacaaattgccggccacaccttgtacattgataaacatagtgtcggccgttcatcggcaatgacggagcaaaacgcgagccgccaactgctgccagtaactgtttgaagtcatgatcgcgatgttgatagccgcgatgctgggcgaacaaatggtagtgcaccaattcatgcttgatgatgccatccgtgacatcagatggataaagcgcaaaaattttggggttaaaatccagattcatcgtcgcaggataaaaccggccgccagtagttcgcaatcgcgcattaaacacggcttggtggttgaacggttggtgaaatgcgctcatagaaatggcttccacacgtgcttgtaattcttggtttgtcattgtctcatcgttacctccgagccaatagtgtacatcagcacgtcaccaattgcaccatttgtatcaggctactttgcgagactatccgatacctgttgagtatgttcatctcactattcatcagactacaaaaaggaacggttcagacgtccacctgaaccgttccttttttctaaccatgaaacttgcgcattgaccaagcaaatgagccatcacaagcaaatttgcctacctttttcacactcgcttaattgaaaaaggctaagacatcggcacgcttcaatgctgcttttcgtttttgatcgaagtctgccacaatctggccggcatctagcacaatgagccggttgccatagcgtaacgcgtcttcaacttgatgggtgatcatcagacaggttaactgttgctccgaaacgatcgcgttcgttaacgccataattgcctgactggtgtggggatctaaggctgctgtgtgttcatcaagcaacagtaaatccggtttgcgcatggtggccattaacaagctcaaggcctgccgttgtccacctgaaagctgctccgttggcttatcaagcgcctcagccagaccattaccggtttttgcggccaaagcctttagctgggctttttgtgcattcaacccccgggaacgtaaccctaggcgctgaccacgatggctggctagtaataaattctcagcaaccgtcattcgcggggcggttcccattttcggatcctggaaaactctggcaatgtgtcgagcacgttgctcaggacggcgcccgttgagtgtttggccagccaaagtgaccgtgccgccgctaactggtagatcaccggtaatcgcattgaataaggtcgatttaccggcaccattatgacccaaaacggtgacgaattcacctgtcttaaccgtcagcgtcacatcttgcaacaaggtcttgacttgagttgcaactggcacattaaccgtcacgtgatccaactttaattcagccatggatctgcacccctttctgcaacacacgtcgtaatcgtaattgatgatcaatttgcggcaccatgatggcaatggctaacacgaccgccgagatcagtttcaaatcatcggcattgaagcctagcgccaagacaaccagcaagacaaagcggtaaataatgctccctaagatgactgccaccaaccgctgcgacaaagtcaactcaccgaaaacaacttcgccgatgataatagcagctaacccgataacaatgatcccgatgcccatgttcacgtccgcatagccattattttgagcgagcaacccacctgcaagcccaaccagcccattgccaaccattaagcccagaaccatttgatgatcaggattaatccccagactccgcgccatattcggattatcacccgccgcaaagaacccttgacctaactgggtgttcagaaataacatcaacaatccgacgacgatgacgacaacaattaaaccaacaaccacgctattaaagtaaggcggcaagtcttttaagaacgatccttggaaaagattagcctgatgtagcaaagataaattggcccgtcccataatccgtaaattaatcgagaataagccggtcatgaccaggatcccggcaagtagcaccggaattcggcctttggtagttaacaaccccgtcaccagcccggcaagcatccctgctaccgttgcgagcaaggttgcgataatcggggaaataccgtgagtaatcgcactgacggccactgctgcgccaaagggaaatgttccttcaaccgtcatatctggaaagtccaacacccgaaatgttaaaaagagacctagtccgattaaaccgtataacaatccttgcccaattgcagaaacccctaaactcatttgatcaccgttcctttcgcgtctgcctgtttcactaacgaactcggcaatgttatccccaactgctgcgcttgtttttcatttaaaataagtcggccggttttttcaaagtggatcggcgtcgtggccggtttggctttgccttttaaaacatccgccagcatatgcccggtttcaacacctaaatcaaattgattaagtccgatcgttgccaccccgccttgtttaaccatggtatccacagttggaaaaatcggaacctttcgtgcgttagccgctgccactaaagtttgcatggcgctcgccaccgtattatcagtcggcacaaacaccgcgtccacctggcttaccatttgcgtcgccacttggttaagatcgttggtcgagctaatcgcataccgtttaaccgtgaacccttctttggggcctagtttagccaccatcttggcttgggtttgtgcggaatcatcactggaagtcgcaatgacgccaagtgttttcgcatcaggcatgatctgccggataagtttcaattgagctgcaatcggggcttgatcggaaaccccggtaatattgccgcctggttttttaacatttttaaccaactttgctgcgactggatccgtaattgcccccaagatgatcggcgtcttttgattcacattggctagtgcttgagctgcaggcgtagcaataccgactgttgcagcggcatgttcctcagtaaagcgttctgacattgacttcagattgctctgatcattttccgcgttttgaaaatcaatcttgatattcttgcccgccacgtagcctttatctttcaatccggcgataatgcccttatgaatcgcatcaagcgccggatgggttgtcagctgcaaaatgccgacagtcggctttgtctgcgtctgttgcgcggttgtgccactttgaaaataagcaatacccaaaaagccaaagatgatgatcataaatccaagcattcgtttcatgcgcttgcctccattttgaatattccaatagctttggtgatgtcgatcctttaatgtgatatcgacatattccgcgtggttaaagctactttgcggttaacctttccttttttgtatcaataaaaataccgcgacaggttcaggccgtcgcggcaataaaaaaaccgcatagccccgtgattgggtatctatgcggacagtaaatcggaagccaacatagacacaacctgcgcgtctggcaggctgcatccgcaacctacctaaagttggctttgccagttctttaaggtaagcaatgctgtcatgtgggtttcctccattcgtttatacttgatgagatgttagattaaaggtacatgagtaaacatttcatgtcaagaaaaatcattgcaagatgagcgagattttttgaatctgcttggtaaatttctgaatcgtctcatcctgcgccttttcggaagcattaaaggcgggcacatctacttctaagtcaggttttaagctggcagtcattgcttcacacgctgcggtaaaagccgcaaagtcatgaaccaacgtacgatgcggcccagccagtcgcgccggaactgccacttgttgcaaccgagttaataacttttggtactgagcggttccttcacgaaaaacgacctgagtatcctcataggtctcccgatcatattcagctaactgatctgcatcaattgcttttcgcaacggttcgaacaatggtgccattttatcttgattagcctgaatctgttccaccacatcattaatggtcgaaccataatgcgccaacttcatttgttgcttattcatgaaaagcacgaatcctctcttaagcacgtggttgtcagtgctgacctgccactttgttttttatttagccaaacgtcgacgccgagcgcgttcaaacaccttcacgatctcgacgatcacaatcatcgtcacgcccgcgccaagaaccgttatccactgatgccaatcaagggtggtgacatggaaaagcccgttaaagcccggaaccagaatcgtcactgccagcaacaggaaggatgccagaatcgcccagttgaatgctttattccggaatgcacccactgtaaacaggctttgatggatactcttaacgttaaaagcatggaagagttggatcaagcctaaagttgcataagccatggtcaaagcatccgcatgcatcgccgcttcaccgctatggaccggataagtgatagcaatccagtaaacgcccaatgtcaacaagccttcaagaatcccttgccaaatcacggccgggcccacgccgccagagaagaagttggacttccgcccgcgcggtttttgcttcataatccctggctcagtcggttccaccccaagtgcaatcgctgggaaggtatccgtcaccagattaatccaaagaatgtgaaccggcgctaaaatatcccagcctaacattgtcatcatgaacaaggtcaaaacttcaccaaggttagccgataagagatattgaatcgctttttgaatgttggaaaagacttttcggccttcttcaaccgcgaccacaatcgttgcaaaattgtcatcggccaacaccatgtccgaagcaccttttgaaacttctgtcccggtgatacccatgccaataccgatatcagctgcttttaacgcaggggcatcgttaaccccatcgccggtcatggcaaccactttgccttttttctgccaagcattcacaattcgaaccttatgctctggtgcaacccgtgcgtacacgctgtatttgccgacattcttagcaaattcttcatcgctttgttgatcaagttcggcaccggtaataacggcagcatcatcaccttgatcaataatgccaaggcggaccgcaatcgcttcggccgtgtcgcggtgatcaccggtaatcatcattggccgaataccagccgatttagcttccgcaaccgctgcttgtgcttctggccgctccggatcaatcatcccgacgagccctgcaaaagtcagatgttgttcaacagtttctgagttaaccgtatccggaaccgcatcgattaccttataagccatccccagtactcgcaaagcctgggtggccatgtctttatttgctttcaaaatggcatcgcgttcactgtcagacagaggcgcaacgttatcaccggtggctaaattcgtcacccgcttaagcaattcgtccggtgcgcctttcgtggcaaccaagattttaccatccgggcggcgatgaagcgtcgtcatcaatttacgttcggaatcaaacggtacttcagcaatccgcggttctgcagcaagttccttagtaagatcaaaggactgggttttaccataagcaactagcgctgtttcagtcggatcgcctaataattgaccatcatcttgaacctgcgtatcgttggcaaaattcatgatggtcatcaaaggattgccaccgtggatacctgcgctggcagcgttcaactggccatcataataaactttttcaaccgtcattttgttttgggtcagtgttccggttttatcactggcaatgatgtcggtactacccaaagtctcaactgctggcagtttacgcactaatgcatgccgctttgccattttttgagtgcccaatgccaaaatgatcgtgacaatagccggcaacccttccggaatagcggcaacagccagcgaaaccgcggtcaggaacatctccggtaaactggcggcattacgccaaatcccgactgcaaacacaatgacagcaataacaagaatcatcaccgtcagcgtcttcccaagactcttgagattttcttgcagcggggtggttgtttcctcggcagaattaatcataccggcaatccggccgacttcggtttgcatcccggttgcgactacaacgccaaccccgcggccataggtgatgttactgttcatgaaggccatgttggtccggtcaccaataccaacatccgcacccgtcaacggttcgctggtcttatcgaccggtacgctttcaccggttagcgcgctttcttcgatctttaagttagcactttccactaaccgtaaatcagcaggtaccacatcccctgcttccaacaacacaatatcacctaaaaccagctggctgctagggatcgtgagtacttgatcaccccgacgaacatgcgcgttaggagtggacatttctttaagcgcatcaatggcctcttcagccttgctttcttggaaaacaccgaaaaccgcgttcaataagacgaccgcgagaataatacccgcatcggcccattcacttaataagaacccggcaatcaaagcagcagctaacaggacaataatcataaagtccttaaactgatccaaaaagcgcgccaacatgctcttcttttcagcctgggcgagttcatttggcccattttcatttaaccgagtctgagcggtttccttagatagtccagtcaattgcgttttttcttcttgcaaaacttcttgactgcttaatgcatatggcggtttctttgccaaaatagtgcctccttctttctttgggccggtagccaaaaagagacttatggcctaccagcagtagatccataagtctcactatttaagacaacaccagacatagccttgttggtgacgttgtcgcagatatgctctgctagttactcccctaggttgagtaaagtatatcaggtctaggcaggcttacgcaagttcctgagtagtgagcgcgaaccggcgcggttagaagtcggagtgtaagtggccttaaacgtgatggcccgggtttggccattgcgtttaaggtccttacacgcagacttctgcgccggtgagcgcgttatgggcataaaacagaacaaaacggcctcaaacgtgatggccgggctttgaccattgcgcttgaggtccttacacgcaagtttctgcgccggtgagcgcgttatgggcataaaacagaacaaagtggcctcaagcatgattgccggactttagccactgtagctaagatcctttcgattttaatcaagctcactcaccccaacgtttgaaataaatgcactgccagatcatgcaaatttagcgcatgtgaattgtaattacttaacaggatgatcgcattttgaccatcgtgactgattgcagtcgatgccatttgaccagcgacaacgccatgagttgaataaaaatcttgatgattatagatgccggctgtataaacgccatcgtcacggttgcgcaacgtcttcaaagcggacaaagtaatcactttgccgctgtctatcccgcgcaatagccgataaagatcaccagtcgtcgtatacatgttgccggtaccgagctcgcggttataccataactccggttcgccgataaaagtctgataaggattggtgacgggacctgtatacgttaaagaacggtttgaatctgtcagcatcgccggtaaaaagccggtgtgcttaagctttaggcgttcaataatatcgttttttacttgttgttcataggatcgcccggcgactttctcgatcacaccggctagtaaaagatagttcaccggttgataggcatagttttgttgtggcaaataggtcatgttggcaatggcccaacggataatatccatatcacccatcacggcaggttgatacttcttaagggcaaaaccgctgcgcatgtcaatcatcatccgcaatgttacttgatcgccagtttggatgcctgacaaatacttgctaaccggatcgtctaatcgtaacttgccagcttcaaccagctgcatcacggcaactgcggtaattgctttttgaatcgagccaatttgaaacaaagtcgtcggtccattaagccgctgcgatgcttgatcggcgtaacccacaccaccgttgaagatgaccttaccatgttgaatcaccaaagcactgccgataaatttgtcattggtcaaggcctctgaaaaagattggcctgctttggttttaaccgaacgatccaatttttcgtcaaataacgctgcttgtgtcttggccgtatctttgcgcgttactttttcacgatactttgatggcttgacccgtgcctgacgttgtgaagctgaatgatcttgctgccagccaagaacagtcccacctaatagcaatgcagccaaccccaaaacaacgcccacccaaatcatttttcgacgatgcaacacgttttcatcctcccatttattgctcatcaaagataccttaaaagcagacaaaaaaacagccacgaccctcaataaaagcaaaaatttcattgaagttagctgttttttgggttatttccaaaatgtatcgaaaacagtgattggcaaatgtcgtttgtgagcagtcttctggtaccaacgctcgatggtttcagcagcttggtcgctaacttgtttgccttcaagatagtcatcaatatcgtgatacttaaccccaagcgccacttcatctggcaaggccgggcgattgtcttcaaggtcggctgttggcgccttttgatacaaatgagcaggtgcccctagcgtcttcaacaatgccgcgccttgccgtttgtctaaccggtaaagtggggtcagatccgcaccgccatcaccgaacttggtataaaaaccagtgacggcctcagctgcatgatcggttccgatcacggcccctgccatgttgccggcaatcgcatactgagtaatcatgcgcatccgggctttaatattgcccttgttgaaatcagaaatagccgcaccattggcttcaacagcacttaccatcgcatcaacacttggtttgatattaacccgtttaaccacatcggcttgcataaactcgatggccgccatcgcatccgcttcatcggcttgttcaccataaggcaggcgcactgctacaaactgataagtatcgtcaccggtttctgcccgcatctcctgcatcgccttttcggttaacgttccggcaagcgtcgaatcctgcccaccggaaatgccaaggacataagtttttaaaaaggtattcttcttaagataggcttttaaaaaatcgacactccggcgaatctctttttccggatcaatcgttggcttgacacctaatgctttaataatttctgcttgtaatggacgcattatttcactcctttaatcatatcaagaaatagactttgtgcgagatctcgcgttatctgaccggcattagccatgagaaccactgcattctgcccgctactatccatcaccgttgccgccgagtgtgctgccacaacgccatgcgtcaatgtgtagctgccaaaattataaaccccggctgtatattgaccttgacttaaatcgcgtaattgcatgacggcggatcgactaataattttaccttggttaattccggccataatctgatataagtcaccggcactagcataaatattaccggtgcccaactcgcggttataactcaatgctggctcgatataacgctttgaatacggatcagccttgggaccattatagccaaaagcctgattttgttcacgatataattcaggcatgaatcctgaatgagtcaaggctagccgcttaaaaatttcctgttgaatcaaatcagcatataagcggccggtaactttttcaatgacacccgctaataacacaaaattaaccggttgataatcataccgaggtgtttcgtaattcaagttggcaattgaccagcgaacaatgccggcatcggaaagttttgccggttgcgcacgaggtagcgttagcccgctgcgcatatccagcatcattcgcaatgtcaccttcttgccagtacgaatcccggtaaaatagtgaccgatcggatcggatagtcgcaccttgccttgttcaaccagtttcatcaaaagcactgccgtcagtcctttttggattgaaccaatttgatacagtgtctcgggaccgtttaagcgccccgagtctacatccgcataacccagaccggtattaagtatgaccttacccttgcgcatcatcaaaaccgtcccgctaaaatgcgccgcctgcaattttgccaatagcggcttagcatccggcgagtcaactggttgcatcaatttattagtggtaccggtatcggcttttgcctggttttgcagccgctgctcaattgcgcgatggcgattcagctcggtttcatattgacgccgcgcacgctcttccttggcggctatctgcggacgaacatacaaataatcataactgccataaatcgcaatgccggcgatgaccccgataacaaggcctaacaacagccaccggccccaacgccgcttttttgtctgtctcacgctatttcctcgattattcttcgcgatcagccactgcagacttcacttttttaatcaaatccatcttgttatcccaaacccgctgcgatagatcaaccggataatcttgtggattcaaaattcgccgatactcatcccacagcgcgttggtactgcgcgttgcataagcctgaacgtcggctagcggcggggtttgataaacctgctttccctgatcataaataagttgaagtaacggcttggcctcaaaattcttaaccgtcttattgatatatggaaaattcggatgaaacatatacaaactacgctctggatcaatcacttcgtctgccagtgccacataatcaccttcagacttgccatcatcacgccgcgtaattcgccagacttgttttttgccaggcgtcgagactttttctgcattattagacagtttgatcgtatcgtgcatctgcccagtgctgtcttcaatcgataccagcttaaacacagcacccaacgctggttgatcataagccgtaatgaggcgagttccgactccccaaatgtcgattttggcgccttgcatcttcagattttggatggtgttttcatcaaggtcgtttgaagcgtatattttggcagaagtataaccggcatcatctaactgctgccgaacacgcttggaaataaacgccatatcaccactgtcgatgcgcacgccgagaaaattgattcgatctttaaactcattagcgactttgatcgcagcaggcacgcctgatcgcaacgtatcataagtgtcaactaaaaagaccacgtcgcgattactttcggcataggccttaaaagcctcatagtcattaccatatgcctggaccaatgagtgcgcatgcgtgccactgatcggaatgccaaattccttacctgctaacacgttacttgtagcattaaacccgccaatatacgccgcccgtgtgccccacaaagctgccgccgtctcctgtgcccgccgcgtcccgaattccatgagcggatcagcaccggccacactacgaatccgcgctgctttcgttgccacaagcgtttgataattaatcatattcaaaaccgcggtctcgaccaactgcgcctgtgccagcggaccttcaatctgccaaatcggctcattattaaaaaccaaatcgccttccagcgccgaacgaacggtacaggtaaattcaaaatgacgtaaataatcaataaacgcatccgaataatcggtctgggactgaagataagccaagtcggtttccgagaacttgagatgattcaagtaatcaatcacatgctctaacccggcaaaaaccgcaaatcccgaaccaaaaggcaactcacgaaagaaaacttcaaaaacagcatgacgttcactgattccacgttcaaaaaaagtgttcatcatattcaattcataaaaatcggtgtggagtgtcaatccttcacccaattgtgtggtcatcatctttccccttccagagacatactaatgggagccatcgttaagcattgagcatttaatttaataatatagctattgattatatactaagtgggcaataattgcagagcgcgaaccggcgcggttagaaaccggagtgtaagtggccttaagcgtgatggctgggctttggccattgcgcttaaggtccttacacgcaggtttctgcgccggtgagcgcgttatgggcgtaagctagaacacaagtggccttgggcgagatggccgggctttggtcattgcgtccaaggtccgtatacgcggatctctgcgcctgcgaacgcgttattgtaaaagcgtgaacggcgcttacacacggcttctaagctggcaataacattacagcaagcaggcttttcttccaccctccaacccaaaaaagccagaaaacaaaatcgcttctgctttctgacctcagatcaccttattactttaacgctctaaataaaattcaaacctttcgccaacatactgagtacgtacatattcaaacggtgttccatccttgagaaatgaaacttgacgcaaccgtaaaatggcatcgccgcgtttgatggctaagtattcagaaattcgttcgctagccaacatcgcactgaccgtttgttgtgcgccgccaagaacataaccgccttttttctccagtgtatggtaaaagctggctgtcatttcttttttggtaaaacctttcacaagatcgtaaggcaccgctgcggtttcgaaactgatcggtaccttatcggcataccgaattcgttccatccgcaacacctgttcagcaggcgccagttttagtttctctacctcggaacttgtcggctgggcgacatgatatgagaccgttttgctggaaggcaccttgccttgggcctgcatcagatccgtaaagctagtcacaccggacattttttcctggaccttctgattagccacatacgtccctgagccaacccgtcgttccagaatgccttcatccaccagcgtttgaatggcctgccgcaatgtcattcgcgataccttaaacgtgacggctaaatcgcgttcagacggaattcgatcgcctacccgccatttaccggcttcgatatcagcacgaatggcgttatgaatttgaatataaactggcacatccatcctcatcgcctcctctttttatggtttaagcttccgtatcgtgtttctcaccataactgtaggtcgcgatcaaatcatgattgcgatccaacatattaatatctgcatctttaccaacttcaagtgttccctttgaagtgaggttaaattcgcgtgcttgattgacagaggacatttcaactgcatcgaataaggaagcgtccatgaaactcatggcatttttaaacgcatccttatacatcaaaacggaaccagcaagtgtcccatcggctaagcgagcctgcttatctttaacataaacggtttggccgcctaattcgctcttaccttctggcatgcctttactacgcatggaatccgttaccagttcgatgcgttccggtcccttttgatcaaaggcgagccgtaacatatccggaacaatgtggaagccgtcgcaaatgagttcacaatacatgttatcttccagcattgcatggccagtaacgccgggttcacgatgccgtaaaccacgctgagcattgtacaaatgagtgacgtgggtcgccttacttgctagcatttgttcccgcgtcgcattgctatgcccaactgatgggacaatgttatgcgccaaaaggtagtcttcgaattcacgcgagccttcatcttcaggtgcgtacgtaatcagcttaaccaagccgccagacaattcctgccactgtttgacaagatcaatattaggattcttaatatattcttctggttgtgcccctttgaagaccttactgatgaacgggccttccaaatgaacgccttgaataatgcgattgcgttccgctgcttgcttgaccccacgcatcgccttatcaatgttttcagtcgattgcgtcatggtggtggcaaaaagggtggtgaccccttcatgagtcatcattttagttgccatttgatcgatctgatcagcatcgccatccatggcatcaaacccatagccgccgtgtgcgtgaacatcaatgaatcctggtatcaaagttttaccttgaacgtcaacgacctgttcgccagcctgtgcttgataatcaaacatatcgccgactgccaaaatcttgtcatcaaagcggatgtacccgtcttcaatccgttctaatcctgtataaatcgttgcgtgtttcaataccgtaaccgtcacaataccactcctaattatttaaagtcccgaatatcaccaattagtataaccggtatagaccagacttgcaagctagccaaccggtcggccacctttatcaaccgtgacgatctttggcaatcgttgcatcaacgcctttgacaaccgcagtcatgagtccagcctcttccatcgccaacaacccggcaactgtggtcccacccggactagacacttgatcgatcaaatcaaagggcgattgatcgctggcgagaacatttttggcactgcccatcaccgcctgagcagcgatggccgttgcctgatccttctccagaccatatttgacccccgcgcgcgccaggctatcaataaacaaatagataaacgccggagatgaaccagctaaagcgacaaacgttgaaaactgttcctcaggcaaggacacggtctttcctaaaacattcaacaaatccaaaaggccatctaattgaccagccaccgcatcgttagccgcataagcaatcatcccggcattaatcgcaacattaacattcggcataatccgcaaaaccggttgatcgtgactgcctaatgcctcctcgagtgtcgccacggaaacaccggttagcatcgagacaaccggaacatgccgtttttttaacgttgatccaatcgcttgtaaaatcggttcgcctaattttggcgatactgccagaaaaacaatatctgcagtctccgcaactgcctgattactagccaatgcttttgcaccgattttggcggcatatggttcataatgaagcggctggccgccatgtaagacaatatctgttggtgcaactgcctttttagccaataaaccacttatcattgcccgcgccatattaccggcaccgataaatccaattgtcattcttattctcctttagccatctgcggttgtgcttgatgggcgtcaaaccaatccacaattgcctgcaatcgtgccactcgcaaattcggcaacccgctgcgggacaaatcatgatttgactttgggaaacgcatgaacttggtttcaacaccatgcagtttcaggccaatgtagaactcttcgccttggccgatggggcagcgttcatcattttcactgtgcatcacaagcgtcggtgttctggcatgatcaatgtgagctaatggtgaaaaatcccaaagcccttgcacatctgacaaatcgccagtccactttccctctagttcccacggtgtaaagtaataaccgatgtcactggtaccatacatactcagccaattggaaatcgaacgctgggttaccgctgctttaaaacgatgcgtatgggtcacaatccagttagtcataaacccgccataagaaccgccagtgacaaatagacgttgcggatcaattgttgtatcgagctttagcgcttcatcaaccgcagccaagcaatcttcataatcgccttgcccgtaatgtttaatgacagcggccgtaaatgcctcgccgtaacctaaccctccacgcggattcggacaaatcacgccatagccttttgctgccaaatattgcatttcatggaaaaaggtatagccatatccgactgctgggccgccatggacatacaaaattgccggatgcgaggatgacgcctgttgcggtggaaaataccagccctcaatctcaaaaccgtctcgttgaaaattaaacgtctgagggttaactaagcccaagtgacgtgttacctgacgattcgggtcatacagaacctgctcttcttccgatgccaaatcaaaataaaccagccgactcggaatggtcatcgtactctcagtgaaaatcacgccacgatgatcaggtgtcaatgcaaagtccgtcacgtgacgccgaccatcaatcaaaggcgtcaaccgctcgtcaggcccgccagcatacagactcattttgccatgatcgaaaccacgagccagataataatctgccgtcacaaagtcggccactttaccggacagatcctgctgaaaatcactattaacataaccgggaatgtcaaaatctacatcatcggcaacgtcttgcaattcatgattggttaaatcatagtgccacagatgatcctgcgagacatttggcaaatgattatccgatcccaccaacagcagctgctgcccatcagccgaaaacgcctcaggagacagtgccgcttgtggtaaatgttcattgaccattgtgattttttgactcgtcaaatcgaacaaataagtcgcctgactaaaatcattaggatcatccggtaaccgctcggctgcaaaagcaattttttgcccatcaggcgaaatcgctcccaagtcaaaatcatgttgccgcttcataatcaggtggctggtcttttgccgccgttgctgaattcgcagttcataagtgacattttcctttagcaaaccgacaccattcagcttatacggggcgcgagtgaccgttaccggttgcggttttttcgcatccgactcggatatttgcggtttagcgcctaccgttgtctgcagcaagagtgccttgctgtcaggttgccagccaaaattggtcacgccttccttttcattggaaaactgctgcgcgccacccccgtcaatccgctgaaggaagacttgcgttgttttgtcagctgcctgactaagaaaagccagccattgctgatccggactgacttgcggatgacgatcgtgcttctgatcaaacccgtaagtcgttttttggccgcggcgattgaccaaataaatgcgttgataataagtattatcttcttctgaaattcgattctcctgaacaaaaaaaccgcgatttgttgcaattggatacgacagcgataccaatttaaaaagatccgttgctgcaattgccatacactcacacccttctttgtcatgctttaagcgtagcggttgggctataccatgtcaatcaactggaccgctgaatttaaaaatgaatcaaatatttaaaaatcatcaacaggtatagccagcaaaacagccgacaaatgagacaaaacgtctcacttgccggctgtcagtttccgaaaatcaactttctatgatgaggtttccctatcattcataactgcaacttcttgagcttaagaaccttgatctcaacgcctaatgtgatgctttctttttggcgaacaacaatcctgagaacagactcagcaacgcacctaggatcaccatccacagagattgttgctcccctgttttcggaaggttgccttctgttgaagtgataacttttgttttaggtgctgcaggcttctcaggtgccttagtcgttggcaaaggtgttgctttggtgactttttgtcccttgccggcacgatgttgatcgttaatcgccttaataccggctgctttggcttggttcaccgcatcagcgttaccagctgcgtcaatcgctttctttgctttatcagcttctgcggcaactgcttgcttttgcgctgccttttctgcatcagtcaatgttggatcttgatcaattgccttgatgactttagcagcttcgtcgtcaattgcctttttggccgcatctttttgcgccgcgatggtttgaccggagcggtgctgggcatcaatggccttgataccagctgctttggctttgtctactgcatcggcaccttttgccgcatcaatggcttttttcgctttgtcagcttctgttgcaactgcttgcttttgcgccgttttttctgcgtcagtcaatgttggatcttgatcaattgccttgatgactttagcagcttcttcatcaatggctttcttagcgtcatctttacgggttgcaactgctgtacctgattgatgttgcgcgtcaattgctttgataccggcgtctttggcggtcgtaacctcctcgatatttttagcctgatcaattgcctgttttgctttaccggcttctgtcgtcactgcctctttttgctgtttcttggcagtagcggtcaaagtcgggtcctgatcaatttcaccttgaactttggtagcttcagcatcaatcgctttcttagcttcgtctttgcttaggtcaaaagctttaccagagacgtgttgagcatcaatggccttaataccggcattttttgcttggtcaaccgctgaagcattagcagcagtatcaatcgccgctttggcctttgttgcttcgtctgcaacggcttgtttttgacgcttcttttctgttgctgtcagtgttggatcctgctcaatagcttggcctacctttgcagcttcggcatcgatggcttttttcgcagcagccttacgatcggtgagcgcttggccggactggtgctgcgcgtcaatgatctgaatgcctttggtcactgcttgatcaacgccatcagcattgtcggcagtatcaatcgcctgcttagctttcttggcctcgtcagcaacagcttgcttctgagtgcccttttcgctgtccgtcaacgttacatcatggtcaatggcttcgcttactttagcagcttcttcatcaatggctttcttagcagcatctttccgggttgctagtgcttgcccggatttgtgttgctggtcgatcgccttgatgccagccttttgtgcctggtcaacggcatcagcatcaccggctgcatcaattgccttcttggccttgtcagcttcagcgatgacggcctgcttttgtgctgccttttcagcatcggtcagtgttgggtcatgatcgatcgcatcagttatcttagcaacttctccatcaatagctttcttagcgtcatctttacgagtctcgatgctttgtcctgacttgtgttgttcgtcaattgccttgataccagcagattttgcctgatcaatagcatccgcatttccagctgcatcaatcgcttttttagctttatcagcctcatcagcaactgcctgcttctgcgcttctttttgagcagccgtcaaagtggcgtcgtgatcaattgcatcagtaactttaccggcttcagcatcaatggcctttttggtgtcatcttttcgtgcatcaactgtttgtcctgacttgtgttgctcatcgatagccttgatgccggctgtttttgcctgatctacagcatccgcatcgcctgcagcgtcaattgcttttttagctttatcggcttcagttgctaccgcttgcttttgtgcttctttttgggcagcggtcagagttggatcctggtcaatcgctttaatcaccttagccgcttcgtcatcaatcgcttgcttagcgtcatcatgacggctatcaatggttttaccggctttgtgctgagcatcgatggcttgaatcccggctgtctttgcttgatcgacagcatcggcatccccggcagcatcaatggcttgcttagctttgtcggcttctgtcgcaaccccttgtttctgggcagctttttgggctttggtcaacgtgttatcctgatcaatcgctgccgtcaccttggctgcttcagcatcaatggcctgcttggcatcggctttccgattgtcaagagattgcccggagtgatgttgggcgtcaatcactttgatcccgtcattcttggcctggtcgactgcatcagcctgcttagccgcatcaatcgcttctttggctttagtcgcttcatcggcaaccgcctgtttctggcttgccttttcattcgcggttaaagttgcatcgtgattaatagcagctgtttcctttgccgcctcggtatcaatggcagctttagcatcacctttccgatctgcgagtgcctgaccggactgatgctgagcgtcgattgctttgataccatcactttcagcttgcttgatgccatcagcattaccagctgcgtcaatggcctttttggctttgtctgcctcagcgatcacagcctgcttctggtcagctttttgcgttgccgttaacgtcacatcttgatcgatcgccttacttactttggccgcttcagcatcaatggcctgtttggcttgctgcttttgcgtatcaaatggcgttgcggactggtgttgcgcgtcaatggctttaacgccagcagttgttgcttgaatcactccatcggcgtcagaggcttggtcaatggccgcttttgctttcgttgcttcatctgccacggtctgcttttgtgtagccttttggtcggctgtcaaagtgacatcctgatcaatcgcttcactaaccttggccgcttcggcatcaattgtttgtttggccaccgccttttgcttatccaatgctataccagactggtgttgggcatcaatcgtcttaatcccatctgccagtgcttgatcaatcgcatcggccactaacgcagcatcaatagcagctttagctttagttgccgcatctgtgactgcttgtttctgtgcctttttttcagcggcggttaaagttggatcttggtcaatcgctttggttacttttgcggcttcagcatcaatagcctgcttggcgtcattttggcgcgctttaattgcttgcccagactggtgctgagcgtcaatcgctttgatgccgtctgttttagctttgtcaacggcgtcagcattttgccctttgtcgatcgcttgctttgcgttatcggcttcggttgcaactgcctgtttttgcgccgctttttctgccgctgtgagggtttcatcttgatcaatgttgcccgttactttagccgcttcggcatcaatggcttgcttggcagcggctttacgatcggcaactgcttggccagcgtgatgttgggcgtcaatcgctttaaccccgccagttttggcctggtcgactgtatcagcctgtttagccgcatcaatcgctgctttagctttagttgcttcatccgcaaccgcctgtttctggcttgctttttcgttcgcggttaaagttgcatcctgatcgatggcagctgtttcttttgccgcctcggcatcaatcgcctgcttggcatcacgcttccgatcggcgagtgcctgaccggattgatgctggtcataaattgctttaactcccgcatttttagcttgatcgaccgcgtcagcattgccagccgcatcaatggcttgattggctttagtgacttccgcggtaatcgcctgtttttgcgctgctttctgggtcgcggtcagcgtcacatcctgatcaatcgcggcctgcaccttatcagcggtttccgcaattagctttttggctgcttctttgcgttcgttcaacgccaacccggcttggtgttgggcatcaatggccttgataccatccgctttggcttggtccaccgcgtcggcattcttagcggcgtcaatggcagccttagcttgcgttgctgcatcagcgactgcttgctgttgcgttagtttttccgcttgcgtcaaggtcacatcttggccaatagccgcaatcactttagctgcttccgcgtcaatcgcctttttggcatcttccttgcgggtgtctaaaagggtgccactttgatggacggcatcaatggcttggatgccggatgctttggcctgatcaatagtgtccgcattcttagctgcatcaatcgccgtcttggctttggctgcttcatctgcaaccgtttgcttctgagtggctttctcggcgctggttaacgtgacatcttggtcaatgacctcattaattttagtaacttcggcatcaatggctttttttgcatcagccttgcgcgtatctaaaagggtgcctgactgatgcgcatcgtcaatggcttgaatgcctgctttttcagcctgaattacaccatcggcatcctgcgccttggcgatggcatctttagccttgcttgctgcagcagtaacggtctgcttttgggccgccttttcttggctcgctaaagtaggatcttgatcaatcgcttcgccaactttggtagcttctgcgtcaatggccgcttgtgcatcggctttgcgcttcgctaagtccacgcccagctgatgttgcccatcgatggctttaatcccatcttcttgcgctttggcgatttcatcagcattccgcgccgcatcaattgcggtcttggctttagcagtttcatcggcaacgccttgcttttgcgcctttttttcagcactggtcaaagtcgggtcttgatcaatcgccgttaaaactttggttgcttccttgtcaattgcctgcttagccttggttttctgggtatctaactctgtgccagtttgatgttgcgcatcaatggctttaatcccgtcagcttgggcctgaagaatggtatctgcgttttgagcctggtcaatcgctgctttggctttagccgcttcgtcagctactgcctgcttctgggtctccttttcggcactggttagcgtgtcatcttggttgatggcatcagttattttggccgcttcatcatcgatcgcttgtttagcactatctttacgggtcgccaaatcggtacctgcctgatgttgggcatcaattgccttgatgccatcatctttcgcttggatcaccccatcaatggtcttcgcttgatcaatggcggtcttagccttggtagcttcatcgccaacgtcttgcttctgggccgttttgtctttgctcgtcagagttgggtcttgatcaatagcatccttgactttggccgcttcgtcatcgatggcgtctttggcttgagctttacgcgtatcgaagtcagcgccttgcttgtgttgggcatcaattgctttaatcccatcatctttagctttatcgatggcttcaatcgtttgggcctgatcaatcgccgtcttggctttcgcggcttcatcagcaactccttgcttttgggccgctttttcgctagtagctaaggttgaatcctgctcaatctcagcagtcactttagccgcttcggcatcaatcgcctgcttagcttcttctcggcgcacgttgagtccggttccaggctgatgttgggcatcgattgctgcaatgccggcatctcgcgcctgctgaacccctgtttcggtttgcgcttggtcgattgccgccttggccttggttgcttcggctgcaacgccatctttttgctttgccttttccgttgccgttaaggtcggatcctgctcaatttcagcgctgactttggcggcttcggcatcaatatctcgtttagcctgttccttatgcgcgtttaaaacgatttcctgaatgagcttgtcaaagtcctcgtcaaccgtgatggggtcgactttttctttaacttcttcttgaaccggtttaggatccttggccgtgtcatcaatcgcctttttcttcatggcttctaaaagtttggcattgagcgcagggccgaaatcgttgtactcaagaatgcgagtggatcgaaatgccgggtgaacagggtgcttcccttccactcgattagtttccatccgaacggcaatccaatcctcaggcataatcttatgcgcctgcatgtagatgacggcatctgctcgtccacctagttggtgactaacgcttttaccatcactaccatcccagcgccgtgcaaattctctgttcgcgttaagacttgtaataaccgctgggaccagcccatcaggtgaaatcacaacccgcttaatttttccttctaaggcatcgttaaacgaatacccaaactccaagtatcgatccaaaccgtctgattcaagcgagccgaaccgaattggaattttgaaggtatccgtaccttcgtcatataccacggcgtcgttgctatattggaatgtgatgctatttataagcttcctatagctcgaaccatcggcaccacccaaatggatatcaccagcctggggcttattcgctgccaatacgacaccgcttgaatcccaaagacccattgaaatcagtcccgtggctaatagtaatatcagtctcccctttttcacttcaacatgcctcccctttattaaacccaaaacagcaaacaattaacgtaatccctgcctattctcaaaatgtttgatataaattattatattttgagtggctggtgcttaataattgaaacaacaagcattatctctctataatttatagtgaacccaacaatgcttatgcaatatgacattagtataaataaatcaatgattggttctagttcaaaacttgcctaacgttaggcaaattttgacggcaacaaactacttggggaggtagggttatggaagagctgttagaaagtagcctactcaagcattacgacatcattagttttctgcttgacaaggattggatgaccattaatcgggtggctgaggaaacgcggattcctgcccggacgatccgccaaaacatcggtactattaatcaatatattgcaccggcaaaaatcgaaagtagccaacggtatggaattcgattgacttatgactcagcacacaatcccttatatatctattcagctatttatcgtcagtccacgcgttttctgatattagagcaaatttttctacaacactttttatcgatcgctcaattttctgaagcactttatattagtgaatcaacattaaagcgccatatccaagttttgaaccagattctaccgcactatggctttcatattgacacgcaatctctggacattattggcgacgaaaagaagatccactttttttattacacctattttctagaaaggtattggtttatcgatgattttctgccacaggatgaattaaaactgattgatgccatcatctcagagtttttcgcacattatccgacactgacaacccccagatatcagtctttttcctttatcaacaagttacgcgcgacgatcttcgtttgcctcaaacgcaacagtcgcgggcacacgtttgaaaatgcgaccccggcaattgaaaatgcaaccttctcgccagaactacgccaatcaattgcacgctgctataagattgactgctcctcattagttttctcgcatctgttttatctcttttttaatccgcgaaatgcttggtcttacgccgatctgctcactaaaacacatcaggatgctgaaattcgcgcgatccatcgcgcacttacgcattttcttgacatgatcgttgcaactgaacatttatcgttgccaaatcgcgaacaagttctactgcgcttgtataacgccatcgaatatacgtggggcccgccaaaaatcctgtacagtccgagcgaggctttctttgcgagcatgaatcaatttagcaagacttttattcgtcacgccagacagacactggttactgcactgagaaatgaaaaagtcaacgttcgaatcgatgatgctttcatcaccaagctgttatttactttggtgacatcatgggaaacactgccgctgcaattagagcaaaaagccccgaaagtccgaactgggctcttcttcaatacgagttttgagcatagtcactttttgctgaatgaactcaattaccatttacgttcaaacctcaaactcgagcttgttccggccagtaccttagcagagttaaaaaccgttgcccgccaatttgacctgatcattaccaatctccctttactcaatttgccaaattgccaggtggtcgccattcagcctcatcccacgccggaagacttcgataatattttggctgcttataatcggattattaatgccaaaagtctggaaagttccgtatcgtaagctcccaacgacttttcacggaaccgagcgcatacaaaaagccgtttgacaaaatcgctatgtcaaacggccttttgcttctgatcggtccgatgtcaatccgatatttatgaaatggaggagataggattcgaacctatgaacccgaaggagcggatttacagtccgccgcgtttagcctcttcgctactcctccatgcgattgatataaatcaactttaatagtgtacaaaaagaggttataaaaatcaaccattttcaggtggtttttataacctccgatacttaattttttgcttaatctgtcaaagctgcgggcacttccaatgtgactaatgtgtcgcgccattccgtcagccagtcggtactttgccattcaaaaaggcgtttaagaccatagcccagcggttgatgataataagttgtcttgcctagcagcttaggggcatcgcgaaaatgctcgtggccaaacaccacggcactggcccgatttgtcagcagatcgcctagttttgccgatcccattaacgcggtagccatctgccatgacaggcgatcaactgcgtacaccatcgcaccgagaatcggcacaaaatgcgtggcataaatgatccgtttgccgcgattggccaccaaagccgctttggtggtatcaagcacccgctgcatccgctctaagtcacttatcggtgagtcaatggcgctgtcgatccaaaacgctcgcttccactgcgcatattcagccgacgttttcgactttccaagttgcgcaagtgaataatcataccaaccgttgtttccaacgataaccgcattcgttcccgggactgacaaaaccttttcgtgtaaataaagcgggtcaacatctgactgaatttcagcataggtcgcacccttaaccatgtcgtgattaccagctaaaaagcggataatcacttgatcgccgacttcccgttgcaatgcctgatagtacgccagcgttttcgtgaaatcgttatacgtatcaccggcattaacgtagacttgatagccatgttcaacgagataggctgcttggtgtttcaacatttcgaaaccatcaacatgattaacatcaaaatggttatccacactgatcgcaacttttaccatcaccacacctccgttaatttaccggtgcgcgccagtctatcacccgcttaattaaccccttgcatcagcttttcaatgcgcggcgtgaaaaagaccagtacaatcgcaaagataactgaaaccaggccaacgacagcaaaataggcaacttcatggcttggtgtatagaaacgcacaatttgcgcattcacggcctgcgccgatgcatcagctaagaaccacatgctcatcatttgcgatgaataagctttaggtgccaatttagtcgtaactgaaagtccaaccggtgaaatcagcatttcgccaatttccaaaattgcccagctcatcaccagccacaaaggtgaaaccttagcactgctgccaaataacaggaccggaatgaccatccataagtacgacgcgccggcaaaaatcaagcccagataaaatttcttgggcgaggtcggttggcgtttaccgagtttcatccataaccaggcaaacaatggaccatataacagaatgaataacggattcaacgtctgaaaattcccaggcaggattttaaagaatccaaagtccaatttagtctgttgggcggcaaacaaagccaaaacaaccgagccttgttcctcaatcgcccaaaagatcatcgcggctaagaacagcgggatatacgcaatgacacgtgaacgctcagtcttggtcacctttttgctgcggatcatcaaaataaagtaccaaaccggcaagccgatcgcaacgatggtgatcaaactaataacgtttgcaatcgtcaaagcacctaggcttgccatcacggctaaaataaccgcgacaaccaccaacgcacccacgacgcgcatcaccagcggccgaatatcttccggctttaacgggtcaggcgccgtattgtcagccggattaatatatttacgcccatcaatgacataaaagatcaggccaataaacataccgatcgctgccaacgaaaaaccagcgtggaagttaaacttgtcagccatccacggcacaaagatcggtgcaatcaacgacccgaagttaatccccatgacgaagatactgaaaccggagtctcggcgcaaatcttcttcaggatacaaactgccaaccatttccgagacatttggtttaagtagtcccgtccctaaaacaatcagcacaatggagccaaataaccccaccgcgccaattggcaaagacaacacaatatgtccgagcatgatgaggacaccgccccaaaagacagttcgccgcgacccgagcaagcgatcgctgataaacccgccaattgtggcacttaaataaaccagtgatccataaatcgacataatcgataaggctgtgggctggtcgaatcccagaccgcctttttctaccgcatagtacatgtagtagattaagatcgcccgcataccgtaatagctgaaccgctcccagaattcggtcatcgacagcgttaatagcccgcggggatgacccataaacgtgcggttctttgaattatccaattgaaatacatcctctcgctaggaaatgatcctcctagctgctctcatgacacttccctcaaaatgccaattgataagtaatcattatagaggtattttggcatgaagacaaatgaaaccgtaaacatgactgaggcttctatgccttcatagcatttttaaacctaggctccccagcttttgacgctcaaaggagatcttcttcctcggtaaagcaaaaagcagaggtgcccactgcagacaccactgcttttttgataaacgatcaattgttaatctttatagacatcagtcagctcgtaaggcaatcgctgcatctttgtttgctgccatacgcgctggaatgtggccgccgaggacggtcaggatcgtgctgattagaatcagaatcaccgcatgcacgggattcaactgcgcaacattcggcagttcggtcatgccgtacaaaatcgcattgatcgggaacgtcagcaaccaggcaatgataatgcccagtatccctgaactgacccctagaatgatggtttcagcatcaaaaacccgggtgatatcttttcgacgcgcacctaatgccttcaagacgccgatttctttggttcgctcaagtactgacgtataggttagaatcgcaatcatgatcatcgaagttaccagtgaaatccctgcaaaagcaaccaggacaatggtaatggctgacatgatcccgcctgtcatgctcgaaatagtgccagccaagtcagtgtaaaccacctgatcggcctttttcttaccatggttgaacttgtcgagataactcaagatcttgtccttatccttgaaactagttggataaatcgtgatctgcgtaggcgtttccgatccgcccaatccggtaatcagttgatccttggtggcatcatcaatactttgattggtgaaaatattaacgtcactatttcgttgcgctttgacaactgccgaattcttattcattgccactaaatctttggtcaaccgatcagaataagcaaaaccttggctcaaaagaccatcgctcgtcttggaacgggttcgcaaaacaccggttacggtcagctcccgattaccattttgattataggcatcagcgtaatttttagttggtacatagacgctgccgcccacattttgataataatggtcattggcaatcgcctttagcttcgtcccgacaatgtcgccaaatttgattttttgaccatttttaactgagaagccaaggtttttcagcgcattgatattagtcgaattgtcccgatcaacaattaaaatgacgtcattgtcggatttcggatagctaccggcgacaacctcatagttcttcttgaggtagcttgtcttgccttcacgatctacgggataaacagatgaacttgcgctggaaaaactccgctgcgcttgattgctcgtcggtttggcagttgaaaattgaaccggcttcaccgttccgttgacattacgcaacaaattcattccggtgccatacgtataaccgatattattcgtcaatcgcttgctgatgccattcacatagtcgatatacttttgattaagtttgttggtgtgctgtgctttatcactggcactttgcttggcttccaccgttttagtcgtcttaaaggtggacgttttcgtattatcttccgcccctgctgtcaagttcacggcagtagacgaaatggtaataggaaattgcgccaacgtctctgactgcgtgttgtcgatttgcttttgaaaacccgaagaaagggccaggaccactgctatcccgataatcccgatacttgatgcgaatgccgtcagaaaagtacgacccttcttcgtcatgatattggtaaaagataacttcagagccgtcagatagctcattttagtgcggcgtaaatcaaagtgtccggtttgctcctcaacatcatatggctttgaatcagatagaattttaccgtctttaaattcaataatccgttgggcataatcatgcgccagctgcggattgtgggtgaccataacgactaaacgttcccgcgacaaatcggcaatcaactgcatgatttcctgactggtttcggtatccaacgcgccagtcggttcatcggccaacaagattgacggttccgaaacaatcgcccgcgcaatcgcaacccgctgcatttgcccaccggacagttggttgggttgtttccccatgtgttctttcaaaccaaccttaaccagcgctgcctcagcctttttgcgccgctcactggcagaaaccccgctcaacgtgagtcccaactcaacattttccaaaatactaaggtgcatgattaagttatagctctgaaaaatgaagccaaccgagttgttacgataagcatcccaatcagattctttgaagtttttagttgaccggccatgtaacaataagtcgcctgaatcataacgatcaaggccaccgatcacgttcagtagcgttgttttaccggagccgctgggaccaaggatggccacaaactcctgctcccgaaactgcaccgaaacatcatcaagtgctttcgtggtgtaatcaccggtttggtaatatttttttatatgctttagctctagcaaagaccattctcctctacaacaagtgacaacgcgccgaaatgaaataacttgccatatcttagcatacttacccagcacttgataatcggtctaaagcccaaaatgaaaatcagtcccgacttggcaaccattttggcgaaaaaaagaccgaatcatcacacaataccttgccgattcggtcaattcagtcacgccatccgtctggttcaggattggactttcatcagcggctgccaatagattaagtccaagctatgatccggatagatgtaataactgatatttaattttgaaaaaggatttgccattgccattaagtaaatgggttgcggtgcatgcgccaatccagcaactgaaacaagaatgtacttggccatctgctcaaataggggttgggtcaacccggttgttagctcaaaatccaagtcaacgtaaatcagctcttttgtttgtcgcgtgaggctgatccgatgaatgggtaatccgccaaagttaccgtcttgattgagttcatcgaccattcgtttaatttcctgatgcttaaactgcggccgtgcaaacatcatgcgccaaattgccaagtcgtcacccccttgcctcaattatgccacattgacgcaagaacgcggactaaaagatcggatcaagaatcttggaaaaagccgaatcgatttgagcccgagctgcttgctgttccgctaatccggccgcaaatcgttcatgatctacctgatccgtgtcgatcgcctgcaacatattcaaaacgccgctgcgaataccgcaaagaccacttaccagtaccttatgaaaggcagcatagttgcatggtgctgactcggcattgacactatctacgaaattacagaacttaatgacatttttggtgaaataaagtcgcaagcggtcgagactttcgcttgcatagcaatttcctttctcgatgttcttgcatgtgtggacgtactctttaaaaacagtctcaaacacgagaaggcgttccagattttgattaattacttcaacataactaggttcattgcttactgcatacatttaaaagtccctcctaatcttgtgagttcatcaacttacagacttaattatacttgttaatggcttataatcaatataattatatgctaatatttaaatacctaacgttatataaccgctacaaaggccattattattgggatttgcagacatgacaccagtctgtgaaaaccgttttccctgacattgcacgcaatgtatctatttgtgaaaacttgttttatctatgccttatcaccctgtcttgacagggtgatttcttgaaggcagccatttagtatctacttgcattaaaaataagataacgaaaatattttttggatattttgcatttatattttaatattttccaacaaccgtgcaaatcccagccataaagattctaattgcagggtcggttataaaacgaagatgtttacaattcgaggcagttaatagcatgttttaaaaacatcacctataatcgagtcaagaagcctgcaagttaaaaatcttatggtcaaaactcaaaaatcgagttgcgaaaacctttttaatttgtcaccgcacttatttgattcttgggaggattttacattgaagggttatccaaagaattaccccttagattcacggactttcttcggcgttaatgccatggggttgatcagcacaaccgcgtattatctttatactgctgttttgatgatgtttattaccgattactccgggatttacaccaacgtccctggcaaagcagcggcagtcgccaccacgctattattcgtcggacggctctgggatgccatcaatgacctttggactggctatttgattgacatttcaccccgaactcgttgggggaaatttaaaccgtatgttctgattggcaccttttttaccggcattttgggaatgatgttgtttcacattccccaaaacttaagtgatttcggcaaagaagtctacctctacatcacctatttcttatttatgttttcagcaaccattatcgtcacggttccgctgaccagcaccatgtccgctgatcaggaaattcgggctaaattaatttcctggccacgaattaccagcaatgttgtcggtgtggtcttcgcgttttttatggcgattgccagcttcttgggaactaaaaaaagtccaaatattccattgaccgtagatttgatcatcattccatttttaatcatctcgttaattggcggcttcatggtcaaagaagggcctgttgcggaaggaaccaagccgccaaagttacgtgatgtcggccggatggtaaaaatcaataagccatttcgcgtcaatctctatttcacttttgttggcggctttgtctgggcgttactgacggcaacatcgctttactacattaagtacgcattcggcgttgccaacttaggtattcagtccatgtacttcgggctcctgaccttagtcaccctaatcggcggtacgttaatttcccaaaaagccatgaaatatatgtcagcacttcgaggcgttcaaatctgctatttgggaatggttccgtttctgctaatcatgtttgcgatcaacgaatttcaggtcattcataatccttggcttttctatcttcttatcggaattgtcatgaccctagccggcgcccaatttgtgccagctaacctcatcatcatggaaaccatggattataatcgacttaaactcaattcgggaatggaagcaacgatcaatgcggttaacatgtttctccaaaagctgcagtcgggtttggcaacaattggcgttggattagccttattgttagttggctataatgcgcaaatactggaaaaagccacccgcattcccgacagtttgcttaaaagcctgggggtggttttattcggtttacctgcagtcttttcgcttgtagcttatcttttaacgaagcaatacccattgcaaggtgaggcacggacccagatgtatgcggaattggccgccaaaactgcagctgcaagtcagaaaaataagcgggtctaattgttagttacttgaattgagcatgctattacacgctcacattaacgcgttcgccagcgcagaaacctgcgtgtaaggaccttgggcgcaatggccaaagcccggccatcacgtccaaggccgcttacactccgttttctcccgcgctggctcacgctcacatcataacgcgctccccggcgcagaagtcggctcgcgctcactggaggtatagtttatggttaaaccatcacctgtcaacattcaccgcgacgatccccctgcttggtttaaacaagcagatttcggcattatgattcactgggggctttatagtgtcccggcttttgcaccgaccaatgtgccggattatgatactttcatcaaaagtaagccgctgaagttcttttttgctaatcaaccgtatgcggaatggtatgccaacagtatcttgtttcctgacagccccgctgcccgttaccatcgtgaacattatggcaatgcgccttactcggactttgccaaaacgtttaagcaaagtgcccagcaagtcgatgttgatgcctgggcggatgcctttgccaatgccggcgcgaagtatgtggtcattgtgacaaagcatcatgacggatttgtgctgtatgacaccgacgtagcgaatccgtatcaacctgattatcaccttgactttgatttcgttggccaattagcacaggcagttcgcgcccgcggcatgcatttcggtacttattattcttcattgttagactggaccttcccgcacgtgcccatcgctgattacggttcactgatgttaggaaatgaccgatcaaaaatttataaccagtacgcacgggcgcactggcatgaactgattgaccgctatcactcggatattttgtggagtgacatcggctatcctgacgatccgggtttgcctgatttattcaggtattactacgatcaggttcctgacggcttagtcaatgaccgctggcgccaatttcccaactggctgcgcaataagccagggcgggcggtttttaatatcgccgcaaagtacgtcatgaaccaagaacgcaaacatcccggtgatgtcggcgagctcaaatattacgattatcggacactggaatataacagtgactggaaggaaaataagcgctacttcgaaatgactcgcggtatggataaaagttttggctacaaccaattcagccaatctaaagactacatcacaaccgccgcagtcaaaaagctgatcgcaacactccatcctaaacgtggccgcttactacttaacgtcggccccgatcgctatggcaacattccaccgtaccagatgaaaatactgcagcaacttagcgatcgttaacgctccaatccaaaacggattaaaccgagctatgttcagtcatcaccacaacaaaaaacgctaggaacatcggccacagtcagacgatgcgattcctagcgttttttaattcagattattgaaccagcccttcagcagtgtgcgcttgatcatggcgttaaaaccagttaactcagctgattaatcgccgcccagcttgccaatgcttctggatgaaagccgctccaagtagccagcacatccccggtctcatcgtcacgcacacggacaaccggaaaccgatcataaccatccgctcgaaacttaacgactttctgggcactccaagcacgtttcaacggatcttccgcactcgtatccaccaagttcgattcaccgcgctgattcgtagtgcgaaaatgctgatgatgagccagcaaccagcgtttcgtcaagcggcacgattcgcactggggcttttcatataccacaaagtgaatagccatacgcatttcctcccttactcatgcttatcctcgatctgggtctaaagcgcatgtctcattttgtttctactatcccttattccgcctatttttgcaatgtcaactcatcaaattcagtgcgcacatggctgtttggaaaccaaccgtaccagcattttcaagaatggcaagcaggttccccttgatacgccgttcgttgctcctgggcgagccacttttataggcatctgattatgatcattcaactaaggcagccgcgactttttccaaagcctgagttgccgcaagcggtaagcgatcatacccgtcagcgacggttgctttatcggctaaaaacgtcaagcgatcatccaatcgttgccgtaataaggcccgataagccgaattgctaaagtccaccgcaaaattcggcaggctcaaatagcgcatggcaggcaatgggccaaatggtttaaacgccgccgtcccatccacaatcgcagcaatcgcatccaatgtatcgcttggtttgactttttgtccctgaaaaaaaccggtattaagaatgtaacaagccgtgccgcgttgctggaacaaatcatagaaatcctgataatcctctcccagcggataactacgaaaaggattggcaaacggttcaatgaccaactgttcccgatcgacatcggcacgcacattttcggctgtggagcgtttagtggccaaagttgccccaaaggctgcggctaagcttggatcctccactttgacaaccggtggtaaagcatcgtctttcatgatccagaaaatagcgtcaacgctctccaccaaatgatccacccgattaggcgtcacataacgcgatttaacggtccgaccattcccgttacgaatatcttgggtcaccaacgtcttcttaccgtgatcatccagcgtaacgccaacattttgaaccgttagaaaataacgcgtattcgggtcgctcattggataatcctgggttttatcaaaatatgccggttcaagcgcggtggtcgcaccggtctgccgatcaatgacaaacgcatcatcgtgtaacaccttaaccggataccggtcaccatgactggtcagggtgatggtggacttgccggagcctgacaagccaaacgctgccatcgtgaaggtaccatcttgtcgctgatactgcttcatcccgccatgacaggcaacaaaaccgtttcgatgcgcggttgcccaagccagtgtcagcgttcccttcttcaattcgccaaaataccgcaagcctaaaataatggcggcattatgcaacggatcaaaaattgccaagccgtccggataatccggatgatgccagtcaggatcagcataaagataaagatcatcttccggaagcggccgcgactgctcatattgctgcgttgcttcaggcgttttaatctgaaagttcagcaaataagtgtaaaggttgttggcgtaggtttccggcaccatcaaatgcgcctcaactgcgaaatcagccgacaagccaacaaccacatgtccactcaaaaatgatttgcgtgtacctgcaaagaccgcctcgcgtgcaattttcgtcagctcagcagtatcaaccccgggctggccgatgatacgacgtgcggctgccgtgcgccccaccacctgtccgtcatttgcaaccagaacgcgggcatcttcaggcaatccaagctcactggcatgttgaaccggcaaatcggttacgatgacaccaggtgcttttttagccaatgcataggctgccgcaatcgtcgtcaccgcctgaacattgttaccataaaaagctgtttcgaccgttgccttgagcgcggaaaaatagccgcttgttgctgtcacatcactgactggaaacttctgcttactcgtcatggttgcatccccctaaccgctcggattctcctcaaaattcaccaaaagaaaacccgaacttcatccatttgaaaaggctttcacaacctgattatacagacttgtcgtaaacaacgcgaattttaaaatagccgctgcagctaaaaattaagccgtaagcatcacccaacaaccgttacgggtagggttggataaatcccgtcgcctaagctttacgctgcttgttggcctgcatcactttagcatgatcaattaaaggacagccaatatcttcacactggctgcagccgcccgctctatttttacggaaaaaggtccggtacaaaaccactgcaatcgtcaacacaactaagctaccaattatccatgttgccatgttcaagactcctcgtatatttaaattacaaccaagttttctatcatgactggttcaatagctcgcagccattgccggtactgggcgcttgagccacaaaccgtaaatgatgagtcctgctgcaagccctactaatacgatgctcaacccacctgcttggccagtgaaaatcaggctgctttgataaaccaacatggtcaacaagtacgccaccccggtttgatagccaacagcccgccatgtccaccgcgcatcgccaaattctttatacatcgttccaatagccgcaaaacatggcgcgcacaacaggttaaacatcaaaaatgcataccctgccatcgctggataagtcgcgcgtaacgtctgggcaaagctcccggaaccactagcaccaaaactaatgtgcaaggttccgacgcaattttcttttgcaatcaagccggctaatgtagcgaccgttgcatgccaatcaccaaaacccaatggcgcaaacagcggtgccaatatgccgccgattgcacgtagcatactgtgattttccggaaccatctgcaaagtgaaattaaagttcgacaaaaaccacaacaaaacacatgacagaaaaataatcgttccagccttatgcacaaatgcccgtgcgcgcgacatcacactgcgataaaggttggtcagccggggcaaatgatacgctggtaactccatcacaaatggtgcaggcggtccagcaaacaaggcggttttcttcaagaagatgccggaacaaacaaccgcgacaatccccataaagtacgctgacggcgccacccagctattgttggggaaaaatgtgccgctcaccaatgcgatcacggttaattttgccgaacatggcataaacgtggtcaacatgatactcatgcgtcgatccttttcactttcaatagttctggtcgccataattcccggaacgccgcagccagtcgcaatcaggatcggaataaaactctttccgcttaaattgaaacgtcggaacaaccgatccatcacaaaagcaatgcgcgccatatagccacagtcttcaaggatgcccagacacaaaaacaacatgataatctgaggaagaaaacctaaaaccgacccaatgccaccgattaaaccatccacgattaaaccggataaccatggtgcaactgcccagcttttcaacgtcccgccgaccacactcggaagccagctgccaaacaccgtatcattcagataatcgctgcctatggttccaatcgtctgaattgaaagataataaaccgcccacatgacgacaacaaagatcggtaaagccagatagcgattcgtcacaatccgatcaatccgatcactcatcgacatcacaaaatcatcttgatcgaccacacatggcaatcacccgcgcaatgaagtcatatcgtgcgttgacaatgatgctgtcactggcgtcttcaaaaatatgctccgccgtatgtaaaatctccgtgacctgtttttgctctgcaggtgaaaaagccaatttttccatgacttgcggatcgttttcaaaaatcttgattgcataccaccgcacccgttcttggggaacacgatcgccaataacttctgccagcatcgtcaaggctgattcgagtcgcggatcatactcgggaaaagtatacggcttcggtagcggtgcttggatggtctgaaccagttcctgcaatgcggcagttttagttgcattcgtgccaataacgggtacttggagtgcataacttaattttttcaaattaatgctgcgatggccgtttttttccagcacatccatcatgttcagcgccacaatcaacggccgaccagtctccatcacttgcaacgttaaatacaggttacgttcaagattggtggcatcaacgacatttatcaccagatccggttgattgtcgagcaaaaaatcgcgggtcacaatttcttcgctgctgtatggcgacaaagaatacgtacctggtaagtcctctagcaccaaggcatgattggcttttagccggcctgatttgcgttcgacggttactccgggccaattaccaatatgctgtttagaaccggtcagcgcattaaacaaagttgttttaccactgttaggatttcctacgagtgctaaagtttcatgcatgtccatcggcacccacctccgttacgaacacatgagctgcatcttgcttgcgaatactcagcttataaccgcgaaccgcaagctcaatcggatcacctaaaggcgcaatttggtgaatcttaaccagtgttccctttgtcaatcccatatccatcaagcgatgacgcaacgggggatcacccttaatcgtgcgaatcaggcccacttgattcaaagctaactcccccaacgcaacagcaggctgatggtcatccatggcaaacggctgcaccacgagtaaaccggcaatctcatcactaatcgccaatcgctgtccttggaaaaaaataaccaacccggtagctttatttgccggctgcaccaccgtcagcttcttaccaatcacaagtcccatttcagcaagatggcgccgcaaagcagcacttcccccgacactcatcaatagataagcaccaggctgattaatatcgagcaaagcctgcatataaaccacctccaaaaatgagtgagcgcgacccagcgcggttagggatcggaatgtaagcggccgcctttgaccattgcgtgcgaggccttccacgcaaactcctgcgtccggaaacctgttccacctgttccagaatcaaacgaccatcaacaaacctcatcgtcatacaaagccaacattttcgccaaccgaactcgtttatatccttactttgacttcgctaaaaccgctttagcaactgtcgcaacgtaatgcagctgcccctcagttgtcggatgggttttatccgctgtaagccaattatcgtgttccgccgaagcagcataccaatcgacaatatgtaaattcgaataacgttttgccattttcacaagatcacgattaacttcatttgtccactcggcatcagaacgaacattgatccaatacacctgtcgcttactgccaatactggtcataatcgactgaaaagcttcatctgtaaaggttccattcgtccccaacccaataataaccgtatcggctaatctaccagacgccgcgagtgacttaaaaagctctggcgcctgataaatttgacgactaaccgttgcatccagatcaaccttggggaagatttctttatacagataagcgctacccagcatcactgaatccccgactgctgtgatcggcatctttttagcgacttgaacctgatgataactaagcccttcatcagcaaaatctttataaaccgggtcttctgcctttcgggatgacgcctcggcttgactggctttggcagccgagcgtgaacgcgcaaccgaacgcgctttaacccgcgatgatgaggctgcctgctgcgcccttgcttgagcctgctggttaagtccaaaccagatacctccagcgatcaagaccacagctagtaagacaaccggccaaagccacccttttgttaaatgcgttctttgtctatgcatctcgcaccccttcgatcattttgttaccgtttgatcatagcatatataagcgcctaacagggtcgaaaattgtatcgaaaaaaggacttttagactctggcacttttagaattcggctacatttaacgtctcaaatagaagcagctatctacgatttttttggcacgttttaccttaagaactgatatactaaaaagcaactagctggttaacagttagcactcttttttaaaaatggagatgaccagcgtgacaaaaacactatatttgattggcggacctatgggagccggtaagacagccgttagcgaacaactggttaagcggttgcctcaagcggtgatgctagacggtgactggtgttgggcaatggatccatttgtggtgaatgatgcgaccaaagcgatggtaatggataatatccaccatttactgaacgcgtttattcaagcaccggacttgattaatattgtgttttgctgggtaatggacgaacaagaaatcattgatgatgttttgggtggtttaatgctgaaaaatgttcaagtggtaaatgtatcgctgatgcccagtgcagagaaattaaagcgaaatattactgctgatattcacgctggcattcgaacggcggatgctattccgaaggccattgcgcgattgccaaagtatacaaccgtcaatagcactaagttggatacaacggctcttgtccccgcccaaactgcggcaatgatcagcaaactatcccattaagctgattcctgctgtagtgatcgccgaatgtaaggtcaaactgatttatagccttgtacaaaacttttgtggcattttagaatcttttctaaattcacaaacgtctctgtagaatctaaaaaatctaaaataattttgtcgcacaaaaagtctttacagcgcaatactgctcctgtataatcttacttgttgttcagcgatggcccgttggtcaagtggttaagacaccgccctttcacggcggtaacatgggttcaaatcccgtacgggtcattatgccggcttagctcagttggtagagcatcggtatcgtaaaccgagggtcaggtgttcgagtcacctagccggcatcatacaacttaaatcgcagatgcactggtaaaaccagtacgtctgcgatttttttaatcaagttctggtccggaaaaccatcatttttgcgccaatggccgtttagttttcaaaaaggccactattaagggcttacaaggtggtatgagtcatcaccaatttcacaaaaacaaatcactctgaatgtggattagttctatatgttgatgtcaattgtccttaccgttgtattgttaactttctagtatttaaacaaatttgcggaaaaagatgactaactttagacttgtttaattgtctatctacttttagtaagtgtatcataaacattgaaacgactcgccacgaaaggatgttgtgatacatgaaaattgcgattattggtgctaccggcaatgcggggtcggctatttttaaagaagccttgaaacgcggccatcaggtgactggctatgttcgccacccagacaagggagttggcattttaccaccagacgcggaattaatacagcaagacgcgtttacacttacgcacaacgaattacaaaattatgatgttgtcgtcgatgcttttggcaccaccgtggaccaagcctatctgcacatcgacttagccgaccacctgattcatgaactgcgcgagactacttccccacgcatcgtttttattctcggtgctggcagcctagaaactgacggaggacgtctctatgacttgttaaagaaagacccccacgctccttccttcatcaacacgcccaagaatcagctcagagaatatcagttgttgcaatggactgacaacgttaactggcttggtatttcaccaagtatgatttttcaacatggtccggcaaccgaatacgtgcgcggcgacaatacccttttaaaagacagtcagggaaagtcggtattaaatagcggcacattagcagtagcactgctggatgaattagagcagccaacgattaagcaagcacgctttactgcccgcaatgcttgataagtgattttcaagttcaaaaaggatgaggatcaattgatacaagtcagactaactgttcattatgttgatgaaaacggtaaagcactaggtccggataatcacttaatgaactcgagagaccatcattttcgcctaaccgcaccgccattgattggctatgattttcaaaaagcaatccttcctaatggacaacatgttaaggatccgactgtggctggcaccatgagcggcgaaaccccggagcttacctttgtctatacaactgccgactcgctcatccaccaacctaagccagccacacttgtgattaaataccttgatagtcaccaaaaaccgcttcgtgatgtgcaagttctacacaccaaaaccggtcatcaattcaagcttaccgcaccgaacttttcagggtttcattatcaccacgcattgcttcccgggggcatggtgatgtccgataaaactgtcacaggacgattaatccgatcacataacgagctgatttttacgtaccagccaacctaaggcaacaattccaataaaatagcttcgatctgactgttaatctgtcatgatcgaagctattttatgttattgctggcccgttaagatactctgcaatgaactcgtatcaccttgttgttgcaatgacttggcatcttgataggcctgataataatcaccagaagcaattgcctggcgaatcggtgtcaccgactgttctttaaagagaacagttgcagctaactttgcttgatcctgattaacacccgtcgccttttgcagcaatgtagctgcctggtcctgatcctgcgcagctttcataatcgtactcattttcgtttcttttatcgtatcagctgctcgctgtaaaacagcatctgttgccgggttgccggttttttgagcagtaatacctgacacaatccgtgctttaactgcactgtcagctggtgtgtcgttaccagtgacattgcgaatcgtgttattaatctgcggaaagaaaaagatcccgcacacagccattagtacaataagacccgcgacaatcgaaaaaattttcaagccacgatgacgatgctttttctgctgacgtatttgcaatcgtttatccaaaaatgacactcccttcacttacaaggactcatattaacatgatgccaattcacacagaggcggtcaagctagtgaactttagtagccactcgttgttaaatttcccgactcggaatcataggttaatacaagccaaagttacgagaccatttacccttctgaaaataatatagaaaaaaggcatccactcattgatggatgcctttatgagctccggttgtcaggctcgaactgacgacaacctgattaacagtcaggtgctctaccaactgagctaaaccggaataaacagcgtggcagcttcctaccctcgcaggcagtttcccaccaactactctcggcgtgaagaagcttaacttctgtgttcggcatgggaacaggtgtatccttcttgctatcgccaccacacttatgagaactttgcgctctcaaaactggctatcattgttgttgtttttgccggaacttaacgtatttcatcgaaacgcgctcccggtcgcagaaacctccgcataaggaccctgaccgcaatggccaaagaacggccatcacgctcaggcccgcttatgctccggtttctaatcgcgactgctcgcgctcttacttggttaagtcctcgaccgattagtactggtccgctccatgcatcgctgcacttccacttccagcctatctacctgatcatctttcaggggtcttacttccatataggaatgggaaatctcatctcgaggggggcttcacacttagatgctttcagcgtttatcccttccgttcatagctacccagcgatgcgcctagcggcacaactggtacaccagcggaacgtccatcccggtcctctcgtactaaggacagctcctctcaaatttcctgcgcccgcgacggatagggaccgaactgtctcacgacgttctgaacccagctcgcgtaccgctttaatgggcgaacagcccaacccttgggaccgactacagccccaggatgcgatgagccgacatcgaggtgccaaacctccccgtcgatgtggactcttgggggagataagcctgttatccccagggtagcttttatccgttgagcgatggcccttccatacggaaccaccggatcactaagcccgactttcgtccctgctcgacttgtcagtctcgcagtcaagctcccttctacctttacactctgcgaatgatttccaaccattctgagggaacctttgggcgcctccgttacattttaggaggcgaccgccccagtcaaactgcctacctgacactgtctcccgccacgattagtggcgcgggttagagtgttcatacagctagggtagtatcccaccaatgcctccatcgaaactagcgttccgatctctacggctcctacctatcctgtacaagcggtaccaacactcaatatcaagctacagtaaagctccatggggtctttccgtcctgtcgcgggtaacccgcatcttcacgggtactataatttcaccgagtctctcgttgagacagtgcccaaatcattacgcctttcgtgcgggtcggaacttacccgacaaggaatttcgctaccttaggaccgttatagttacggccgccgtttactggggcttcaattctgggcttcgcttgcgctaactcatcctcttaaccttccagcaccgggcaggcgtcagcccctatacatcatcttacgatttagcagagacctgtgtttttgataaacagttgtttgggcctattcactgcggctgaccttgcggtcagcaccccttcttccgaagttacggggtcattttgccgagttccttaacgagagttcgctcgctcacctgaggatactctcctcgactacctgtgtcggtttgcggtacgggtagtttatttctcactagaagcttttcttggcagtgtgacatcaggaacttcgctactttaatttcgctccccatcacagcttgtccttaaggcggcaagcatttcactcgctaccggacttactgcttggacgcacttttccagccgtgcgctttccttagcctcctgcgtccctccatcgcttaaacaaaataaactagtgcaggaatctcaacctgcttgtcatcgactacgccttgcggcctcgccttagatcccgactaaccctgggaggacgagccttccccaggaaaccttagtcatacggtggatcagattctcactgatctttcgctactcatgccggcattctcacttctaagcgctccagccgtcctcacgatcgaccttcaacgcccttagaacgctctcctaccgcgcaccctgacgggtgcacccacagtttcggtattatgcttagccccggtatattttcggcgcagtgccactcgactagtgagctattacgcactctttaaatggtggctgcttctgagccaacatcctagttgtctgtgcaacgccacatccttttccacttagcataaatttagggaccttaactggtgatctgggctgttcccctttcgacaatggaccttatcgctcattgtctgactcccggagtaagatcaatggtattcggagtttatctgaattcagtaacccttgacgggcccctagttcaaacagtgctctacctccatgatccatcctccgaggctaaccctaaagctatttcggagagaaccagctatctccaagttcgtttggaatttcaccgctacccacaactcatcccagcatttttcaacatacatgggttcggtcctccagtgtgtttcaccacaccttcaacctggtcatgggtaggtcacttggtttcgggtctacatctacctactgaagcgccctgttcagactcgctttcgctccggctccgacttttcatcttaacctcgcaggcaaacgtaactcgccggttcattctacaaaaggcacgccattacccgttaacgggctttgactaattgtaggcacacggtttcaggaactgtttcactccccttccggggtgcttttcacctttccctcacggtactggttcactatcggtcactagggagtatttagccttgggagatggtcctcccggattccgacggaatttcacgtgttccgccgtactcaggatcctggacggagagtccgccgtttcgtttacagggctttcaccttctatggcgcagctttccagctgacttcgactacgtcgaactttggtaactccaatgtccagtcctacaaccccgagaagcaagcttctcggtttggactcttcccacttcgctcgccgctactatgggaatcgagttttctttctcttcctgcgggtactgagatgtttcagttccccgcgtctgccgccaacaagctatgtattcacttgcaggcaatacactgatgtgtactgggttcccccattcggaaatctccggatcaaagcttacttatagctccccgaagcatatcggtattagttccgtccttcatcggctcctagtgccaaggcatccaccgtgcgccctttgtaacttaacctgtactgacttacgtcagcggttatgcgatgcgaatttctattattagaaactcatacaaatacgctgtgttctcggcaatttaaaacatttacaacaatgatatccagttttcaaagaacaaagaatcgccaactaacgtcaacgatcggcctgacggccaatggaggataacgggatcgaaccgatgacctcctgcttgcaaagcaggcgctctcccagctgagctaatcccccataagggttgtttaattaacaagcgaacgcttgatgggcctagatggacttgaaccatcgacctcacgcttatcaagcgtgcgctctaaccaactgagctataggcccgataggcgtgtagaaagggtaatcccctcaaaactaaacaaagtttcgtgtgtgcaggtttccgtcagactttcagtctgtttccttagaaaggaggtgatccagccgcaggttctcctacggctaccttgttacgacttcaccctaatcatttgtcccaccttagacggctcgctccctaaaagggttacgccaccggcttcgggtgttacaaactctcatggtgtgacgggcggtgtgtacaaggcccgggaacgtattcaccgcggcgtgctgatccgcgattactagcgattccgacttcgtgtaggcgagttgcagcctacagtccgaactgagaatggctttaagagattagcttgacctcgcggtctcgcaactcgttgtaccatccattgtagcacgtgtgtagcccaggtcataaggggcatgatgatttgacgtcatccccaccttcctccggtttgtcaccggcagtcttactagagtgcccaactaaatgctggcaactagtcataagggttgcgctcgttgcgggacttaacccaacatctcacgacacgagctgacgacaaccatgcaccacctgtcattttgcccccgaaggggaaacctgatctctcaggtgatcaaaagatgtcaagacctggtaaggttcttcgcgttgcttcgaattaaaccacatgctccaccgcttgtgcgggcccccgtcaattcctttgagtttcaaccttgcggtcgtactccccaggcggaatgcttaatgcgttagctgcggcactgaagggcggaaaccctccaacacctagcattcatcgtttacggcatggactaccagggtatctaatcctgttcgctacccatgctttcgagcctcagcgtcagttacagaccagacagccgccttcgccactggtgttcttccatatatctacgcatttcaccgctacacatggagttccactgtcctcttctgtactcaagtttcccagtttccgatgcacttcctcggttaagccgagggctttcacatcagacttaaaaaaccgcctgcgctcgctttacgcccaataaatccggataacgcttgccacctacgtattaccgcggctgctggcacgtagttagccgtggctttctggttggataccgtcacgccgacaacagttactctgccgaccattcttctccaacaacagagttttacgacccgaaagccttcttcactcacgcggcgttgctccatcagacttgcgtccattgtggaagattccctactgctgcctcccgtaggagtttgggccgtgtctcagtcccaatgtggccgatcaacctctcagttcggctacgtatcattgccttggtgagccgttacctcaccaactagctaatacgccgcgggtccatccaaaagcgatagcttacgccatctttcagccaagaaccatgcggttcttggatttatgcggtattagcatctgtttccaaatgttatcccccacttaagggcaggttacccacgtgttactcacccgtccgccactcgttcaaaattaaatcaagatgcaagcacctttcaataatcagaactcgttcgacttgcatgtattaggcacgccgccagcgttcatcctgagccaggatcaaactctcatataaatatgagctgttcgaatagctcgatttgttgttctagcgaattgacttcgcaaatgttactttttgcctcgataccgaagtatcaaggaccctgcacatttaaacgaaactttgttcagttttcaaaggactaccttgtcaaaaaacaacttttatagattatcatgatcaccaatgcatgtcaacatcttttttgaataaacatgcagttgatgaatgcgataagcaattaacaatttgacaacgaagaatatgatagcaactttgccaagccgcgtcaacactttttaaatgaggttttaataagaatttctaagccgaacgttcaaagaaaaatgcagcgaattattaacaattcgctgcataaagatgcactttttgctattaatcttcctgcttgattgcagtttggccgtgcatgtagggaaccagaacgtcaggaatcttaaccgttccatcggcttgctgataattttcaagaatggcagcgacggtccgtcccactgcaaggcctgagccgttgagtgtatgaacaaattgcagcttgccatcatcatcgcgataacggatttgtgctcgacgtgcctggaaatccgtgcaattactgcaactcgaaatttcacgatagcgatcctgtgccgggaaccacacttcaagatcgtttgttttagcactcgtaaagctggcatcgttgctggctaaggtgatgacgtgatacggaaggcccaacttgcgtaacaggtcctctgcatcgtgaatcaagttttttaattctttccaggaatcttcgggtttgcaaaacttgaccatttcgaccttgttaaattgatgcatccggattaatccacgagtatcccggcctgcgcttcctgcttcggaacgaaaggctggtgtcagtgcggtgaagttaaccggcaatttggcagcatccataatatccccgcgataataattgaccagcggcacttctgcggttggaatcatggttaatggctccccatcgtttgtgatggtgtacgttgcatcagtaaacttaggaaattgacccgtgccaaacattgaatcgttgttaaccaaatatggtggaataatttcttcatagccttctttttggtgttcatccaagaagaagttataaacggctcgctctagtcgcgcacctgcacctttatagtagacaaagcggctacctgatactttggccgcccgttcaaagtccaaaatacctagtttctcgccgatatcccagtgatgtttcggttgaaaatcgaaatgagaaatgttgccccatttatattcttcacgcgagtcgtcttcatttagtgacatcgggacatcatcagccggaaagttaggtaaccgaaccagaatataggtgactttttcattcagttctgctaattctttatctaactggctgattttttgaccaacttcacgcatagccgcgatttgctcgtcagcgttttctttgttccgtttcatcaccgcgatctggccggaaacttcattacgctttgcctttaactcctcggtttgaactgttaccttacgtcgtttctcatcaagggcgattaattcatcgatttcctcacccttgatcgcgcgagcagccaacttcttttttgcccactccggcttttgccgaatcaacttgagatctaacatattatcctccttcaaaagtatcaggcagttcacaaaaggccgactttcccagtgcttgccatcgctagggtgcgcctctttggccaactttggactgctatacttatttctaatcgaaaacccgtctgagtgctcagtgcacacaaaaagcccttcatctctaatgggacgaaaggctttttccgcggtaccacccaagtttggcgcataacgccaccctcttgaggctgataacggttgtcaccgtgcagttcatcactgcccactaaggcgctggaatgaggatgatatgtcagcttgcaccacccgctaactctctaaaacatccattaggcgcttcagacgtgtttactatacgttgttagattaccgcatctttcgtgtttagacaagcatcgagagcagttttcattaaaagaattagcaaaacgatgcgtcattttcaatagataaatcgcgcatctttgagggttttcccgtcccatagttcccgcaaaaggctataaagatgcccataatgatcgttcgtgacattgatgtgccatgggaagatctgggtttgtcctgctgcatccttaatggcaccaaccgaagtcgtaataatcaggtcaacatctttaaggtcggcatccggtgaagccaactcaacaaacggcacagcatgtaaaaaagccaataaatcaatgtatcccgtcaccgtttgttcaatgaccggcgcaaccaatactttttgttggggctgaaattgaaccagtagttgatgcagattgcgataaaacgcttctgccaaaacatcgcggcagccaacaaatgatgtcagctgctgactatcaatcacctcattgagggttactttaacctgctgataaaagtccgggtcatctttggtttgctgcatattggcactaaactccgccaacaagctggtcgtgaagtctttgttgaacgctaacacgctgacggtcacgcttagcatattggcaaataacaaattataagtatcatccggcaaatggatatcaagcttaaagttatacggaaaacgcgtaaagaaaccgttaataagttgatagatttccggattatagtcattgtagcgggcaatgattcgttgttctacctgaccatccgtaataatatacagcggggcaaaattaaaaaggaaatacaaggcatcactttcactttgttgctgctgcgttgtcaggtgctgcaaccgcttcgacttatccagcaggctcaaagcagcatcactaaagagattcgggacaggatattgcaaaacttttgaaccggcttcatgtgacaaaacatggccgcttaaaatacgctggtgagccaccgcaatataatacatcaacaattctcgcgtaatcttgttgaccttgccactgtcaaacacaaccaacaaatcatctaaaatttcgcctgcacggtcatgggataagttttcaaatggccaagcgacaccgttcgttgccaaccagtaagcaatggtgatgaacaatctgacattcaattcggctcccacgaaggaaagtgtctcgtaagaaaattggacgccactttgccgggcgtaaccgcgaatgactttcaaatgtcttaacacggtcgctttagaactgtcacaggctcttaaaaagtcatcaaagtcttcatatcgctgatacaaaaccgcatccaaaaaatgatacggatttgactgtttaaccaaataatagcgaaactcatcaaccggtattcccagcaatgttttgaccgacgcatgttcgcggccaatcattgcttccagcgaatgcatcaggccattatacgtgttatagacgctgccataattacgattggtaattgccgcaacttgtttaaggttaacttcactaaccaatagccggtgatcccgatacgctttcacccgctttttaaccggtgtctgggcttctctgacgtcaataatggtccgaaacaaactcagcttttcagcatcggacattgataagaaaatgtcatgattgtctttcataaaatctccttcgcgtagacttctgtgttgggtaatccattcatttggaaacgcgtggtataaagacttgaagtagcagcccatgagtcctcgtcttcttagaccagcacgcgtgatactacgcctgtaagtctgaatcaggcgtaaatttaataggaatttctagatatctcgattatacttcactgaagacgcataatcagcttcttacccctgtctggcttattgctataccaacttgtgaatctgccggtcatttgattcacttacttaaggttacgaaagctcaatcattcacgagagtcgcatcgcttttgtcattctttggtataattagaggtgaaggggttttaattgctacagattggagggtacgcgatgctttatgagcaaacttttcttgaccgcgctgacttgcagaagtttcaaatgttttcggctatcaaggacagcaccgtccagacctataccatcaataccctcagtcgccacctagacctttcatatcagcaaggctataacattttacaggaactgtttcgggatatggctggtttaacggtccatccggaaaagttaaagcgccgtcaaattaatcttttaatggaaattgatgtcactgtcgacgattatcatctttacctgctgaaacatgctatcgcttttcagtttgtggactatatcgtgcaagccaatcacccatcaaccgaaaagttttgccaagcccattttatcagtcgctcgactttggtccgtaaaaccgctgccttacgcaaattactcaaacgatttcaactaaaactttcttttagcgatttaggctttattggccaggagagccgcatccggcttttcctgtttgacttttattggcttggctatcatggcgtcgattggccgtttaaggttctggatgaacatcagattgtgcaggaatacatggccctgccgaacgccaaaacgaatccggttgatattcttgaagaaatccttttttgggctatctgccgcgtccgtatcagcggtaatcattttgtcaccggtaatgaggcatttgatcggatctttaacgactatccgccttttcaacacgatgtttatacacgtgagatgttccctggtttcaaccagcgctacatgaagggtgaaaatgactttttttattttcagcaacatcggaccatcaccttcttgccaagtattccggacgatcaaaacttcatccaatatttattgcagcgaccaactgtcacggcagattttgtgaaacgcttattggctttcttaaatcagcatgtccggcatcaaaccgcttttgatctcaacaatgaacatgggctcatcctcaacctcgcacgtatcgctttgaataatgagatgctcggtggggacttcatgcatttggttgacttctatcagccgcgcggattgaattacacgaagacgaatctattccgggtcctggaaaaattcgtggcatccttgccgaaaactcctgaatatcagtattttttgggaaccgaccatcaattcctgcacacactttatttcctattaacgccttatttacgctactttgttgaaacgccaactgtacaggttaaattggcttacctggattacgacttgttgaaccggcgcatggtcaatcttttgactgatttaccggttgttgatttacttccagaagatgcagcatttgaaaaagctgatcttgtcatcaccagtgtggacaatgaaccggctattaaggcagctgttccggccgattttcgcggtgaaatcattagttggatgactgaagatagtgacaatgctattttccagctctacttgcagattcggcatttatatcttaagaaaaccgatgcttccttatcggctgacaacgatgaacggttataaatcgtcaccgcatgataaccagtgacaatttcaaattagcatccttttgtgaccaataagggtgcgtaataaaaaacgacctgaaagatgacattcatccttcaagtcgtttttcatttgtaagcttgttatttaggattaggttcatgttcgcgatgcggggctaggtcgactttttcaagcgggatcagtttggttttatgcttcactttataccagacaaataacacaataaaaagcggaattgacatgtacgaaaccattaaccgcccccaagcaaagtgctggactgcctgcaaatcctggcccacgatgacgatcagactcatgataatcgccaggatcgggccaaccgggaaccacttggcatgatatttgagttcgtgaacatcatgtccctgtttcacgaaagcccgccgaaaccgaaaatgcgaaaccgcgatcccgagccaggccaggaacccggttaaccctgaagccgctacaagcagctggtaaacgtgtggtcccataatactggtcaagaaagttaatgcgccgactaaggttgtcagcaacaacgcagcaagcgggatgccgcggctgttcgtcttttgaaaaatccgtggtgcaaagccggagccgcccatcgcccacaacattcgcgtcgatgcatacatccctgagttagccgatgacaaaaccgaggtcaaaatcacggcattcatgacacttgctgcgcctgcaagcccaatgcgatcaaacactaacgtaaacggcgaaatcgccacctgatccacgctggcccccaacagattcgggctagtgtacggaataatcgcggcaatcacggcaatcgacaggatataaaacagcaaaatacgccagaaaacctgcttaatcgccttaggaatacttgtttcaggcgtttcgctttcgccggccgtaatcccgatcaactcggttccctgaaaagaaaaacccgcaacaacaaaaacagccaaagttgcggggataccacccacaaacggcgccgcaccagttgtgtaatttttaaacccaatgggaccatgcccacccatgatccccataatcgtcagtaacccgacaattaaaaagacaaacaccgttacaaccttaatcaacgacaaccaatattcagtttcaccaaatgacttgaccgaaataatgttaatcaggaaaatcagtgccaaaaatcccagcgaaaacagccagccaggtacttttggcagccaaaaatgcataacaatggcagtcgtcgaaacatcaaccgcaacggtaatggcccagttaaaccaatagttccaccctaaagcaaatccgaacgccggatcgacaaaccgactcgcatactcggaaaaagaaccggaaaccggtacatacgtggccatttcacctaaactagtcataagaaagaaaaccatgagtccgattccgatataggctgcaatggctccacccggtccggcagtggcaatggcgctgccacttgcaacaaaaagaccggttccgatactaccgccaagagcaatcatggatagatgccgtgtcttgagctctcgttttacttgattggatgctgattgtgccacagatgaactcctttgttaacgtgaattgatttttgctaaacaatgccagattttactgtcgatatctggggtgagattttcgtgattggctggttgttgacagccagtggcgggttaaatgtaacgatgcgttggccaaagactggtgtttatggacgaaaaactgcaacaagggcagaagcattattctttgggcaatccgttaattttattctgctttctataacgcgttcgccagcgcagggatcggagtgtaaggacctcgaacgcgatggccaagggcgggccatcacgcccgaggccgcttacactccgatccctaaccgcgctggctcacgctcacacaaaaaaagccaatgagtcggtctgttgtgactaacccatcggcttattctgctttttaccatgaataaacgtgatccgatttgttagcgccccgcgataatcgcgacagtccagtggatgttatccaactggcccaatatcgattggctgaactcaaccggtatttcggcacctttccctttaacaactgcgcgcttggtgttcagaccattgcagctgcgactcatgattgatgcgacctctaatctcaattacgactcaccatatcatgttcaactgacaacagcaactcactctcacacagctttaactcaactctcagctttaagaatatcagcaaccaaacttgttgtatcaaattgttgcttcaagaaaggctgatcatctgttggcaaatgcaactggaagtcgctaaacttttgtaaaaacagttcgccactatccaattcgaagccaagaatatgcccacccatactatgatcagcagccagaaaatggacatggaaaccaggtgaaaccgcacctgcatagagatccggtgaaaagtacccaattaaagtgcccttgatattctcagcatgaaattctttttgacccgaggccgtttcggtcaaggtcggataaggcggctgttgcggcagcaccgctcgtgtatgcatttgcgtaaacgtgccttctacacgaactgctgcaaataaattaccggtctgcagccgctcaagagttgctttgtgaaaccctgccaaatcaagcccctgaagcttaccagctgcaacgtcgtgttgatagtgaacgttagcaaaaggaaccttctcgtcttcttgcacttctcgaactttgccttgggcattcacttgataaaccttacccgcctgaataattagctcaccatcaagcccagtcaaagttccaatgccagtatcaccgtgctgcaataattccccaactgtctgcgtccccgcaaaaagccccggaaccagcatggctaatgttccatgttgatacaaccgatccgtattcaaaacgacatctcctttttgaagtgagcgtgaaccggcgcgtttaggggtcgtagtgtaagcggcctcagacgtgatggccgggctttggccattgtggctgaggtccttacacgcagacccctgcgccggtgaacgcgttatggtgagcgtgaaccggcgcgtttaggggtcgtagtgtaaacggcctcagacgtgatggccgggctttggccattacgtctgaggtccttacacgcagacccctgcgctggtgaacgcgttatggagcgtgaaccggcgcgcttagaagtcggagtgtaaacagacaatctcacactgagccacacgcccccacgtcaatccagttaacgattaatagatctgatcaggcaacatcgcagcgccaagttcagcgttatcggaatagtcaaccggaatgtcaacgatcactggaccttgagtcgcaaacgcctcatcaagcacggttccaagttcgcttggcttatcaacgcgcaaacctttggcgccaaaagcttctgcatacttcacaaaatcaaccggtccaaagtcaacacctgctgcacgcccgtatttcatctcttcttggaattttaccatatcataatggccatcattccaaataatatgaactaaatccgccttgagccgcacggcagtttccaactcctgacccgagaaaagaaaaccgccatcaccggatattgaaaccgccttttttcctggacgaaccaaagttgccgcgatcgcccacggtagtgccacacccaatgtttgcataccattcgagaaaagtaagtgtcgtggctcataactacggaaatgccgtgccatccagatgtaatgactaccaacatcaactgccacagtcatatcatctgcgacccgctcctgtaatgcagcaacaatgcttagcggatgaatcagcttttgatccgtcaaggctggcggtacgtcgctgtcttgtaatttagattgtaattcactcagataatgtttactctccggggccacctgataaccgcgcagcaacggaaccaaaatatccagtgtttgtgaaatgtcaccaatcaattcggtttccggttggaagttgtgatcaatttcagcaggaacatcatcaatcacaatgatgcgtgccttgccatcagcattccagttacgaggttcgtattccacgggatcatatccaattgcaataaccagatcgctatgttgcaacaacatgtcacccggctgattacggaacaaaccgacccggccaaagaaattatcgatttggcgatgcgaaataatgccggcaccctggaatgtttcgacaaccggtaactcggtgaccgacaacaactcgcgaatttcagcagtcacatcgctggacgatgcacgcatacccaacagcaacactggtaatgaggtttccttaatcgcacgtgccaagtaagtcatgtcactagggctggccggtcccaactttggtgccactaacggtttgatcggttcggaattgaccggtgaatcggtcacatcttggggaattgacacaaaacttgcgccctgcttgcctgattccgccgcctgataagcattggcaataatctcactaacattgtccggatcctgaacttcagccgcatattttgtgatcggcgcaaaaagatccgcattccgcatactttgatgggagctacgtaacaaatctgctcgcttaacctgtccggacaatgccaaaaccggatcgccttcagcagtagctgtaacaaggccggttgccaggttcgaagcgccaggtcctgaagtcgtcaagacaacgccgggcttaccagtcaaacggccaataccggctgccataaaggctgcattttgctcgtgtcgggcgacaattaattgcggactttttttagttttgggatgttctagggtttcaaaaacccgatcgattttggcgccgggaattccaaaaacataatcaatcccgtgatttgccaaactttcgacaattaaatctgcgccataacgcttctcttcagccatttcgccacttcctcattattgatgtgtttcataatacgctttttgtgttccgtttcaacccctattttaactgaaaaacaccgattaaacagagaggttctgttgcagtattttcataaatctgttacattttcggacaactcaagcttatagatcatgtttaatctttccaatataagtttaactgatttagtaggaacatcgttaaaggaagctcacgccaaactaaaatcgaccgcaagacaacttgtctttgcggtcgattttacttagtttctatactgtttcaagatactgcggcatcattttgccggctaccagtctattgtaaggaacgactgattttaccgataccggttttcggatcagtcagtttcaggttaaatccaaattttgtgaaaatatgccgtaacttggctaaattaactttgtcaaaggagctaatcgtgccatccacgagcgcaacgtcagccttcatcgccaaattcagaaaagctttcagtgccaactgtgcgaggccaaggttctcaaaatcgtaaaaagccaagcgactttcggaacccagcgtctctaaaaccgtaatatgcatcacgttgtcccagcgattcgtttcaaataagagctgtgcctgataatctgctttcgaatggccatatttgtcaacattttcaaacggtgtgtagacgtaaatcgagttggttttttgtttctgttcatcggctttaaaatcggtgaagacaatatattggcgcacgtcattttgatccgattcttgcggttgattcatgcttgatagcactgtcaattgcggatcagcttcgattgctgcaagccgcttatgataggcctgttcatactctgtttgcacagtcattttgaaacctccagactaatactcgttttcattataacatttttcaattcgttgcctatataaaagagaaaagccggattgaattcacccggttttcaaaaaaatattaaagtaaatcctcattttcaaactgattcggtaacaatctaaaatattgttcatcgcggggatggtcgccactcaatccccgtggcagcggcacttcgaattgaaatgtaaagcctaaacgtttcaacaagtgaattgaagcatgattgctaggaaaaacacctgcccaaatagccttaatatcatgggcaaattgatttgcaatgaccagttgcagtccctcacgcatcaaacctcgatgccaataagccggatgaaggatatagccaatttcacgcgtcatatcatcccctgtcaatggcgacaactcgcgcggataaacgccgatgttgccaatcacatgcaactgataaacaagcgccaagtcctgacgctcacgggcaaaccgtttaacgtgattagccgcctcctgacgggtcatcaaaggcgccatccccgccgcccgcgtgacttgttctagtctggcataagcaaaataatcatcaatatctgatgcagcgaaaggacgaaccgtcactcgcggacctttcaaaatgacacctcctaaaaaaagtaagcgcgaaccggcgcggttagaaaccggaacataagtggccttgggcgtgatggcccgctcttggccattgcgaccatggtccttacacgcagatccctgcgccggtgagcgcgttatgggcgtaagccagaactcaagcggccttaagcgtgatggcccgatcttggccattgcgcttaaggtccttacactccgacttctgcgccggtgagcgcgttatgggcataagccagaacataagcggccttaggcgtaatggccgggctttggccattgcgtctgaggtccttacacgcagacttctgcgccggtgagcgcgttatgggcgtaagccagaactcaagcggccttgggcgtaatggccaggctttggccattgcgcttaaggtccttacacgcagacttctgcgccggtgagcgcgttatgaaccagcgcacctatatccaaacgaccaagacatccaatattcactcataacccctaaatccgcacatataaattgcggcctgtgaaaatacattaaccttgtctcatcaactgacaaaatttttccattttttgagacaaaaatatttccagtagcaaattttctcgcgattgcggcacacgaaactatttatcttttcatattatcaagtatcttccacggtatgacaagcttcagctaattggacatcgaacttagcctaagcatttgacgactgattatttgttcttatcggtaaaataaagtcgttcaaataaccccttgagaaaggtgcgtgacatcatgccggcaagcactactgttagtcgaaagttcgccaacttgcaggaacacattgatctcgcggcgaggtcacctgccatcacctcacaaacatatatggtaatttttccaacatactgaggacttttaagtaacaaccgatctactagccaaagttaaccacgtctgataatcagtaatggcagccgattccgttctcaacgaacagctgccctacataccgacaggcgaaaggtgacgacaattatgaaaaagataatgagtctcattttggttcttttatttagcatgctctttatttggccattgaccgtgacaaccgcagccatttcaccaacattcacggttacgccggtcctgcctaataatcagcgtcagtcggttaccggttactttgacttacaagttagcccgggccaacaagaagatttacagctccggatcgctaatcaaagtgaccagactcaaacctaccgtattgcagtcaatccggcatatacgaccaatagcggggtcattgcctttgatcaaagccaaccaccgcttgatcaaaacgccattcgtctgagcaccttaattaaaggaccaagaacggttactgttgcagccaattccgagcaaaccgtaacgtatcagttgcaagctccggctgagcattttatcgggattatcgcaggcggcttttatgtcctgcaagaaggcgccacatcaagtcgtgcttccagcaacggggttcaattcacaaaccgctttgcaatcggcattacgaccattttgcggcaagatcttaccacgccgaatccaccattgcttgatataaccaaagccagcatcggcaccaacaaccacacaccggtcgtcaaggcgcggctgcataacccttcaagtaatcaattcggtgaaattgcaacagattatattttggttaaacccggtagccaaaagccgctactgacaggtcattttacggggttagcggttgcaccgcattccttttttacccaaagtatgcctttgaatgagaccaagttggctgcaggtacctacacgctcaaatggacggcaaaatcgggatcttacacttggtccaaacaagtcaactttcgctacaacggccaattaccgatcagtgtgactgcttcccgaccacgatcaccaagcgatgcggatgatcatggcctgcttccttggataattgccggcatcacttccgctttgctaatcattgttctcggtctatggcgctggaacgtggtacaccatcggcaaaatcagtagaaaagcgtgccagcattgacagtttgacttatgataaaggtagcgcgaaaccaaatgattatgaaacgccttggaaaatgtaaatccttctcacggtgtcatctatttggtgcgcattttgatcgtacggtcatggctggaaatagacgttgcgtgtgctaagtgctgccaagttcaaagctttgcaaggctagatcgtttgtgggcatcggtcagcatgaaggaccacttgcctgcattcatcacaacacgtttgccagccgcgaagcctgcgtgtaaggaggagttttgatgtcgaataaacgtgtacttggcaatgagtttcaaactgcctatgaaaatgccggtggaactgatattctgaaatttttagcagatgttaagcaggcttatcgttgcattagcgacttaaccgctcgaatgacagcgatgcctgactctgttaaaagtgagtcggttccgcaactattagtccaacaattagatcagaccacctttgctgaaagttcggttcgtaaatgggaagacgatttacggcgttttgttgcttatctgacaccgctagaacctccgattgcaattcttgacagttgggataccctgaatgatttcttggaagctaaccaagcattactgagttcactgcaaaacgtgccattgctacatgaagacacacaagatgttaaaacttcaacgcaacttctcgtttacccggctgaacccctctttcaagtcgttcaggccgatactggcgaaagtgatgccattgacctgcctggcttaaccacggctgatcctgatggcgttgcggaaattgcacgaacccatggcgtcacgccctttgctgcctttaacgtccagccttgattttagtctgtcaatcctgtatgcttgacaggttaaattatgaaaaagcgaggtgctaaaagatgcggaacaacatcatcttaggtaacaatgaaaccggcgaacgtatctatttaacttccaaaaacaagcgtaacacgcctgatcgtttgcaactcaagaagtattcaccaaagttgcgtaaacgcgtggtcttcaccgaagttaaataatctgatcgcagttcatcagccaatatcgcattctgtcagttttttactgatagaacgcgatatttttttgctttttgtacctgatcggtgagaacgaccatattgaaagctgttgtatagtgccaaataagccctaacctgaaaacagcggttgtggggcttgcttttgtcaataatcatagaagatgagtcgcacttatgacaatcaggatcggttgctactgattaaaaggttcataaagtcatcaggaatcggtaaatcagcctgaattcttttttcagaaaatgggtccacaaaacttaaacgggtcgcttgtaatgcctgatgatcaatgagcggactcgcttggccataaagtgaatcaccgattaagggatggccaaggctggcaaagtgtactcgaatctggtgggtgcgaccggttaataattgcacttcgaccaaggtgttgaccgcttctttcagcacttgatacttcgtgatggccgattgtccgttttccgtaaccatccgatgaatgccatccggtcccagaccaatgggtgcttcaattgtctcggtagcatgactgaggtgcccggcaaccacagccagatattcttttttcaaggtcgcatgatgagcctggtcaaaccgcccttgtgcatacgggtgtttcgcggctaaaaccaatccaactgtatcgcgatccaggcgcgtgataatcgcgggttgcggttcggttaccttttgctgctgcaggtaccagacgatgcgattcaacaaactgtgatgaggatcatgagggccgggaacgctggttaaatgagccggtttattgataatcagccagttttgatcttcatacagaacatcgagcgaggctttttccggtgtcaccgtcatcgtcgttgggatggcgaagcgcaccgtctgcccagcctgaatcgcagtattgccagtgcgatgaccatccagccacaataaatggttcgctaacattttcttgaataatctgtggctaacaccttgtttggctaaccagcgcttaattgtggttgccgttgtcacctttgaatcaaacgtatatcgcatgcttttcctttcgccatcccaataatctgatgtttcaaaaccgaacaaaaatatgtaaagatttgcatttaaacggcttttgggactatggttagaatatggttaatgtataagaataaggaggaacaggcaaatatgcaagtggaaaaagacgtgatctatgatgaggcccatgatttacccgttgatatttacgtaccggacgcggctaatggcggtgccgtcatatacgcacacggtggcggctggttccgtggcgataaagaaaatgaaagcgatttgggccaatatcttgcggacgccggctatctggtggctattcccaattttcggctagctcctaagtatctatatccgaccgcccaaaacgactttgatcattttataaactggctacttgcctctccttatgaatttgatcgcgaacgagtaggcttgttaggcgccagctcgggaggcacaatggtgttgcaaaatagtctgaccactggctacccagttgtggcatggtcgcccgtagttgattttgccaactgggtgcagaagaatcaaatggtaaaagcatcggttgacgcaaagaacgaactgggcctgaccgaaattcatgaaatccatgacgctttttataaatactttattcagacatatctgggcgggttggatccgcgcttactaaccgccgtcaacccaaccaatcatttaactgatcaacttgggccaaccttattgttcaactcggcagatgaattaatgccattaccaagtgccctgcattttgtccagcaagctgccatgtttggtcgggacatttccatccacgtggtacccggcgttggccatgcacgtgattataccagttttgccttacctgaaacaaaacgcttcttcgatcaccatctttttgcaagttttgaagacaaggcgctgaataaagcaaccgattagtcttgacgtcattttaaaagcgccgcgaatgccagtaaaagttggctttcgcggcgccttttttgatcgctccaaaagataagtctatgtggtatgcgcatcacttacggccggagaattaatggtgtggtggcgccgggtgcaacccattcaacgccgccggtcactggtactaagtaaatcgcgtctgcttcgatatcggttggtgtaagaacataaccattaccgtttgatgtcgccgtgtagcgagacgtcttcgaaacaccattttgggaaatggtcatctgagttgccgtaatggtcaatgatacatgttcgttatgccacgtgccaacataaaatggcgcttgaaccgtgggctgacttgccgtttgggtcgttgttgttgctgcagcatcactggttgtggcagcagcatcagtctctgtggttgctgaacttgccgtcgtcttttcggttgtcgttgcaggggtcttaacggttacggtagcgccggactcatacgtgctggtcgtttgagctgtacttgatgctgagtttgacgatgcctgtgacttgctcgttgctttcggctgatttgttgtttttttcgtgactgtttttaccgttgtggttttcacatcgcttttagcactgacatgttgttgatataaagcggcaccggaaacgccgctaagtgctaagaatgccgttgcaatcatcatccattttttcatgtcaatcactcccactcagaagttgtcgcttgtcggatcgtttcaacaatttcagactaacatgcggcaagcagaaatgttacaaaatgatttcaaatcaagaaaatcttaagacttatcaagatttttgctgtcatcgttttgtaacattcaactaaacataacctttttcttgaaacggcaaacatgtgttcgtaaactggtccttgaggtgagattgatgacttacgaagaaaaaatcggtaagcaaaagtttgctgctttggtggctgatttttttgctaatcgttacattgatcgcgggatgcgcaagtggcaaggctattacctctccgaccacaccgccgcgttaaaaaaacaggcgcagaccgagcatctgacttatccgccgctttcgttacaagatcaggcttacattcggatgatcttgcttcgagcatacgctgagggccaatccgtaaccattcagatcgatttgcaaacaccggatggccagatgctgccgccgatcaccggtaaagtcggtggtgtaaccgatagcgatgtcgtccatgtcggcgaccagaacatcagtatccgcatgattcgccacatcgatctgattccgtttcctgtttaatccagagcgtgtgcctcgaaaaatagttgaggcaaaatttccctcaaaaatatgataattgttaaatttcaaatattttaatggcacgagttgctaaaatagttacgcgccatgccaaactccgcaatctccggccagatgaagctagagcggagacggcgcttggagcctgcagccaagcagtctccaagccgcctaacaacatcagcggcaaaaaccggtcgctgtgttatttccacagctgatccccatctggcctacgattgctccgctttggcactggaatcattaaaattcagcctcactaaaaaaggatccaatctgctgctgtttggaatttgttttcaatatcttgtgctttgccttctaggtcaaaaaggagagtccgctgctctagcgtaaggttataattatgctctaacatttcatctctaataagacgacttattggccgcacttgtgctgaaatatcaatagctgctgttttgttactagcaagtttaccgatcgtttgtcttatattcgagacaactttttgggatatcccatctggttgcttctcaaaaagatgttgtaattccagcattttagcaataacgacttgcttttcattcattttgaatcactccttaatccagataatatcattataacaagtgttatgaaaacactttcttttatttttgttgaaaatatagtatccatcatagtataataacagcgctatcaaaaaactttaggggatggattattttggaaaagacagcttggcagttctggatgtaggggaattggagcaaatcgttggtggtgattcttataatccagggactttaaactgggttaacggaatgggaaaagtccctccttatcaacgcgggccgagaactcctttcgatgataagtttgaaaaatgcttgaacaattcatggacaagaaaccgcggtccatataattgcttccagtaattttgttgtgatcgatcagttacaaggcaaaaagctcaagagcaagtcgaggcacttgctcttgagcttttttctgtcttaactttacgattaatttgtgccgcatctaaactgccacaagaatttgacccaattttgatgtccgtcaaagaagtcgcttgaactatattcttcttcaaaccttaattctaccggaagtttgaccgaattgaaagcgattaacttcaagcggcacaaggactgcatgagccttataacttataattccttatatctcaacaaaaaatcaaagggcgtagtatttttcattgaactcgaaaaatagtacacctttattccaaagattcaagttatagctcaacttctccaccttaaagcgtttcaactagtctggttgggaattagttgttgccaagctcgtcagcgcatcaaaaaagtaagctagactcagataatcggccgtaccacccggactaagattaaacgtgatcatctcagcatttaactgacgcaaggcatggggcaagtgtgaatccgggacatgcaacaatgttttagccgcatcttgcacgaatcgtaatccctttggcccgccgcgatggaggacattggcatcttcaacttgcgccatcaagtgcaccattaatcgtaaatagcgcatatccccgcgtctggcagtcttgcgtaaatatggcaagatcacatgccggatagtcggataaccggccaaagcctcacctcgaaccccagtaacgccgtgtttgacatataacgcttcgccatggctccagcgggcttttttctccaaatcccgaaaatcaccagccacaccttgcgtcacttgagccacagtcgggaatagcggcgcaaagtcagcggtgactatttgctgcagggattgttgctgcatgagccagcccaatgcacccaataaaaaaccaaaggagaagttagcccctcgatgcgtattaacaccagcagtagcggcgagcatggcattttctgctgcaatcccaatggcgcgtaattggcgataaagatcaggtaccgttttagcaacgacgccggcatgaaaatattgctgaaaataaggcgtcaaagcttcaatgctagctgcaaaggtcgtcacatccatgtcgcggtgtgcaccatttgattcagggtcgaccaagccgggtttaggcgccaactgaacttctgcttgtaaactggtaactgccgcttgtgcaattgcttgttcattcaatatgttttgccttcataactttcagaatatagtgcagggaatgctctaagtgctcgcgcgtaatgagcttaatttgatcgtcatcttgattcaacatcccccgataaagcagccaatgttcctgaatggcaagattgcgccgatcatcgccattaatactgatatcacgaaaataaatcaaataattctgcagctggttgacgatcattttcagccgcaacatatgactggcatcataaataaaattattgaattcagtaaacttagccatcacttcggcaacacgaccggctgcgttcaaacgatccgtttcttccaaaagagtccgcatctgattgaattgctcaggggtcatcagacgcatggccttacgcgtggccaacacatccaattccttgcgaatgtcaaaaatttcataggcatcgttaattgaaatacctttgacaagtacaccaacacccgttttgcgttcaaccagatcttcttcatccaaacgctcaagtgcatagcgaattggcgttctgctgatatttagattttcggaaagattcttctcgttaatccgctcaccgctgggtatttcgcccaaaaggatcgtcttgcgcagcgcttcgtaaatcgcttctttaattggccggttctgtgataaatccaaatttttcttaaccgctgacaccacttgattcatcgattgtcccccctcacctaacccaatattataccttaacgtgtctcaccacttaaaacatgctggctcacgctcacttaaaaagctgccgacaaatttgtcaacagctcaaattgtgctagcctaccaactcacggcggcacgttaattgattagggggcgaaaggatcatgtgccttaattatgagtaggatcaaatgtcagtgaaactttttgaaccggcacatcataaaacggatcttcacgccggcctaaaaagtcttttgcctgatcagggaagagcgcataactcaagacatcttcttctgaatgggcatattcggcaatagctttacgaaatgtcggtagttgcggctcaatcaggtctgccggtcgcgtggtgataaccggcgcgtcaccaataattttctttttcatctcaggggaaattggcacaggcggccgaccataaagtccgcgaacatagtctttgatttctttagggatcagcttataccgctctccgctcatcacattcatcaagctttgcgtaccaaccatttgtgacaatggggtaaccaacggcggataacccaagtcagcccgaacgcggggcacttcttttaaaacatccccatataaggcctcttgcccctgatctttcaattgcgccaacaagttagaaagcatcccgcctggcacttggtaaatcagtgactttggttcaacatctttaacgcggggatttagctgcccggcatcacggaattgatcgcgaatcggtgcaaaatagctggcaatgtcactgacttcggctagtttgacatcagtcgggtagcctaagtcctgcaaagctacgagcattgattcggttgccggctgactggtaccgccagcaaatggggaaaccgccgtatcaataatatcagcacctgcgcgcactgcctcaagatacgtcatttcagccattcccgcagtcgcatgcgtatggacctctagcggaaccgtaatttcctgcttaatgccgcttacaagatcaaaggctttctgcggggttaaaatgccggccatgtctttaatggcaatggagtcagcgcccatgtctgccatttcttttgccagcttgatgaaatagtcaatcgtatggaaatcactggtggtataactaatcgccagctgtgcgtggccacccgcttgcttggtagcttccagtgcggttttcaaattacgtgtatcatttaacgcatcaaaaatacgaatgatgtcaataccgttttcaactgatttcgtgacaaaatcggcgacgacatcatcagcatagttcttataaccaagcaagttttggccacgcagcaacatctgcaacttagtgtgcttgacggcttgacgaattttccgcagtcgctcccacgggtcttcgtttaaataacgcaagcaagcatcaaacgtagcgccaccccacatctccaatgcgtggtagccggccgcatccattttatccaaaattggcaaaatatcgcttgatggcatccgggtagcgatcaggctttgctgaccatcacgcaaaactgtttccatgaattggactttttgtttagccatgtgtggtccaaccctcctttatgattgcttcaactgccgcttgaacctcaggcaatccgtgtcgacgtgagcgcgcacaggctttggcgtccccgccacaaaccaagcaggctcgcggaggtaacttaaaatcggtgcgcgaaacctgatgcagttcttcaccttgcaacgtgaccacatccaaatccagtaagtcacaaaagcgttgttgctgttcaaatccgatcattcggcgctttaaactaaccgggtccatgtgcaccgccaagtaagcttcagggccagttggtaacgattcgatttgcatgccttgcacgtttggttgtaattgatcctgcaaggcttgcatcgcagctgtaaacactgtaacgacgcgttttccggttttgaccggtcccggaatccgcaacgtcacgtgtaatagcgtcgtgtccggatttgcctttaaccagtcatactccttggtcatacgcgcgtctttggcagccaacatttgccctaagtcaacttgggggccatccaaaactgacaatttaaacattgtgcaccacatcgattaaggtaccatcacgatattcaatcaaagcaactaccttgtcgccatattgaataggtgcaggtgtgcctgtgatttgataagccatgtttttgagtgcttcaatcgaaaattgtggcaccttcaaatccttaaacatttcaatcagatctgaccgggccgggttaatggccacgcccacttccgtcacaacaacatcaacactggctcccggagtcacaacggtattcacattttcgacaatcgttgggatgcgtccacgaaccagcggcgcaatgaccatgctcatcttgcaggcggcactcgtgtcactgtggccaccggatgcgccacggatcacgccatcggaaccggtaatcacattgacgttaaagtccgtgtcgatttccaacgctgacaaaatagcgatatcaagctgattaatgaccgcgcctttgctcaacggtgacgcatacatgttggcatcaatttcatagtgatcagcattttcaccaagggagactgcggatgggtgatcgaaatcctgcacatcaattaccttctcaacgagtccttctttcaacaattcaaccatggagttggtaatcccgcccaaggcaaaacttgctttgatatgttgctgcaacatcgcctcacgcaagaagcgggctacggccaacgaagagccgcctgtaccggtttggaaggaaaagccatttttgaagtaggcagatttcgtgatcacttcagctgcatattcggcaatctttaattccttagggttcttcgtaaagcgggtggcacctttggcaataccggttgggtcgccaatcgcatctacttggaccacatagtcgacatctgtttggggaatactgatcggcgtgttgggatatggcattaggctgtcggtaatggcaaccacttgatcggcatacttggcatcaatcatggcataacctaaggaaccacaagtcgctttgcctttggtaccgttaatattgccgtattcgtcactacttggtgcgcccaagaacgccacatcgatatgaatatcgccacgagcaatagcacgagcccgtccgccatgagaacgaatgacgaccggattcttcatgatcccgctggaaatagccgcgccgactttatcccgcaaaccggaactggtgatgttggtgaccacgccatttttaatgtgttcaatcaacggttcatggacattggcaattgaactaggtgcaatcgacaggtttttgatccccattttagcgatttcagccagtaccatgttcatcacatagtcaccttcgcggaaatgatggtgaaatgaaatggtcatcccgtcttttaggccggttgcgacaatggcatcatgaattgacgccactagtttactgtgatcaggcttgacgggtttaatgtggcgcgcatgttcatcataaggttgaatattggcaaactcgccaccgtaaacgccatattgatcggcatatggctccgagatttcacgattaagcttattcttgaccatcagtctacctccattcctgacgccttagcgagcgcaatcgtatattgagcacgctctaccactggcttgtcaaccatctgaccattgaccgaaaccacgccggccccttttgcttctgcttcttttagtccggcaacaatttcccgagccttttgaacctcagccaaagcaggcgcaaacacactgttaatgaccggaatctgccgcggattaatcacggatttaccatcaaagccgagttgcttaatcagctcggtttcatgacgcagaccttcttcgttgtcaacctgcgtgtaaaccgtgtcgattgcggaaatgccggcttcacgggcagcatgcaaaatgaagttgcgggcaaatgacaactcggctccgtcagcggaacgatgggtatgctgactggttagatagtcttcggcgccaagtgcaatcccgatcattcgtggggatgcctgggcaatttcccgggcattcaataccccttctgccgattcgatggcggccatcatatgggtcgtgccgtttttgataccgtattttgcttcaactgccgtaatgaccgcatccacgtcaataatgtcctgcgccgtttcggtttttggcagccgaatcacattgataccgccaagcaccattgcctcaacatcctgatcgccgcctgcatccaaggcattcacccggacaacggtttcaacactactgtaatcaaaagttttcaatgcagaatagaccagcattcgcgcggtatctttttcttttaacgaaaccgcatcttcaaggtcaaacatgatggcgtctgccccataaatcggcgcatcacggagcatgcccggattagcgcccggaacaaacatcatggttcttcttaatttatccatgcgttgatctcctcccagtcaaatgtcttgttatcggcagcacggtaagccgccgcaatggtacgtgctttgatcgtacaatccagtgcacctttgtcattggcttcaaccgcaacgttttcgatcgccagttttgcaagtgttgctttgatgaccgcgcgaatttgttcgccaaattgcttttcaacactgctttgcaactgaatcgtgataccgtcagcggctggtgcaagcgtgatttgaatatcacttgactccagtgtcccagccgtaccgggatgattaattttcatgggttgatcgctcctttatttctgtataaacctctggataaacgagttgttgcaccgttttccaatcctgttgtgcaatcgccgcccgaacccgcgtggcactgacaacttcgccagcaatctgcaagcgcggaacaacaatcagttcgatagtgtcaccaaaagtggcggctaattggcgattgtaaatagcggtcacgggtgacaatggctcttcaccgacataacgccgggtaatgtctaaaatgggggcaattcgctgtttaaaaagcgcagcatccaatccggcttgagcagacgcaattgccgcatccgcctgatccttgagaaaataactcggaaacgtggtattcgacaccatgtaatcagcggttggcaacaccacgacattcgcccagcgtgaggcgattttttttacgaggcccaagcgttcggcagcggtgaaaagcgagcgttcggctgacagcacaaagacgtaaaccacggcattgtccctagctgcctgctcaatcagatacgcatgaccgcgggtaaccggattagcgttcatcacaattgccgcaaccggctgtcctgagtgctgatgctgctccaacaatgccgtgtagtcagcaaaattaggataaccacgttcgagcaaaaccaccgtgtctgttgccactaactgcttaaagcctaacgattcaaaaaactttttcgtgcttggcttggtatagacaaaactatgcgtgatcgcctcatcatccagccgatccaacagtgcctgaataatctgtgccaatagattttcatgctgagcatctggtgacaccgcaacctctttaatgatgttgccagctaatgaaccggttgctaataacgcaccatcttcgaaaataccaactgtaaaatcaacgtgttcatccggcgtcaattcagccgcacgtaaaagcgtttgccaagctgttttttcttgcggattcaggtcaaaccaaatacgttttaacgttgccatcttacttcgccgctttatcggctggcgcaaacttaagcaataatttggccacaatgtagataatgaacaaaacgataaacacgccgcccataccgaccaacatcaattcaccagcctgttcaactgctgtgggatcaaacttcatggtaaaaacctcctagtaaagtgagcgtgagctggtgcgggttgacttccgcacttacaaaccacatcaagcgccaaagaatgacaacaatagcccaccagcaatcactgagccaatttgaccagaaacattggcaccgactgcatacattaagacaaagttctgcggatcttcgtcagtggccattttctgaatcacgcgactcgacatcggaaaggctgaaataccggccgcaccgatcattggattgattttttcttttcggaaaagattcaacagcttagcaaaaagaacgccgccaaccgaatccataatgaaggcaaacaaaccaaacgcaataatcatcaatgtttgaatatttaagaactgatctgcctgcaatttaacggaaatggttaagcccaagagaatggagacgatgttgaccaattcattctgcgctgtgttggaaagccgatccaacacgccacattcccgcagcagattgccaaacatcaggaaaccaaccaatggcagtgaaatcggtgcaatgaagccagcgatgacggtgatgataatcggaaacagaattttagtcgtcttggacacgccttctgccttatacgtcatccgaatgcggcgttcatgcttggttgtgactgctttgatggccatgggttgaataatcggcaccaatgccatgtacgaataagccgccactgtgatggcccccaacagattcggcgccaactggtttgaaacaaaaatggatgtcggaccatcggcagccccgatgatcccgattgaagcagcctctttaatgttgaagccgaagaatactgcaacaaaaacggtagcgaaaataccaaactgtgccgccgctccgaaaagcagcataaacggattttgtaataacgggccaaaatcaatcatggcgccaatcccaatgaaaatcagcaatgggaaaagttcggtgttaatgccggccttgaataaaacatccagcaccccttctgccttggtgccgccgacaacttgcgttaaaacgccggttccgggaaaattcaccaaaatggcgcccagtcccatcggaaccaataaggtcggttcatattctttcttgattcccagatacatcaggagtgcaccgatcaacatcatcgcgatttgacctaatgtgatagtggtgattccgtgaatgagcgcttccataagcttcctcctccctaaataatgctaataagaccgtcaccggaattgacactttgatttagcgttgcgataatatcgcccaccgtcccggctttaggcgcgacgatttcgttttccattttcatcgcttctaatatcatcaagggttggttttcggtgactgcatcaccacttttaaccaaaaccttggtaaccgtgcctggcatcggtgccgtgaccacttcaccttctccgcttgccgctgccggcgttgctggggcgggtgttggtgctgccggtgccggcgctggtgtttcagctgcaggtgttggtgccgcagccggtgctggcgtcggagccgcggcagccggtgtcccgccgatttcttccatttcgaccaaataggttttcccatcgatcgttatcttgaactttctcaacatcttcttcagtccacctttttcttaattgacttgaccacgtactgagcatcgccatcaccagcagcaatcgcactggcaattaaacccacacgcttagcttcgggattttcaacgtacagatgtttcaacaccagctttgcatcaggtgccgaatccgcagtaaccgccgcggcaattaggctggcagttaactcggttttaggatcaacctccaaaaagttcggcaccgtttcccattgtgttgtttcgaccggagccgctactttcttcgttgtcggttcaaccggtgtctgcggcggctgctttttacgatgcaaccatccaaacataacatcacctcttctcttaaagtgagcgtgagtcagcgcgggtagaagtcggagtgtaagtggccttagacgtgatggccgggctttggccattgcggctaaggtccttacacgcagacttctgcgctgatgaacgcgttatggtgagcgtgagtcagcgcgggtagaagtcggagtgtaagtggccttagacgtgatggctgggctttggccattgcggctaaggtccttacacgcagacttctgcgctgatgaacgcgttaaagtgagcgtgagtcagcccgcttgcgaacgcgcgttattaaatagcgcaacccgcataactttgatagatctatcatacggggaaaagccaatcacaattggcttttcggtgtcttttttcggttaaatgctatttttgcggcaggtaaaatggcacgtggccaaagagcataaccgtcaccacaaaaattgcaaacacgcctaatgcatattttccggcttcgcgttgccacttacccatatccaaaccggttagccgcagtaagaggtagatgaaggcaaccaatggcgacagtaagtggaatgcctgacccattaatgaagccaatgccatttgcatgttagtaaacccataggcacggccggcagttgccaaaaccggcataacgccgaagtaaaaaccatcgttacttaagaagaatgtccctggcgccgaaatcaatgcgatcacgagcccccagaagccagccatggaatttggaatgatcgcggtaaagctcttagccaacgcttctgccatcccggttccttggaacagacccatgaagaccccggctgcaaacaccagaataaccacttgcacggcatcgccaccattagcgccgatccgcttgctttggtcgcctaacttaggatagtttgccatcaatgcgatacaggttccgaccaagaacagcaacaatggcggcattgcaatggctttaataaaggaacttgccaccaaccaggcaatcagaacaatcgtcaaaataccgttaaacaggaacatattcgggcggcgaatttcagaaacttccggatccactaccgatgtcatttcgtcaatttcttcatcggttaattcccgaactcccaagcgtttccgttctgcgcgacccatgtgcggtgccacatagaagatcacataagccagtgccaaaatcatccctggcaacaggtaggtcaaaatatccgcatcaacttttaaaactgccattgcccgtgcagttggcccaccccaaggcaacaggttcatgatggtattttgcagaataatcaaaacacccaggttcatcatattcatgttgagcttcttataaatcggaataaatgccgagcaacaaatcaaagtagtggtcgtgccgtccccgttgagtgaaacggccatcgcaacaattgcggttgccatcagcactttcattgggtcgccttttgcaatcttgatcatgcgtgccgtaatcggatcaaacaaaccggcgtcaagcataatggagaaataaagaatggcgaataagagcatgatcccggtgttagcagtcgtcgtcagaccttttaacacgaaatcgcctatcgttcctttctttgccacgccagccaccattgcaataatcgcaaataatagcgggatcataaccaaggaagtaaacggtgaaagtttcttagtcatgatgacgtacatgaagacaatgatcatggcataagcaatgacggtgagtaacatagtcccaacctcttttcataagtttttatcgctgccctcatattacgtgatattcgtcactaaatggcggtttttgcccgtttagaacacgaaaagaacaatcgtcgtttgaccgcaaaaataaatttccccaaaaagaaagcgccctcattggcttaaaattcgcttttaagtcaatgagggcactttagcaaaggtgtgcagattagtttgaaaagaggctataataattgttacatagttcacattcgactaatacagaaacaaaattctgtatcagtctaccagtcctggaagcgttcttcttccaactttttcaataactggttgaaattttcgcgcgatggactatgactcagtgtttcttcctgaagctcgttaaaccgctctgctaagtagtaagcggtcagataaagtgttagcttccgtttaacaattgtttccggatctttgtcatcgggtacctggtgtgaaccaacaacaagattagcgaactgtttcggatttaaccgtaaatcatccggcgaatcagccttcataatataacccccccttttcttaagtatgcctaatactaacataaaaaaagaacgcttcttgagaaaaaacgttcattctcggtcaacccgatgtgggcattcgggttaggaactttggtaaaatttttccagttagccaaacccgactaccagtggggtaaaaaagtgcgcccgccgtgaatgctgctaatgcgtcaattcgaaaaataaccgggtgcgcatcatggcgcgacccgacttgtttagccatgtcaagatcactagacagatggacaaaatcacgattcatcggccgcaacccctcactttcaatcatgatggccgcctgatgggaagtcccatgatacaaccaagtaggtggtttgctggcgggcattagcggtaaaaccggaacactatgaccatatactgcccgaatcctattatcttcaagcgcgaatcgccgcttatcgctttgacgcatcatggcagccagtacctgtcgatctaaatgcacttgataatgcgcgttaaaccgttggatcaaggtgtccagatccacgcggccatatgcatcaagttttaagccgagtctttccggatgatggcgtaaaataaaactgagaagcttactgatcttcacaagttgtttctccattgctatataccccattttcacaaaatccaatgagactaaaggaaggatcaccttgaaacttaatttttccgctgcacgcatgtccgatcttgatgcaatcatgcgaattgaacatgccggattcaccccgcaagaagcggccagccgtatcagcatggcggcgcgcattacgaactatcccgatacctttattgtcgcccgggttgcaaataccattgtgggttatgttgtgggtccagccactttcaagcctacaatcacagatgatctttttacggatagtcagcctaatcagcccgctgccccttaccttgcgattctcagcttagccgtggccccaaacatgcaacaccatgggatcggccgtcaactactagctaagctgactcaagttgctcaattgcaaaaacgcactgcgctcactttaacctgcctatcacgccttatccctttttatgagcatgtcggctttcataatgacggtcttgcagcttccacccatgccggtgaagtctggttcaatatgtcaaaaccagtcaagcccgtcgcaaaaatctaggttgctaactttgatgcagatgctgtcgcaaaaccggtgctgtttcgttgactaaaaaaagcgacccgtcagcctgcgccgccaaactagcgcccaaatcacctaagtcaaacggctcaaaaccaattgcccagattaacgccgccacttgcttcttagcctgaggatcgtcaccggcataaggcagcgcaatgcgatccaccgaccgattgggacgtgccagctgtgcaaataccgccatttcaattgaattaaaggctttgacaacgcggtgtgaatgaaaatgttccgcgaccatttgtgacgttgctttttgatgacattcaatctcgggaatccgttcatcccgatccggaaagtaattggttgcatccacaataatcggatcatttccggttggtaacggtaacgctttgatcgcaaaaaacggcaccgccaacacgactaaatcctgcgcctctgcctgctcaactgtacctgctgctgcccccaaaacgcgtgccaaatcatctaatgcatccaccgaaccgcgatgagccagcatgacggtattccccgcccgcacaaaaagctgcgtcaaaacctgaccaacatcacctgcaccaatcatcccgattttcattcatcatcacacaccttcattattcattaattatatcgcgccattgctttttgaggcaaataagcttttatatccttgttatgcgtgcagatattacatcttttataattatttaatttagcagacagactgggccagttgtctcttttccactattatggtttacaaactagttaagtcggtttaaactactagtatgtaaaacatgctagtcgaaagggagcgatgcacgtggcagccgacgcgaacagtcagatgctaaaaggaattttacaagggtgcttgcttattttactggcgcgaaaagaacaatacggttatgccatcagtgaatcgcttgatcttttcggatttggcgacgtccccaaaggcaccatctacccactattgatgacgatggagaaaaaaggcctgctagtcagccatatgcgcccgtcaccggatggcccgcagcgtaaatactatgccgtgacgcctttgggagaaactgcccgccagacttttatggtgcaatggtcggaacttaaggatcatgtcgaacagcttattgccgatcaaccggaagaatagaacaggttacaatcgcgctagttcacgctccataacgcgttcactgacgcagaagtctgcggctaaggctacttacacttcgacttctgaccgcgccagttcacgcgcacttatacgaggaggccttgacgatgaaaaaacggaaacaagcagtcaaaaagatggttgcggagaacaatgaactacgtaaacagttaactaaggaaaaccgtgactattacgagaatctgctgacttacttaagaggaaaatctttcttacgcgatgattatcaagtcgagcaaaacttgttaactattttgcaggacttaattgatgctcaggcggatggggttgaggctgctgcttattttggccagaatccggaagcaacggccaatgatttgctgaagacgattccgttcaatctcgctgacttcttctggtttaatttaaaactggttttcatgatgttttttattttgtggattccgaagctagctaacccggtcatgacccttgatatcgggatgacatttctttgcggcgtcattgcaattattggcagctggtgttttgtttggcttttaggtggttctgcttttgcaaaacacactcgtattcaaatttttagtttaatcgtttttagcattattgtctttgctgttatgtttttcgtgtcaatttttgttaaaaccggctggcggatcacgcttccctcccaagtatcactcgcggttattgtcttaggtttagtcattatcgttattttcccattcgtccagcatctaaatgagttcaacattttcttctatctttatgttgcgttttacttcgttttaggattgcttcttcgtcttccacaaaccaagccttttctaacagctaaagtcaacttaggtccgtggaaatgggtcgttatcattgggcttgtgctcttttcactcgcgattggaggacttgtttaccggttttatcaacgccgccatccagactaaccgttgcgtgtatcgcgtgtcggtacgagaattcgcgccaacgggttttctaggccgcaaattcagctacaatagatggcatacgttccaactgaaggagtgactattttgatccctaatgaaaccatccggcaccagcttcaccaccgctcgattcggcaatttaaaccggaacagcttagccagcaaacgatccgcacattgcttgatgtcgctcagcatacggcaagttccatgtatctgcagctgttttcggttattcatattctcgatccgcaaatccgggctaaaattgccgaaattagcacacaaggctatttaaacggtcctggggaattatttatttttattgctgatttgaatcgcgttgccaccttgaccgccgctgccaatcacccgcttgatcgcgttgggcggatggacaagtttctccaggcaagcgccgatgctaccttggcactgcaaaatatggtggtggccgctgaaagcctgggtcttggaaccgtcacactaggcagtattcaaaatgatgcccaagccatgattgatttattgcatctgccgaagtacacatttccattgttaggcttagcagtgggcttgccagctgaccagccagacgaaaagccgcgcatgcctcagtcgctggttgctttcaccaatcattatggtgaaccggcgccaaaagcagatgtactgagcgactatgatcaaacagtgcataattattacgccacccgtcatggttcccatcgtaaggagacctacaccgacctcgcagtgagtgccggaagctatacgccggcaaaacgcgctgatttatttgatgtgatgcgtcatcaaggcttcttccctgaaagctaaccgtttgtttttctttttggtccatacctgtattgttaacaatactaaccgcttgaagcgttgatcaagcggttatttttgtgtcttctgtcgagcatttaaaatagatgaagaattattgacccaccagtcaatttcttgttgactgatgggtcaatggcgactatacttcggttgaaatgagcgatgattgactactgtaacgaaaacatcggctctcggttcgttcaacgacttggtatccgcacgcaccataccgtagaaacacgcgctgactcacgctcactttacttaggaggttagtcatgacaacaaatgttatcgaacttgaccatattcaaaaaagatttggtaagtttgaggctttaaaagatgtcagttttacgttggcgtcaggccaggttttaggctttttagggccgaatggtgctggcaagtcgacaacgattcggattattttggggttactaaagaaaaccagcggctcggtaaccgtatttggcaaggacgcttggcatgatgatgctgcgattcatccgcgaattgcttacatcccgggcgatgtttatctgtggccgaatttgtccggcggcgaaatcattgacttgttactccgcttaaacgggcggactcataatcaaaaaaccgatgaactgatgcaacgattcgaatttgatccgaagaaaaaagcccgtacctactcaaaaggtaaccgccaaaaagttgcgatcatcgccgctttgtcacaagacgctgatctttacattttcgatgagccaacgtcaggactggatccgttgaatgagcaaacttttcaacaagaagtgcttaaactcaagcaggcgggaaaaagtgttttgctctccagtcacattctgtcagaagtggaacgaatgtgtgactcgattgtgattattcgtgacggcagcgtgattgaaagtggcaatctcgcccaaatgcagcatttatcgcgtttacgcgttgaagtcacgtcgacaacggctttggatagtttgacccaatcaaccggtattcatgagctgacctttccagagagacagcacacgaaggccattttcactgctgatcgcgatgacctaagtgcgatcatgcaaaccttagctagccatgcgatcctggatttgcaagtcacgccgccaactttggaagatctctttatgcgctattacgaaaaagaaggtgctgatcatgcggcacaataatcgccatgctggttacctattccaggctaatttgaaacaaaacttcaaattttctggcatttggcttgtgatcctcatcatgatgatcatcagtggagctgccaaattggaagcagcttttgcaaacggcacagctggggcgaaggatatcgtcaaaatgctgcaagcaccaggcatggcggcgatgtttggtgccacgccaaaagttgtcacctataactcggctattatctttgctggcgttatggttgtgttcatgatcattctgcaagcattgtgggtcatgccgctgatgattcgcgacacgcgggggcaagaagaaagcgggttgctggaaatggtgcgtgcacgcaatgttggccgcaccgccgctgtcactgcggctattttcgaattgatttttagcagtctcgttatgggactcacctacttgatcagcttggtcgccattaaaatggatggtgcgacccttgcaggcgacttgctatttgctttaggaatggtcgttgccaattttgtcttcggcacgattgcactgctattttcccagcttgccaataacagtcgtaccgccagcatgctgagttatatggtactcatgattgcttatctcatgcggctagtcaccgatatcaaccatcaacagctgacctggctttcaccaatcggctggtttgaaaaagccaacttttataccgacaacaaccctgtacccctgcttttagggcttatcgtcagcgcactgcttgcaggcgtggccgtcatgatcgcccaaacacgggatcttggcacggggatcattgctgaaaacggtggccgtccgcgagcggcaaactggctgcgctccatgcctgctttagtctggcgcaccgaacgcggcttgttggctggctggttagtcggggccgttgtttttggcggcgtgatgggcagcgtgctcggtggcgtaggtgatattctgaaaaccaatccaatttatcgaaaacttttggatgtcagccaaattaacgctgccaatcaaaccatggtgctttcgtttttggcgatgtacatgggcatttttgtggccttggcggtgacagcgggcgttcagattgcctttcgactcaaacatgacgatcagcacggctatctcagcatcattcacgccgaaaagccaacccgcattttaatcagcgccagttacaatggcatggccttgttagccggcgttttggtgctgacagttggcttactcgccttgtttttcaccggcaatcaggtgctgagtcatccgctgccagcgaagtaccttggtcgactctttattggtggcattccggctgtcttggctttcattgcgttaggcatcgccctgtctggtttatggccgcgcctgagcaatcttttctggttgtatatgggcgccgggctgattgtgcaagtcttccgcggcttattcgatttgcccaaacacgccgccgactttacgccatttggctggattgccgatgtcccactcaaaacgctggcccaaccatggctgcccgtgatgctcattagcgccattatcctagttatattgggaatggccggttaccgcagacaggacttgagcgtatgaaaaatgtcgtcaatgatccgcaaaaagtcacccgaattctcgcaacggctaccaccgcttttggccaacaaggctttgctaaaaccaaaaccgatgatattgccgcaacggcaggtgtttctaaggggcttatcttccactacttcggtaacaaacaagacctttatctagatacttttaaaaccgcgtatcatcgtatttatgatcatatgaacccccataaatggcaggacgcaccaggactggcagcgatgatgacgcaagccgttaaatacgagatgcaactgcagctgaaatttccggacgagtatcgccttatgatgcaggcttatgccgacttatcgcattttcctaaacccttacagcaacaaatccagcaagaaacccaggcaatttcggctgaagccaaccgtattttccgccaaaaaatcgagcaactcccgcgccgggacggtgtttcggttgctgacatttttagtgtggtttccgccgtcattgcccagcaaacggctaccaccacccggatgattgcaaccggccattaccgcaactttgatgatttacaggttgtcgtggaccagatggatcgtcagctgaaaattatcgagcatgggtttttacctgattgataggaaagtcggtttagtctctgattattatcagttttgcatcgaatgcccgtattcaaaccatgtaaatcaagtcacccacaaaaaactcaggcacgccgctaccgcacaaaagctagcgagttgcctgagtttttccctgtctaactaatcctgacttttagtagctttaaagagtcgcagatacaacccaaaattaaccaacccaatcagaagcaacaagccaaatgccagctgactgccgatcccgacgttttgggcgtgggttaaacccggaacggtgacggcggtcatcatgccggccaacaccgtggtgccaattgaaccggtaacttgttggccggtactatacagcgcattggcgtcgctttgatactgatgtgccatcaccttcagtccataagccgtgctgttaccaaatgccatcgagcggccaatggcaaaaatcaggtacagcaccgtgacccatagcacgctaatatgccgcccccaaatcgtaaagcccaacatgcccagtgtaaacaaactattgcctaacaaaagtggcagccgtccgccaaaatgatccagcatccacccatatacaggctgaccaagtccattaaacacactgccaggcaacaagattaacccaccgacaaacgcgctggccccatccacggtttgcacgtaattaggcagcaagaagttaatgccgacattggaaaactgcaataagatgtaaggcaaaaagctatacaggaagcctgcgtcatggaaaacatccagcttaaacagagctttggcgtgatgttttgacagccaaaggaaaaccagcatggcaaccaccaccacaagaccagccacaccggccagcgcccacgttcgatcactcaccccattcaagccgaccgtcagactgatcagcgccacccctaacgcagcaaaccgcaaccagtcaaacgcgaatgcggaagtatgcgtgtactgcttaatccgcccttgtcctaaaattaataacaataaggcaaacggcagcgtactccagaaaatcatgcgccagtcaaaaaagttagcaactgcaccgccaaaagttggccccaaagccggtccgatgagaatgattaaattagcaacgcccatatacgtccctaacttgctggtcggcaccgtgtccaaaataatattcaccatcagcggtccgcacaagccaacacaccctgcctgcaccagccgaccaatcagcaacacccagaataccggcgccaaagcacacatcaaatcgccaataataaaaagcaatgccgcggtgataaacaattggcgattggtaaagcggcgtttcatgtacgctgaactaagcatgaccaaagcggccgctaacaaataaccggatgtcacccactgcacggttgtcaacgacacatgaaagtcatgcatcagcgttggaaatgtgacattcatcgaagtttccgtcaaaacgccaaaaaacgacattaaggcgacaatggtgatgacgaataaggcgtggcgagtattctgttcttttgcttcaatggttgtttttgtcatgatcgacccttctgtatacgactgccggcccgttagcaaaccctgctggcaattgcgttatagtttcatgataggccggattattttcagtaacaacattgaatttcggcttgattggtgaaaattctgcttttggattgcgggttgcgatgaaaactatttgtgaaatgaggtaagataaggatacttgatgcaaatatttttatggttttcggttatattaatcgtgagtaaacgtgactgcgcaggttcggtatagaggatggctcgcatttcaatatagtgcgttcttcagcgcaaaaaccgggctggctcacactcactttagtttaggagaatttttataatgacaattatcttagtgcttctcggctttttggtcggggcatttattatgaccatgggtggtggcggcggtgctttttatcttggtattatgaccggcgttgcgcatctttcaccgagtactgcggcggcgacatcgctgtttacggcgattccggcgttggcggtggggtgttatagtcactatcgcactggcaatatgcgttttcacgccggcaaccggattctgctgacggcagtaccagcaacggttgtcggtagtctggccgcaccttacataccggaactggtttattcatggtcgattgcgattattttcatggttcttggcgttcaaatgttgcgccaatcctttgggcgtaaagcaaagaagaccacccagccggcatggttcgcctatgtgcttggtatgattagcggcttaatggttggcgttgccggactaagtggtggcggcccgattatggctggtttgatgttgatgggtttggatatgccgcatgccgctgcaacctcatcttatgctttagtagctttatccatcatcggttgctttctgcacgccactcaaggaaaaattgcgtggacagtcggcggcctcctgatgctcggctcgctggttggtgccgcaatcacaccccgcatcctcaatcgctttgacccgcgtaagttgaccgccatcttacgtccgctcctcggtttgcttttagtcgtcatggcgatcgaacaagtatggtaatgattttcaacttaaccatcagttaaaaaatttgccagcaacttgaaaacgccgccattgtcttcactaagaagcaccatcataatgaaggtgatcaaaaggggtgatcatcatgcatttaaatcagattattcgcactaaacgcctggcagcaggcttaactcaggaagcgctggcgcaaaaagttggtgtcacgtcgccggctgttagtaaatgggaaaaaggtatttcttatcctgatatcacgttgctgccgattctcgcacgcaatctcaacacggatgtgaatacgttgttggacttttcggctgacttagatccagctgcactgcgtcgtttctatacgaaactaaccgcaacggcccaaaaggatggctggaaggcggcagttgctttggttgatgaagaactacgcgaatatccgtctgtaccgcagctgcaaatgatggtaccagcgtttcttcaaggtttaaaatctgacatcccgacaaatgagtggccagcagttcgggagcgaattattcaactttaccaagcaagtgaacgaccgcattcaagtttgccagaagctcagatcgcagcggaagggttattccaattctttttaagcgagcacgaattcgatgcggcggaaaagcagcttcaaaatctaccatccgaaaccgttgcttatcaggcgctgaagcttaaactccagttgagccaaggacagtttgacaaagcttatgttgatggcgaacagctgcttacaagcgatttctccgcccttaccattgtcctcaatttgttaactcaagttgccatcgccgatcaccaactggccacggctcagctttatgtcgatacactcctcaagtttgatgctgttttcaatatgtacagtccctgggcaattgattcacaactacgactcgcaaaagctgccaacaaacctaaagaagccatcgccatacttcaaaagtccatcgacaagattgatcgaaaaataccggcagttctaaagcatttacctaagcttcagccaatcgcatcacttacagaagcccaaaaacaattagcccaaagctttgctgctgatcctgaactggactatttaaaagacgaccctgaatttcaaaaactcatccaccagtttgatgcgtaaaataccttttggccaattaggcttttaggaactaccaaactgcaaataaaaacctcaccgcgaattttcttgtgatgaggttttttgtttgtgctggcgatccttaatggttaatcttccccgtacttaagaactcatacaagtaccgattcaccagtggattatgctcgtgtaatttactgtgttgcgccttgctgttggtaatctcgcgctcggtataacttttggcacgatctgctaccagatatcgcaatgaccgggctgagttaaccggcacccggccatctgagcctttgcctagatttccatacaagttcaaaaccgcggctgttttgggaaaatactggcgatgctcgtacatcggtttgtaccgatccgacattgtactcggtcggccatcgctggccagcttaatatcaagaccactattcatgccgcccatccccggaaagccattgaaaggtccggcaatcgtaatgagtttctccaatgccggcgtcccttttttatccggcatgagggaccattctgcccaagccgtcgaacccgcagaatgaccgactgcattaaaggccttaacgccatatcgcttcttgacttgttttagaatcttatccagtgtcggtgcatctggccggccactactaaacaccaccgcgattaatggatgccgaatacttggcgaccacgacccactaacactaagctgtccggtgttggtcaccgtatatcgtaggacttggcggaatccgggatgtttgctgagatcgttaatcatgtccttttcagaaccatagccgccaccaaagccgtgaacaaaaatggtaggcgtctggtaggttccggcaacccgtttggtcgaaggggtcaccccgcgattcagccacagccacgcgccgccgctgacaacaagaaagatactaatgattagaaggacttttccccgttttttcgtcatcattcgcctcgctcttcccgatgcttcttgctttgcattgtaccacgcttaccttgattttgaggtttaaggctcttgatttcaaaatagttgtcaaacttccttggcaatgtcatcgtttaatgatatagtgtaatagatagctaatacactagtgaggagggacaccgtggaattcgatgataaggtgccgatttattttcaaatcaaacaatatctttaccaagccattattaccgatcggctcaaatcaggcgcgcaactgccagcggttcgccaacttgccgctgagttaaccgtcaacgtcaacacggtgcagcgtgcgttaagcgagttaattcaagaaggcgtactcgtgacgcgtagggggagaggtaatttcgttactgatgacattaaagtgctgatcgatatgaaaaaacgcgtcatcggctccgaacttgaccatttataccgtcaattagccgacttgaatctaacggcagacgaaatgaaggacgctttttctcagtatgttgacgaacaggaggaacaccatgacaactagcatgatttcagcagaacatcttacttataaacgcaatcgtcatttgattttggacgatcttaatctcaacgtccaccaaggccacttcatcggtttgcttggtgcgaatggcgccgggaagaccaccttgatgcgactgttaaacggtttggcaaccaattttaccggcaccattcaaatcggcgcctcagaaagcattgtcgatcgcaaacaactcagcaatttcagcgaatcactcaaaggtgtcaacgccagtcgcacccttcagcaaatcgccatcgattatgccatgatgtacctcgacttttccgaaaaggcgttcgctgaattcaccactgaatatgaattggacctgcaccaaaaactcaacgccctttcaaccgggaatcgtaaaaagttcatcgccgcgttgactttggcccgcgaaacccaactgtatctgcttgatgaaccctttgaaggcattgacagtatgacccgcaaacgactcatcagcaacatgatcgcttggaaacccgatgccgccaccgtgattatttcggatcatcacgttaacgacatcgtgaatattcttgatgaaatcgttgtcttaaaagataaacatattgtcgcccataaaaacacggaacagctccgcgcggaaaccggcatgagcgtggaagcttactatgaaagtctgtatcaaggaggcaaaagcaatgactaatacctggacaatggcaaaagtgctgactcggcaacgatttaagacagcagtcaatacatttattgtcacgatagtcgcagctgtcattaccgttattttggtttatcttgcgggttccccgaagttatccccacaattcatttacagtatgctttcaccttatgtcttatttggcaccatctatctgtttattcggctcacgattaaacaggaacatacctgggttaataattattatcgtgccgttccgatcacaaatttgaaactgtatgccgccaatctattcagcacggcggttaattttgcctgttatagccttgctgaagggcttgtattaggtggcctggaattttccggtcgtggcatgcacttgccagctgctagtgcctggccagagattatcgaaggcttcattatcatcgcactaacttgcctcttcatctgggcgtttgtcagcctcgtgcatatgttatccgtcaccatcatggcgttcttaccagaaacccggattcgtattgttcaatggggcatttatttagtcgtcattgttatcgcttcatatctattcaatcaactacagcgcctcttgttcatgccgttacacacttacaatttcggtgccgtgatcgctgttttcctcatcatctttaccctcatctctgctatcaacgtctacttactggaaaaatgggttgaaactaagtaatatccgttttatacagaagaatttcaatcctagcatcaccgttaaccttaaatgattggaccagaaactgattatttcgattttttatcgtgttaatgtgaaaaaatatcttgaattggagggaagacgatgaatagagtagttacaaagctatttataaagcactggagaatttggttagcggtgactccaattttcattatctcagggattgtttttggtgccgctatcgttttgttaagtgccttgagtagtgctgatgcaagtagcggtgtggattatggggtatttctacaagtgccaatagtaatcggcggtgtgatactctgcttattcacaaataatgctatgaagcaatgcattgatttttttgatgacaccaatgatattctgcttatgctaggtgcatcaccaatacagctgagttttttgatgactggacaaatgctactgacaggtattataggtgctagtttcgggatcctatttgtagtaccggctgcgagaggatttttacgccttttacctataggagctggttcacaatcattgtccagtttaccaattgctttgacaggaaacacgataggaatcgtcctcttgatacaaacggtcttgatcagtatgacttgtatgagatattgcctgaaaaattatcgccggagaaaagggagagtgtccactgatcgagaagaaggcaagaaaaatggtgggatggtcatcggtactctggcaatcatcggatgtatcgttggaacggtgctattatttttgaaggcgataccagatcccagtagcgtggctgattatacgaatagtatgaaaaatgcaatgaatctgttattactattatggttgttgctgattgtcgccatgaattttttgattcgtcctttatttatcaaaatggtaaagatggttgcccatctgccatcgattaccaaacatccgttgattcgttctgctttttatgatttgcagttccatcaagaaaatatgatcaagctaattcgaccagttagtgttattgccctactgattgggaattttattgccttatttttaaatacaaaaatgttagtagacggtagaaatgatgaaagtgcgatctacgatttgattgttagtctagtttttgtttttggtgcaccgatcttgattagcttggcgaatattgtcacttcaattagtcttttcaagatgaaaacgcaaaaagaaacagataactacttttttaccgggtgtacgccaagttggatttttgaactcaaattgacggagatcggcacggctgcgattctttcgattctcattacttttttaggaacacttttatttgcgattccgttgttaagggttgcctttttaggcggcggtgatattttccgggcaaattggacagtaaatattttattgacgctggggatattttccctattcttcctttgttttgcaccgatttattggttggaaaagggtaagagaaaagcttatgtcaatggataggaaagtagagggatcatgatgaatgaagttgttgtggtaaaaaacctaaaaaaggaaattgagttggcacagggaaatgtgttagaggttttaagtgatatttcttttgagataaagcaaggagaatttgtatcgatcgtgggtccttcaggttcgggaaaatcaactttactgtattgtatatctagtttattgccacctactgaaggggaagtgctaattaagggaaaatctccttatgaatggagtgcttcaaaattagccaagtttcgacggcaagaaattggctttatttttcaggattatcaattgataccatcgctatcagcctttgataacttgatgttaccaggtatcttgaatggacgaaaaattgaaaaatcctccgtggaagcaatcgcaacacggcttgagttgaaagtagaactcaatcagccaattgacgcactttcaggtggtgaacagcaacgagtggctattgcacgaactattttagctaacccggagattatttttttagatgaaccaaccagcgctttggatacccattcacgtaagttgacaatgggtttatttcatgaattggtgggtcaaggaaaaacgattattatggtaactcatgatttggaactcgctgagaaaacttcccgaacaatcgtgatgagagatggaaaaattgaaagagatattgaattgacacagtttaatactgttacaatataaacggtaataaactggttgaatcaataaaaaggaagctatcatctggggagttcaaagttcttgttacagaaataaattaatgaacctttgagtagagccaatctggagagtttgttgccggatattagccggtgaacgatagaatgtgccttggctgagttacaaggcgaccagaaaattcaagaagtgggcagggacgttcaacaaagtaccaactagcaaatcattattcgggttaaattttatcgaataatccccatccaagaacttactccaacagaaaagcctgtgttgaccacaactggtcacacaggcttttcgtttaacttcattcactttctgttgcccaaataatcaaggcatttcttcatctattacaatttaaccctattacgcttcagtttgcgccgccagtacccagtgctccggtgccgcctcgactaagtttgccgtgggtgcaatcggttcatgatcaaattgaacatgggtcttttgctgttcaaaaatcggatcagcttgcggcaccgaagccagtaatgtttgcgtatagggatgcagcggatggcgatacaccgcttccgttgcacctgcttctacgatccgaccacggtacatgacgacaattttgtcactaatgtagtgcaccatggatagatcatgggcaataaataagtaggtcaactgctgctctttttgaatccgccgcaataggttcacaatttgggcctgaatggacacatctaatgccgagatcggttcgtccagcaccagaaacttgggttgaacggctaaagcgcgcgcgatcccaatccgctgccgctgaccacctgaaaattcatgcggaaaccgattaatggcgtccggtggtaatccgacctgcgccaacagctgcaagacctgatccattcgttcctgatgcgagccagccaaatggaagttatcaatgccttctgcaataatatccgccactttttgccgcggattcagcgacgcaaacggatcttgaaaaaccatctgaacttggcgccgaaactgcttgcgctcagtacgggaaaaatgctgaattgactgatccaaaaagcgcacgttgccgcctgaaatcggcccgataccagcaatggcgcgacccgtggtggttttgccagagcccgattcgccaaccaaccccaccgttgtccccggctcaattgtgaagctaatatgatccactgctttaatgggctggcggcctttatgaaacgtaacactcaggtcgtcaatggtaaacaatggtgctgtcaaacatgatcatctccctttacctaagcctgactcgcgacaatggtttgcggtttttccgtcatatctgcaaaccgttcccaccgtttttgaatcgtcactggcggctgatagcttggtgtgcgcggatcaagcagccacgagcgaacaaaatgggtaggcgatacctgaaacaacggcggtgcttctttaaagtcaatcgccatcgcataaggattacgcggtgcaaacggatcacctgtgattggtttgcgcatatccggcggcgttcccggtagcgtaaacaactgctcccgctggtcatccgaactcggaacggcatccaacaagccccatgtatagggatgctgcggattgtaaaagatttcattggcagtgccgacttccacgattttcccggcatacataatcgccacccgatcggcaatgttagccaccacgccgagatcatgggtgataaaaatgacacttagatcatgtttcgccttctgggtcttaatcaaatccaagacttgtgcctgcaaggtaacgtccaaagccgtggtcggttcatctgcgactaatactttcgggcgcataatcaaagccatcgcaatcatcgctcgttgccgttgcccgccggaaagttcatgcggatacttgcgggcaatcaaagcaggatcatcgaggccgacatcttgaatagaagcatacaccgcttttttcaacgccgcgccatgtagatgttgatgtgctttgacgccttcaccgatttgacggccaatccgcatggtcgggttaaggccactgagcgagtcttgaaaaatcaagcccaattcctgaccgcgtaaatgggtataagcttttttgcttgcatgtaaaagatcggtgtcaccatatcgcatgacgtccgctttgacctcggcatccttacccagtaagcctaataacgcatgcgtggttaccgatttgcccgatcctgattcgcctaccaatgccagcgtctcaccttgatgcaaagtcaggttgacgctattgaccgcataaacattttcatttgcttcatgaaatgtcacgtttaaattcttaatggaaacaatatcagtcatgccgcgcccctttcatgaattagtttagccattttactgctttgtataaacgattctagatcgcgttgcttgtcagtacaaatacaaatcaattaacgcaccacccagcaggttaatcgctgccacaagtgccaattgaccatttccggggaggctgccaagaaagcgactggttaaagcagcatgcggtcgccgcgtgtgtagcagtaatttaatgccgactgcaagtaacgctaagccaactagcagccaaaaagtttgatgcaacccccacagcaaagccactaacacgggctcatgcgtcagggaaaagccggttgttgtgacaaacaagccgacaaataaagcggtgatgacttgccagggatgtttttgaatcatgatggtcctccttcaatccttctcatcgcgactgcctgagcaacggcttttgggtgaagttttcctgacgaaacacttctcgttgccggcagtcggttcaattagtcctgaaactttggatccaacgcatcacgcaagccatcccccagaatgttaaacgcaaagacaatggcgattaaaatcaaaatcgggatgtacagttgcaacggatgttggagcatctggtcttgaccattagcaatcaaaattcccaaactcgtattcggtgcttgaatccccagccctaggaaactaagactggcttcaccgaaaatgttatccggaatgctttggccaatatccagaatcaaaatactcatcatgttgggaaccagatgccgcgccataatccgccacaacggtgtatccaacatcactgccgctgtaacataatccaagccccgcaactgcatcaccaatccgcgagcctgccgcgctgaaccagaccaactggtaaccgccaaggcaaatagcatcgtccacataccattgcctaaaaccaccataatcagcatcgtaatgagcaagcccggtaacgaattaaacacttcaataatccgcatcaagatttcgtcaacccagccgccaaagaaagccatgatcatcccataaatggttccaaaaccaatggccaaaaaagtgctcaaaatagcgaccatcaatgacacctgaacgccaatgcaggttcgggtaaacaaatcccgacctaagcgatcagttccaaaccagtgagcggcacttgggccaacattacgactgttaacacgaatgaggttaggatcataatgttgaatctgtggaccaattaacgccgccaatacgattaagatcaaaatgatcccccaggcaacagcaagccgatcctttaacaacttttggcgagccgatgcccagaaactgatacttttgggagcatttgcttcgatggtcgcgacttggtctggctcggtcagcacagttggcgtactaaaattgccacttgcctgaacaaaatgaaaatccgtatcacttgcagccattcgtccatctcccttcagttgtcatagagtttaattcgcggatcagccagtgtatacagtaaatccgtgatgaacatcgtgacaatatacaagatcgccagcagcaccgtttcgcccatgataatcggaacgtcccgattattcagtgccgtgacaaaatattgcccgacacccggaatgacgaaaatactttcgataaacaccgatccggtaataccgaatgccaaggtaaccggtaatgacgtaataattggaatggaggcatttcgcacgatatggtgtaagacaatttgcggctctgacaatcctttcgcgcgtgccgtcatgacatactcacttgagccaacatcgaccattgaatttttcaataaacgcgcataacccgcaatgtagccaatgccaccagcaatggttggcaggaccgtataaatccagccaccccaccaagtctgatcaccgcttggccagccaataatcggaaaccagccaagttttccgccaaaataactctgcaaaagcaggcccaacaccaaactgggaattgacattaagaacagtgccaaaatcgtaatgacacgatcaatccaggtgtttttataaaccgccgccaaaatgccaagcaacagccccagcggaatgcctagcagcatctgctgaatacccagccgggccgatgctggcaaccgatcacgaatcaaactgctcatggtcacagaagggtcactaatcgactcaccaaattgcccatgtaccatgttattcatcgtgatggcataccgctctaaaaccggcttgtccagaccagtatttttatagacttgttcccgtgtggcttccggcaacttatcggtctgcgcactcaacgcatcgcctggtactgcagatatcaagaagaacgttgcagttgctattaaaaaggtcgatatcagcaattcgatgaaacgccgaatgatcagcttaatcataagtgcaaccacctattttcaaaatcatggtttgccatttattgccatctcccaacagtcttaacttacattagtcaaaagaacgacgaatgttttcaattggttacttttttgatgcataagtgtagttaaaggttccgccaaacaccgttgtttgcagattcttaaccgacttattgatgtaaatccgtgactgtgggttggttaacggtacgacgccaaagtctttggcaaccaattgcgtttccagttgtttgtacaaagctaggcgttctttagtggtcaaattaccgttcagtttgttgtcgagtgcgtcaaaagtcttgctactgtacccaccgaagaacttttggaagccgttgtttgaattccataggctcaaatatgagttcggatcagctgtggccaaccagccattgcccagcaagtcgtattgatttttattacgcaattgaacaaagctggcatcatctggtgccgttttgatggtcaccttgacgcctaattgttgcttaatcgcctgtttcaaccaagtacccgtatcatcactgccaacggttaaatagacaaaattcaacttgctgagatcagttgacttacctaactctttcaggccttccttcaacaatgcttggcgtttagctttggtattatattgtgcctgggcttcttttagcggattgccaacatatttaccataattggtcgaaccaacattcagcgtttgcggtgccattgtataggtcaacttatcctgaccatcgctgaccgccttattgtaatcattgcgattaattgacaatgaaaacgcctcgcgaactttggtattcttgaacagcccctgcgttccgccattgtgctgattcataatcaagaccgtggtaccggcaccatcttgcgtgcgagaagtcagcttattactcttggcaagtttattaaagtcagcaatctgtttacccgaagctgacaaggcatctaactgaccactttgcatcaacgacagaacagttgacggcttactcgttgtggtataagtaacggtctgcagttttacctttttagcattccagtacgatgggttcttcttcagtgtgatcttgtcgttcttcttccatgaagtcagcttaaagggcccattgaacacttgatccttaacgtctgttttccactttttattgccgacctgattgatcttgtcgagtcgaaccggataataaatcactgacgccatgtctgacaaaagcgatgggtaagcataagcaagctgaatctggagagttttcttgttaattgccttcacgccaacgtcttcggcactgccttttccagtgttataggcctctgcacctttgatgaagtaagcattggtggcctgcgaaaaggcatttttcttcttcaacagccgccggaaagaatcgacgtattgttgagccgtcaccgctttgccatctgaccacttagcatcacgcaacttgaaagtataagtaagaccatctgccgacttggtataggatttagccccagttaagacaactttatccttaccatttgccgattcaatcgtcgtcaacccttcctgcacttcagataaaatgtcattttcattggcattgcgcatatcattgacatccaatgtcgtcgggtcatcttcttcagttagattcagcgtctgagcattcccagacgccgaaccactccgacctccgcaaccgaccaacaacgtcgcaagcgcaacgcctgtaataagtgccgttaacaaatggtgctttttcataaaaagccatctcctaaaatatagtgagcgtgagtcagcacgcttaggaatcggagtgtaagcggccttgggcgtgatggcccggtcttggccattgcgaccaaggtccttacacgcagattcctgcgctgacgaacgcgttatagtgagcgtgaaccggcgcgcttagaagtcggagtgtaagcggcctcagacgtgatggccgcactttggccattgcggctgaggtccttacacgtagacttctgcgccggtgaacgcgttatggagcgtgagtcagcgcgcgtaagaacggtggctttgcatatgataaccgggcccggcattgatcattttagccaaatttcctacacccatatttctacgccagcaaacgcgttagaaaataaaaactggcggtgcatctaggattctagatacaccgccagtttcgttcttcgttcaagtcacgtgattaccgtcacctaagccaatctccagccatgtaaatagaaccgctatgttgttcatagcagctgcacatgcacatggacatgacttggttaaactgggtcatcacgtgaactcctctcgaagaaattgtcattagcatacttttaaaaaaacggttcgtcaacgggtaattttgtagaaatgtctcatcaggaaactaaataacattaagaaaaactggtatatcagttttggtagatactcagccacttttaattcgctttaaaaaacacttttttaattgcaaaattaatatttgagtcagggcctgaacgagtgctaaatgtctccgcgaacaacgaatcaatttgacacgtccataatcgtgtatatgttgccagctgtgttcatttaaaagtgttttatttaaatctatccaaaatctgacttgcttcatcagcttaactttttgctcttttaaaaaagccgaccgagtaagcgctcagtcgactttcccagtaaatagcatagacacttcaggccttcgcgcgttgatggaaaaggatccataaaagtgctaagccagcgccgatgaataatagcgcaggtacgatattcgccgctgtgaacataacgaaggccatcgtggcaaacaggccgccgatcgaaaggccaatcccccattgctgcatcgctgtcaggctggcaaaggaggtacggaaaccaagcgccaacagcaacgacccaacaaatgcaatgaggccaaatacgatatgtcccaaaatcaaccagttaaacattctctatctcctttcttggtatcttcactatacggaaaatgagagcgcttgccaattacttttattcaaagcttggcttcgttcaaccgtccatgttctaactgcagcgcgcgatcccaaaattgttcaacatcttggcggtgcgaaatgacaatcaatgcgactggtagttgacgcaatcgttgactgaggctttttgcggcggcggcatccaaatttgcaaagggctcgtctaacaccaaaacattccgtcgtgccaaaagtgcccgtgccaaaccaatcttttgtaattcaccggccgaaacattggctcttgtctggccatgaagcggcgtggcgagtccttctggcaatcgctggacaaatgtctgtaaatcagtctggactaacacttccgatagtgccgtctggcttacattgcggtcaagcgcgatgttttgccgcaacgtatcatcaaacaaagccaccacttggggtacaaagccgatgatgtgcgcaagttggcgtggagcttcaagagtagccggttctatttgaacactgcccgcttgcggtgataaaagccccaagataattcgaatcaaagttgatttaccgccaccgcttggccctgtgatcagaatcttttcatgtgccgccacatttaactttaagtccaattgcgccaaaaccggccgagatgcatctggatacgtgtaagtgatgtgtttgagaagcaactgttgtaccgagttttttggctggtgagctgagggcgcttcttggctttcagcagcaacatttctcgatgctgcttgtaacggcacaattaacccgaagattcttttagctgcaactagattccgtgataactgagcgtactggtctggcatactgtaaaataaccaggtaaaactgggcgtcagcattgcaaacgcagcaaattgcccgatggagataaatttgaagccgacaaacagtaattccacgcccaaaatcacaatatcaacaaataagcccagtgcaaaccccatgacaatcgtaccggtttgttgcaggcccatgcgatattgggaattagcaaagctttggtatgttcggctaaatagttgcaaaccaaactgttctttttgataatctttcagaagcattcttccggcgagaatttctaacagtgctgcttgcatccgcgcattttcagattgttgcgtgtcttgtgcctgagttaaacgaccggccattactttaggaatcagcaaagccgtcaagcacaacccaataatgatgagcatcaacggccaggagcttaaccagccaaatagactggcagcgagaaatgaaagtaatccgactaaaatagccgttaccgatttgataaacaaaggtgctgctagtggcgcttcggttgtcaaactattgagccgttcatttcgagcttcaagatcgactgcaaccggtccgttcattagtgctgccattaaacgtgattgcagcgtttgggtgagttgataatgtgcctgcgtttgccagcgtgcgatgagccagcgaccaccgccaatcacccctgctgctacaacagccatcatcatcaacggcatggtaagtgcacctcgctgggtcaaccgttgaatcaaccgcgctaacccaaactcaattgcggcacaaatcatggcaataatccatagcactggcacaatccgcgtactaaaaagatgccaaaactgctttaattcagtcatcttattcacccaccttaatgatttgatcagcagaagtgacaaaattaaacgtatgcgtgatcatcaaaatgccgtgggtgtgggcagcctgtcgcaacacttgcatcactgccatctggttggcagcatcaatatccgagaacggctcatccaagactagccacggacgatttgaaagcaaggcgcgggcaatgccgaatcgccgctgttcacccggcgataactgtgcaggctgaagaatctgattgagatcctcagcatattttcccagcccaagtttttccagtaacggtcttatctgaggtgacgaagcctccgtgttcaaaagcaaattggccgtcaccgaagcggtaaacatcacgctgcgttgcgggacaaatgccattaattcagccggggtgactttatctacggatccctggagcctaatctgaccagatgttggcgtcaaatcgccgaggatcaatttcatcagcgttgttttgccagcaccgtttgccccaacgataaaagtgatcccgcgattatggattttaaaattcaatcctcgtaataattggcgctcactatgcggataatgaaaagcaacctgatcgcctacgatggtcaacagttgtgccgaatcgatctcggtagacgcgatttgaacttttgatgatgcctgcaagcgcggcaaaatccggttcagagaggtccgttgttgcgcgagatagccaatggttggagccaatcctaaaaacggccacagaatggaccctacaccggcattccaggctcccaaaacaccggcaacagattgatgcgtcagtggaagcaagccaaaccctagcgccagtgtcagcacctctgccaaataaatgccgccattaaaaatacctgccagcgccccggttgcgcctgccagttgccgaatagccggttgcgcttcctgaaaaatggtttgatgccgctgccgaatataaccaaagacattcagattacgaaccggctcaaagtttgccaaaaagttattgaaaaatcccttatgccgatcatccaccgcaattaaactggtttgtgcctgattttggcggcgaaataaatggcgcgacaccaaggcaaataaaagcccaaatccaatgaaagccacggccaactgccaagattgtgtcgcgacatacaccagtcctaaactaactgtcatgccaaaatcaaccaacggcagcacaccactgtccaaaaattgcatcacattctgcgtatccgtgatcagtaaattcgttgccacacccgcatccggtacatcttgagcatcccccgccaagaaacttgccatcaacgcccgggcgactgccacactcaagcgtcgttttagccgctccatgacaacgcctgacagccagtagagtccggtatagaccactgttgctgcaagcatgccagcaaaaacacctatcagcatccctgtgtgacctgctaatgcagcggtcaatcccagctgaatcaacatcgaaatcgccacattaaacccatcaatggcaacccgcaaaatgaataatcccaacaaccatcgtttcttcaaggcaccgatttgcatgattttttgcattgcatgtcccctcgcttcctccgactggccaaaccaatcgaatcgactacttaggactgcacaatggcaaacaaaaagacgacctctcagccgcctaacgttaatcccattttatgaccgaccgaaagtctacctgcgaagcgcatcaaagaaccctgcaccaagcgcagccccgacattaagttttgatggggtaaatcggtctttgatccgcattggaaaaagcctccgttcgacttgttattttatggtgcaatagtaccaattatttggtcaaaaggcaacgaagaaggtttgtcatttaaaaaaatctacggtgagtttacaaacattcacatgctgtgcttgcctattaacgttattgactagctcactgcggttagacaaaaaacgacactgacaacgaaatttccatcgccagtgtcgtctaatttacttattttctaatactgccgcgaataactagcaagtagcgccactcatcaggatgcccttcttaaaggccgccaacacatctgaacccttggcaattcgaacgcttccgtccaaataagcatgagcgtcatctttgatactgatcgcgccttgcttaaagtccatcgccaagccacttgcaaagaaaatcatgtcatagtcggaagtgtacagttgcaatccggcatcattttccaatttcacttgataatccggatccggttcatcaaggacaattaacgtaaactttgtgccgatactgcaggccccgccttgtaaagaataccgcccgccgccatcatcagcaatcaacaacagaatcttctggtcaaaatgcttcttcttcatcaaatcaacaaacgactgcgataacttgatcgttgccatcttaccgtcacctttcctgttacttacttttagtgtgccactttttgtgaggaaaatcaattgtgtgcgaggaagattacgccaattgttcaacctgatgacacgcttgatcaaagactttaatcgcatctggagccttatcaacagccaccaatagcccttttaccaaccacaagcgcaccgttgctaaaaaaattaaccgatcaccttcactaataccagctaaacagcaaaaacgctcagtatagacagatagtgcgactctctgcctcggcataaaaccatgataaagagccgcaaagtccaaaaatcgcggaccgcgacgagcttgcccaaagtcgatgacaccaacttgcctattcgtcattgtgagcaagttccaccgtcctaagtcgccatgcacccatgcttcctgagcttggtcgagcaagagcagcgattctatctgagaaaccaaatgtgcataaattgccggctgagtttgctgcaacttgggatgctgcttttgccacagttgctgcagtggttgcggatcttgcggttgccaatcatattcaaactgatctaagcccttccgaatttttagataacagtttagtgctgccgctaatgtaggtgcagagggatggtgttcccagaatcgctgaacttgataaattttccggttcacactgataaatggttgctgagcctgggttaacaaaattgctggcgtcaagcggctatcaacgtcttgaatagcttgtgttagcgcaaattcaaacaaagcctgtgccgtactgggaactgttttgactaaaactggtcccgatattgtctcaattcgccatgccatgctgcttttaccatttgtcattggaatcgtttttgtgacgtgaccaaggttataagcaaggagcacgcttgataaagaatccatttgatcccctccactttttcaactgatggctcactaacaagctttttcggtgagatcgttcacttgtgacactactggctgacgattccctacaaaaccgttaaaatatcagtctaaagctgcacgacaaccgcgtctaagttagcataaaataatcgtacgcagtcagcaaattcttttttggaaatgaggccaatgggcatgaaacaccgcaaccgtttattttggctgatcttgcttgtcgcaggcgtttttctggtttatagcaccgaaagtccgcttccgtttacaacccgcgaaacagtgaaggccggtatcgcccaggcgtggactacaacaacacacactgttggtaactggctgcatggcaattcatctgcggactcctcctccaccagtcttgcctcaagcaccactagccaggcaacttcacgctcggcaagtacgccagcaggagccacctcggccttgaatattgtccaaggccgacaccttaagcgtacttactattaccattttgatgccaatttaccgcaagcagaacacactgtcttcaccaatgccgtgcgcgcttataacgcaaccggtattgttaagctcatccccggtcaaggcaaaagaagcgacaatcaaatcactttttccagttatcaaaaagacatgagccaagccagtcttggtaccactgagcttggtgaaggcggtccgaccattatcgttgaaacgctaggcgcacaggttaccgttatcaaccatgcccgcgccagtctcaacctcgcttacccatcacaatccattaatgcggctgtggccatgcatgaacttggccacgcgctcggactggatcatagccagtcgactgattcggtgatgtatccagtcacgcgcggggttacgcaattatctgatggcgatattgccgggctcaaggcgatttatgcccaataatttattaattaatctctcaactctctccaatcatagctaaacggcatcgacaacaagcgcgatacttgctgttgatgccgtttaatcttgtctcggactcataacatgtcatttataattgacaaaaaagcaaccttcttgtatgctatccgtgtcaattaaatgtgacattttattttgaaaggaggtagcttcccatgaatcgtgtacgtgaatttcgccgtgaaaagaaactctcgcagcttgctttggcagaaaagatcggcgttgcccgacaaacgatcaacctcatcgaaaatgggaaatacaatccttctttggaactttgtctcaaactgtcgtggacactaggcacggatctcaacacattgttttggagggaaaagaatgaagaactttgagagcaaactgatcgcccgtattttcggcattcaagaaccaattgacgaacacgcctatgctattctcggacgcgcagccattcatgccgtcctcggaattctgacttttgaactgacaatcaatgtcatgtctttccttatcccatttcacagttatgaagacgcgttttatattatgtccagcatacaactgacgggaatttttttgatcttgattgccaccacgaccctagccatcaggaaaaacggactgggaaaagaagaagtgacagccgatgcttatccagctgccttaaagcgtgcccggcgaaaagctttcttaagtagcatcgtttccaccgctatttttcatttattgggcgccattctgtcattgcgtgaacaaggattcttaaccagtttggttgataagcaccgactcatccaaaccgccatcttttttgtattcttcaccgctatgatactctttgcagtaaaaagaaaccttaagattatcagtaacgatgactaaaaagttgttcgcttgcccaatgatgacatttcaaaactgccagaaccgcttttcacataagcaatggttctggcagtttatcttttcacacagacatcagttaggttaagaactcatttaatctcagcttctttgtgatcatataacaaaaaccaccgcgggaatcgaacccgcgtgtgaaatgtaaaacttcacagcaccagcgtggttagcgatcagtttcgatcattggttaattgaaggttccatcattccctgtggcaacagcagttgaggctgcgtaatacgagccttcgtcaatgacgtaaacgccgatgacgatgttcttgtagccagaattaatgatgttttggtagtgaccgcctgtttcaccatggttgttttctggacgttcatccacaatgtattgtttgaacatcgcttccgcaatcaaagtgctcagcttatcggcactgccatcgacatctttcttccaaagcgaggaaattgaaatgttctcagtatttcggctcatgtaaggctcgcctttttgataggtgacggcttcagtaccacttgctggtgcattaaccggccgcgtgtggctaaacttgaacataacctcaacggcgcgcggtgcttccatctcataagctttcggatctgaagttaaggaagtttgaacatgaccggtacgcttctgttcaccattgatcagcacattgaacttcttgataacggccatagtcagatctttatctgtgtactgtgcggcttgttcaatcgaaactttccgatcattcttttcgatctgcgtttgaatcagctgcgtggtagcatcgttgacactcttaattgcgccgataatggttcctgcagcttccacattgcgccaaacatttttcgtcgtgatcgtcgttgttgtatcccaagtattcggatccttcgatactgttgtaattggcgttgacgaaatcttgacgtaacccgtcttatcagtcaaggtattgccgccttcgtctacatcaacttcttttgtaatggttttagcttgtggcttgtgatacgtgcttgtgtaggtcattgttgttgtcttgtgaccatcactagtcgttaaccaacttgtagctgatcctccaccaatgtaaacatacccatcagtagaagttagctcgtggccttgatcatcaacgttaacaaacttattgatgattgtttcgtttggatcggtattctttttccaaacgttggtcgtggtgaaggttgttgtcgatgagcttgggtcttctttagacgtttttgaactgttaacaagcgagtagttgtcaacactagttaaaacgttacctgcttcgtccacattgacggtcttgttcacaatggctggcgttgtggccccgttcttcttccaaacaatcgtggtcgtaactgttgtggtgatgttgccagcattatccttggtatcttccgacttgctggagcgggaaacttccgtataaccagccgtgcttgtcaaaaccttgcccgactgatccacgttcacagtcttgttgacggtggtgtgggttggcgtctcgttcttcttccagacaattgtagtcgtaaccgtcgtggtgatgttaccagcgttatccttggtgtcttctgacttgctggaacgtgaaacttctgtatagccatctgtgcttgtcagaaccttacctgactggtccacattcacggtcttgttgacggtggtgtgcgttggggtctcattctttttccagacaatggtggtcgtaaccgttgtggtgatgttgccagcgttatccttggtgtcttccgacttgctagaacgtgaaacttctgtatagccatctgtgcttgtcaaaaccttgcccgactgatccacgttcacagtcttgttgaccgtagtatgcgttggcgtttccgtcttcttccaaacagtggttaatgtaaccgtcgtcgtgacatcgccagtcttaggatcggttgattcagcaacttgtctcgatacagaaactttagtatagccatctgtgtttgttaacgcatttccggactgatccacattgaccgttttgttaactgtctgataggcaatcttatgataaacattggtcgttgtataagtcgtgattgtgtcaccgttgctagaagtctgaaccgacttgacaggcgttccggcagtgatgagtttgtacccgtccaagttgttgagcgtctggccattttcgtctttgttgatggtgactttcttgtcagtgttctttggcacatagatcgttggtaaagtcttcttagcgtcagcaactgatgtttgagcagcttttacagtctgttgatggtcggttgtgtcgactttctcagccttggttttagcagcggccaagtcagtctgagctgtcgcagcatcatcttgtgccgttgccaaacgatcttgccacgttgcaatttgagcgttaagcgtatcaatcgttgtatctaattggtttactttgaccttcaaatcagccaactgagctttaacggtttctgcttcttggctgttttgactcgtcacggatgcgggtaaagctttcaaagttgtttcagcttggtcaaattcattttgggctgtcgtagcctcatttttaaccgcattaaccgcttgggtggctgcggttaatttttgtcccgcttgactagctgtttgctttgcttgagtcagagctgtagttgcatcggctaactggccttcataacttgtcagcttttgttgtgcaactgccaactgggcttttgtttcattaacctttgattgtgaatctgggttggtcttcacttgatctgccagcgtatttagttgattctgcaaatcgctcagttgcgtggtgacgctgttgacttgggctgtgctctgatcaacggcggcttgttttgcagcaactgccgcatttgtctggtcagcagctgtttgtgcttgctgtgctgctgtttgagcagcttgaagcttttcttgcgtggccgccactttagccttggctgcatcaactgccttttgcgctgcagttcgtttggcttgcaactgcgccaacgtctccgtattttcattgttcaacaagacggtcaacttagcttctgcttcacgttgggctttttcggccgctgctttttcagcttctgctttatccttagccgcttggatcgcttccagttgtttttggagggcatccttatcggtactgccgggattaggtgtgacagcaggagcaggtgacgcgccaccatttgaagtgccgccagttgatccgccaactacagtatatttagcctcagcttgttgggccggtgtaagggtagccggttttgctggatttaaattaaatgtttgattatttcccgaggtgtcttgcgtcgtgactgtcgcattgtcaccgctaccttgcagggataacttggcaccggcataaatcaagtccacgttggcgatccgattaatggctgccagtcgcgctaccgatgttgtgaagccggtgtgattcagcgcttcactgattgttgaaagcgtgtcaccccactgaatgttgtaattcgtcgagcctgtctcggaagctttaatctgtgcttcgatttggcttactggacgaactttccaaactcggccctgattggtcgctgtttgctgcgttgcaggctgttggtcacttgcatgcaccacttggccctgacttgacaaggcgattcctgcagtccccattgcaaaaaacgttaatccaattgccaaccagccatgatgcttactatgaaccaatgtcaccttatgttcgttgttcgtaagcgctgtccaaaattttcgccgctgcgttgttcccatttgtactcctccaaatcctttaatattaaatacaaatgttattatacttctattttcgatttctttatacaaactattcaacaatttttgtaaaagttaccaaatcttttttacagaatcaatttgcaaattcacaatgatcaaaatcagcgtaaactaaaagaatatcccgccatagacaggatattcaaggcacaacttactaggaagagacagatcctgcaagccattaaaataaactaatgatatacgaaccgcaacgataatcttcgccccacacgaaaattgtcgccacacagactgttatattttgtaagcatcttgtcgaaaaaaagaacatccccatatgcttttcatgatgcattcaaaaaagtcggcttgatctgcctacgacttgcagttggcaacatgattgaaagtatatacactaccaccccaacagtggcgcaaaccttatccgtccgatgattccagcgaataacaaggtttaccatggcaattgctcctcacatcatctgtcaaccacaaataatattataaagctttatggtctaataagtccactttttttaaaaatatgtgttatttagccctaatccttcaatccggagtcaggtagcgttgatgttatgaccaaggcagatagggggttaagggatgcggttacaggaaaaggtcgccaaaagaatccacgaattaagactcagcaaatccatgacccaggaacaactagccgaaaaagccaacatggacgtttccatgctagccagaatcgaacgcggaagccgcggcgacatcagaatgagaacactagaacgcatcgtttccggattagacgtcagttatcaagaattcttcacttttccagaagacggagatgagacaaccgaactggcttcttcaatcgctttgattaaagatccagaagttatccgggcactccacaagatcgtgaacacgttgattcaaaaggacaataagtgatgaccatgcgtaaacgactgatcatgaatttatttaatacaacatcttttcttatattctcaaaaagcaattttaaattcttactcttgttttcaacgtattcaatcaagtctcattaaaaaagccgccagttttgtgcaaatgcacgcgactggcgactttttaggctcggggattttaaatagtgttcgtctgattgggactggtctgaaacgcaaagtggccaatctactggaggcttacgactcttcgaaataatagtcgtctaacgtaaatgtttgtactggtgtgatatgcagacgatattgttcaaccagttcagcaattcgctgcccgtcaactaaagttactgaacgattgccacgaaccgccttagcttttgcctgatctgtgaagtagctggtcgtaatgaaaatcccatattccgcgttaaagccatccataacgcctttaaacttatcaatatcaggttcagatactgggctatcagtaaaccgtttcgcttgaattgcaacgcgtgatgtacggaattcaccagattcaaagtaaccaaatccatcaataccatgatcagccgacttcactattcccattttcttgtcaatcttgacacccatctttgaaattaaaagtcgcgaaaagctctcaaactttgctggcgaaaactgtttcagctgactgattaactgtgcctgccaagtatcggaattatcatctgcactgtcaagatccgaagttattggctcgactttggccgatgcttgacttgcattttttgcgcgccgcaagtcacttttcttttgccaataatcggcaattctcgccgcctcatcagcagatagatacaagctagcatcagatgcgcgtcctttttctgtcaatgcaatatcttggccgcgttgtggtggttcaatataccccaaaaggcccaattcttttaatgaaaaattgaaatcaaaatcaaatggtacgtattctttgccggatttcgctgccaccttttcaaaaacatcatcgtaggtaaaaccagtttcttcgttgtcagcaatgcgcttttttatttgctttctagatgcaaccccaccaatgtcttgtaaagccagcaaaatggcacgaccagcatttcttcgttgatacgacatctctctatcccccgtatactcactaattcattacgtcacaaacgcacctcaaagatcaagctatttcaagtccttaaccgttcgaaaaaaaggcaattctcttaattctcccgcatgatcaagcgagcctcagccgcagtcggtgctttccacttctcatacgctcgctgataaatacctggaatctttttgatccggctattcatttcatcacgatcaaactcattcatatcaaaatgatcaagccaaaaccactcgcgcatagcttgcttctcttcaatatcatgatcagtgccagaagtcggattctgaaaagcatcctccaactggtataagccatatgtgccaccgatgtcttcaacaatgccataacctgcgcccgcaataacccgcggcaagtcccgcactttaagctctggatcagtcataatgtcaacaagcacaatactaaccttccacccatcaccataatcgtaattcaacaccgcctcacgatgccccggcgcaaagacactgtcaatctgagtagccaccgcatcggccacacttgaaccataaacttcgcggtcttcgtcaacatccgtcgtataaacagtgtcatccttagatcgacgcaaagagttttgatttgaaggatctttaaaaaccgtcacattgaacagatgacgcgcctgcatctcaaaggttgtcatcacagcataggcaagctgtgcaacgcttcgattcagaggaagttgaatcaaccgccacgtctcgggcaggacatcatgtaacttgcagtaaaaggtgtagattggtttcgaagccatgtaatcctccatattttgctgggcaacttcaaataaatgtatctgcattttgccagacaaaatcgctttaatattcatactgtaccatgctccgcttataaaggaaggcaaaactttaagtacgcaaatcaaaaaaatcttgacgaagcttgacagcctgtttaaagtttgttctatacaagatacataatattaataatacgaacaaatttctctcgctaacaagactttatctcagtttttgagcggactaaaataaccccaacagcaattgttgaggttattttttgtttttggaggaatcgctatgaatctagaacaaaccctgctcgatttacagaatttgaaatttgaaatatttgtcagcgcaaagtatggtcttgactaccactgctttaaactgttgacacttgagttaccggacaagactatcaatctcgctgacttgtatcacgctcacaaatctagtggtgttgaagcacttgcccatcaaattgtcgctacctacgatttatagcttcatcagccgtaacatgagcgcggcggcatcttcacgtttctcttcaggctgctcggccaagtagtccaaaagctcaacaactttaggggtttgcaaacgcgagtctctgaaaaaatctgccatctgcagttgcagtgcatttgcgatcgctgctaaattggccaatttaatgttatcaacacgctcacgttctagacgggaaattagcgatacagaaacatccgctttttccgccaactgctcgatagtcatacccttcgcttgacgtctttccctcacaattctcccaatattcatcaacactgaatgattcctcccgtagaagcagctttaatgccacgttacgagaattaataaactattcaaagggatttagatatatcttacaatactggaatatgtcagtaatgacgcacttatgaagatacaaattttgcaacatgcttttaaaaatatttatgagtccataaaaatagccctatatctcacaactagttgagttttagggcctttttggacatgtacacaatgatctccacttaaattatttatgtaagtacaattttcaattttcgtgcggctacttacaacaatatatacttcgcttcatcattataatcatcacaatgatacgcgatgatttattttttcctagagtcaggattgttcttatctggatcttgtgaaagtttcatcatcccaagaattgttttcccctgtacctctttgatcaggtaattcaaacgtgtctttatcatgaatcgtaccttttaagttaaatccatagtcagaactgctttttaagacgatgtggattgaattaccgctgactttccattttccatgccacgtttttgagtctccattagcagtaatttctccatacccagcactaccgtcttttgataaggtcatggtagttctcccacttgttccatggtaagtaccagccatggatgaaccacaaccagataacgtaacaagcataatgactaacaaagggacgaaaataaatactagcttcttcttaaacatatgaactcctcccaaagtgtgttgctaagctttgcaccgattctaaaataacctacctcaaaacccttaactttcccccaccatctttatcttcgctatttttgcagttaagctcgagcgttggattcgaaccaacgaagcttgcgtagttgttaatgcggctgcattcctccgtacgtgcaagccggggcaggtgccgggtctttgaccacttgacaagctcgtgcatataaaacaactcagggcggcgtacagcggcacgctgacaatggggacttccatagcaccctgaggtcatactcacgccaacattttgcggtggtggcgcaccatcatagccctttattcggccaagtgattaaacttggtcaaggcaaccggccggatttgaaccggcgacgtccgtcgtttaggcgggagctctaccaaactgagctacggttgctttggtacgtttaaacccgatcgaccgtcatcacgtccgcaacggctatgcgtggtccatttgattgggaccaaatgcgtgatacaaccgggtttggtattagcgcgggatttacgatttgggcacccgcgcaagtacccgcggcggaatcggaccgccggttgctaagtcaagttagcaacatcaccagatcgggaaaggtggaactagcgaagcagctggtggttttgggccaacaagtgatagccatatgcaccgatggcaaccatgcacaaaaggccgaaaatcaacacggaaatggggtcagccgtgatgatcagatgaacgatcagtatcatcatgtaaacgagctgcatgatgaaattgcccaagacggcgaagatatcgtggataaaatcaaatatggtcacgattgtagccttctttcaagacgttagactttcggggttatagatgcatttggactggagttatcgtctagtcatctggttgcgttcataattgtaccagccaaccactaccatactcaggatgacataaatgatggtgacgatcgaataatgggtgacttctaggctgaagatgatcatggccgcataagcgacttccagaatgaaagttagcatggtagtgaccttcttttgaggtgtgagattttagaacttttggtaccaagttaagtgcatgtaggtctgaatcttaccagagacagtgccattaggattgatggtagttgatccggtagcagttaaggtatcaataactgcagagacattgttagggtcatctagtgcctgagtaacacgggtttcccaaatagcttcggcaatttgctcgtcagaagtataagggttgctgtctgtcggccatgtttctggggtggctagatagagatggccatcagcaccaacgattgagccgttgtcgcctggtgtgccgaccggtttgccccaatatttgccgtgtgacgcaagattgtacttggccatcacgagctgcttaatgtgatcgacattcggcgtataggtcttgccagcgggtgccggagtttcgtgcttcttgaatgtgaacgtgatgaccgcgccactcttggtcacggtggcggacttgctggaattgtcgttcaagtcataaccactaacagcgacggaactggcttgcgcagtgacgctggtgccgactgcctgatgcgaaatcgtagcggtctttagaaccgtgccgtcgctggtgacggctttaacggtgacgtccgcataagtggcggttggggtacttggttgtgacggagtgctgctgccagaaccttccgaaccggaaccggtgcttggctgacttggcgttgaggcactggagctgctaccagaagcgccggaagaactgccagcggaacttgaaccggcggaacttgagccagagctggcttgcgaacttgagccagagctagcttgtgaaccggagccggtacttggctttgaggcactggagctgccctcactggcactggaactgctaccagatgcagcactagaaccggcacttgatccggtacttggggtgcttggggttacggcactggagccttcgccacttggggtggtcgcaccagtcttgccgccggtgacacccgagccggtgctttcagtaccgcttggcgtggtgcttggggtgctggtgtcagctttagaactggtaccagcggcagaacccgtagcaccagtcgttgcgccagtagcagtcgtagtggtcccggttgcggcaccggtggtattcgctgcgatgttacctgcgccactgacagatgctttggattcagcggactggcccggagcattttgcacaaaggcctgagccttagcggaaccgttcagtgtcaatttggcacccgcgataatcaagtcgcggttagcaatgtggttgttagttgccaattgatcaatcgtgatgccggtggcttgactgatgccccaaagggtgtcgccccattgaatcgtatagattgcggctttggcgttgcttgggtcaatgccttgggattggatttgctgcttaatgtggcttggggtgttggccgtccagttggctaaagcgttattgcttggcgtcttagcaatggtactggtagcggcgtgaacagttgcggctggtgcttggttagcaaccaagcctaatgccatcggggccagtaacaagccggtagcaatggttgtggaaatggttttctttttcataattggaagcctccaaagtttttagtgtaaataagtatctggtgacattatacagcatataaatacgtcattaaagatttaattgcgacttttattttacgtttttccagacacttttcgcaaaaaaaataaacccttcaaaatggtcgaagggttttgcggattatctcctgttaagatcacggttgttcttttaaaacattacccatgatgcctctctttaagagctaatgggtacgataatattcagtcgtgaaatacaaaattaagccactattggtttcaacttgcgatttaaaaactgcgctagggctatttgcgattttttccctacacaaaatatcaatttttactcctctcatttccttgggtcgttgaatgcctttgctggcgcgataaattcgtagtccccgaggatacaacactaagcgagcgccctttataattcgcttagacttttttcctgtcaccttatccgtatcctcaatgtcgagattggtcaaatacgccatcaaatatgatgcaacattttcaccattatgaaggcgcttgaccttcacaaaaccttctccccacatgttagccatctgatcattggatatagtcaaagaactgccatcatctgacttcattaaaacatgaaagtgccagttaccagaagcttgcggttcaatcacactaatataactgacacgataacgccgccgcatccgcagtcgaaatcgtgtgaaagcctgataagcatctttcggatcttgaacattccgcttgaacgtcagggttacccatagttgatcagcgccaccattaaaatttgcaatcaccaaccggcgtaatttccgcatcgttcgcttaaccgacgctatatcgtccgcccgtgtcaccgatttaggctgcatattcttaatctgaccagttcgtcttaccatatattgatggttcggcaaaactaaaattggactggaatcagaaatactgttcgtcatctctaatgtattcccatactttaacgctttaacgttcgagaaactggggagtttaggtttaacgcgtgttctatgccctttttgcatcatcttcacctgccgttcaaatactttctgagtgtgtattgtgaagccagtttaaacgcaattgtgatcgaagtttaaaagttgcagttgcataatctgtatacaataaatcagcaatcgttcgaatagtgtcttcaaattggaataccgaagctcgtaagtaaagcaggttgtcgatttcacttgcagtgtaagcccctgattaacaagaagcaagcagagtgatttttgctttgcgtctttttgttacagttaaaatcatgttaattgctaagggcaaaccttgattgaatgtttgaaatagcagtcgatggttaaatcttcaaaagctaaaaattctatgccttcttaagctgaatcagtcacatcacaccaaaagaaaacaagaacgcaatcttatggtagacaagtacctaaccctcagttctcttttgtcgccacctactgatgaccccagatatgtcgttaccacgccgataatcaagtagacagtcattcataagtcttcccattgcgtgttgaacaagcatgtaactgatcgtagtgtcttgtacttcttgttctgtacttttaaagtccatggccattcgaccagctataccagtaatttcatcctcggtcggtttgatcagactttctacatcgtcaatccgttctgccaaaagtgactcaagattgtttttctcgtcctcagatcgaaacagcacgacacttttataaaacgcattcaaagaatacggatctgctgttaacggtagtcccgttgcaaagagattttgcactcggccagcaatcgtattttcaatcaaacagtagtacgacaacggcctactactatcacttcgtaaaattccaacatccggtttaacaaccacaagtcttccgccatccaaccaaactactaacaaagtatctatcgtgctttgacggaactttattttcagagactgccaactcatctttgtccgaaactgatccaatgagtatgcttctgctttataacgatcctcatcatcatcgcaaagaaccatgtaaaaatctggattagggctatactgaaacacaaatccatcagcttccgtatacctccagtttgaggtgtcgcttaaagtatacttataccgttcttcaattggtgtatccattctaaaatgttttttgaataacctttcaacttgatgatagtcagcggttgaatctcgagcagtgttaacatcctgttcccttgtgaatatctggccaggtaatataacattgttcggaagccctttttcattccactttctcccaagaaatacaggcacattgttagaattaaagatccgaataacatcaacttcatgctcaccaatatgtatcgtctcaaccccaagacgcggaataagctccccggaaattggtaatttcctcataaagtcaattaactgttgctgattaaggcgccagttttcgtcatcctcaacgccagtgaccttacgttgatcgtttacaccaagaattaataaacaatcatcatgatgaactgtatttacaaagctaaaaatatccttaactaattctggtttttggcctttatggtaccaatgttctttgaagtcatgatgatcgccttccggtttatccaaccaaattttaagctcttcagtattcatcctcacgccatctcctcacttgaactaataagtgttttcaatcaatactgaccccgttattcgtattaattagagcattatctttctccgagtgaccttttcgctatacacgtacgcatgactttgaacaaatccacatagcttaccagccgcccgacgtctttatgctttaactgcgagtaactaatcattgctcgacgaatggtttcagaatctgactcatcccgcgtacgcaaaatatcgcaaagcgtgcgttcatatatggagtttcccctgttttgtttttctttgtcgttaaacagtttacaggcgaaactcctgttcttgtatttttcttttggattaatgtgcatgcaaaaagcggcgaatatatggttggcagagtatgcgccgcgacaaccatcagaccaaccatacttttgcttaattaattgagcaccgtacagaaggcgaaatggcttagcagcacgacccaactttgaagggaagattaattggtacacctcttccatagcagcccacggaaaaaatctcggccaattgcacccaatgattgttagtgctgagtggcattcctagtgcctatcccagcgattcaaatgaccgttgaactgtctttttacgataaaccatgtgacttctcatatcgttggttgttaaactgcaagcccctacgccgaagttatgcggtttacaggcatctggcactgcattttgtttgtaataataacgaatgaaagtcttgtattacagacagttcataattattcagtagaccctaatgtaaatgtttgtaggtgtgatatgcagacgatattgttcaaccggttcaacaatccactgcctgtcaactttaattgttttctagatgcaacccacgaatatcttgcaaagccagcaaaatggcgcggccagtatttcttcgttgatactgcatctctctatcctcttgtacccgccaatgtaacggcaacaaaataatttggaaatttctccacattttttccttcaaaatccgaaagatagcaaatcagccttttctgtgtattattggcttgcgtttttctatcaactgactttttcgggcacccagaatagcctcaatttgcagtgtttctttggttagaccatttatacttggatttattccagagttatgttcagtaaacgtcgtcactcgccttgatatccaatccattattaacgcaaaaccaattactgtgtaacaaaattgaattaatgttgcttcagcaagaatgggataaagttcggtagtttgttctgcagataactttttgactcctttttcctctagttggcgtaccggcactgatgggtcagaatttgaaagaaattgttggcccccagcaaataatctagtcgaaaataaaaccgcgttgtgcaaagcagtgaaatcagaggcttttgcgtcaaaaagattataatcaactttatttatctttgtggtttgctcttgcgggttttgaataaaataaatcgataaaccaacactaacatttacaaggtacacacctaaaataaagaataaaaatatagccacctctcgaaaaaacactaatgaatctttgtgataggatatgtctttgtctaaaatagtcctaatgaactgagcaagtggagtaatcgcagttacaaatactattaaaagtttccaactaatattcgatcctcgcattcccagaatcgggacaacacctaaccagataaagataaatactgttatagttattatccaatatacaacagcgcctataaatgtcttagtatttctgtatagtgacaaatataataggcgaaaatagaagtaagaaacaaagacagatatggtaacccccgagaagccataaagggtattaaaaattggaatttttgccaatccaaaaagaacaaaaataatcctaattagtaggctcactattaacagaactctaacgccagatactttattatcttggtacacttcaaaaaatttccaaaattttgtttccttgcccttgttattccgatgcttatcaataaggactctgacattagcgatgataaatattacaaatatacttggagtcaatacgtcaaaatttcctaacaagattaactacatctccagttcatatttaattggtctcaccccagcccctctagtaactccaaaatttagttaaaagttacaaaaccataatcaataaaggcgcttatcttagtaaactactaaaagcagcgaaagcacgaaaatgaccttcacttcttatctgtcagaatatatatgcaaaatcatacataaactttctccagactaccttgccaaagaggctagcaagacacttcggcaatgcggcatgtacaggatttgaatatgattttgtggatatactctgacacagctgcaatcagagccatttttgtgctttcagtctttagtctgtgtctttattgagtttttcagcagtctcacagtttagatacttcatttatttttatttggcattcacatttataagaactcagcctgaattgttcacatcacgagaaaaaaaggacacaaccacataactagcataaggtcgcgctacctaatgtttttcgggtctacctattgagcgttgtgttgctttgctcccccattgcattcctccaaatgatcaatcaattcatcccaacgtatgcctatcactaattcttagatagtaggttgccacgctaacagacgtattgagtaacaattctgcttcggctgccttaattttcactcgctcattgctagcatgtgcatcgccatctttattgcgcatttctgcaatcaaatcaataattccatttaagtgactgatcatttttgtaacacgtgggttccactctttagaaggcctcattccaagcgttttaaccaccaagttacggtacttactaatgtcaccattatgcttacactctacattgttatcagccagtatttgaaggaatacctcttcgacgattgttctagactttgtaaccacactatcaaagtcattatcctgcaagtcatctagcccctgcgccaacaagtttgaaatatatcctgagttgattctcttgattggaacggagatttttatatcgttatctgctgcgacaatttcccacgaattaccactagatacgagtttaaagttgctataaagaagaattgcgtttatctcttggattacacgccgcttaattgcttccgccacaatcaaaatatccttggaaacatcaccagtaagaccttccaaaacaaagttatcaatttccttcaattgcgaaaatcgacttccagcaagatactcattaatgactggtcgcaactgcgctggggaaaacaaaaacgataacaacgaactcgtgcgattacttgcatgagttgacttgattattgaactcattcggcgcaatctgtttgagccttccggatttggagaaccaaatctagctcccagtttttcaagatccgcatttgttcgatatgtcacccacggtcgatcaatcaggaaagttgtaatatctgtattctccagtaattcaaaattttctgattccaaagtctttcccccaagatattaataacttatttaagtatatatcctaagcacataagtaccaagcattgtactgcgcattctgaatacagcagttcgtatctttgaacggaataaaaagccaccagaaccaagtgaattctagcagccttaaatgaatattcgattgattgccaaccatgattaggcagagttgacagagcttgagccactttgagcaaattcaaaaagcctatgcatctctattcccactcaatcgttgccggtggcttagaagtaatatcatacacaacgcgattaacgtgcttcacttcattaacaatccgactcgagatctcctgtaatacatcccagtcaatccgggcaaagtcggcggtcatgccgtcgattgaggtaatggcgcggatgccgatggtgtagtcgtaggtgcgaccgtcgcccattacacccacggaacggaagcctggcaacaccgtaaaatattgccaaatatccttatccaacccgtgcttagcgatttcttcccgtaaaatatagtcggagtcgcgcacgatctccagtttatcttcagtcacctcaccgataacccggatgccgaggcctgggcctgggaatggttggcgccagacgagtgaatgtggcatacccagtttttcgccgagttcgcggacttcatctttgaagagtttgtttagtggttcgattagtttgaatttgaggtcttctggtaggccgccgacgttatggtgggacttgattgtttgcgcggtatcggttccggattcaaccacatcggtgtatagcgtaccttgggcgaggaattcgatgccgttgagtttggcagcttcttcgttgaatacctcaatgaagtcgcggccgatgattttccgtttcttttctgggtcagtgacgccttttaggtcattgaggaagcggtctttggcgttaactttgatgatgttgaggccaaatttacctttgaggctgtccatgacttgttctgcttcgccttttcgcagcaggccgtgatcaacgaagatgctggttagctgggtgccgattgctttgtgtagcaaaacgccgacaacggaagagtcaaccccgccggagaggccaagaaggacgcgcttgtcaccgacttcggcccggattttggcgatttgtttggtgatgaagtcgtccatgctccagttggcttcggcgtggcagacgtcgaaggcaaaatggtgcagaatttcgtggccgtattgagtgttttgcacttcggcgtggaactgaatgccgtagaatttacggtcatcgtcgtccatcgcactgattgggcagttgacgctggtggccgtggtgcggaagccatccggaacgcgggtgactaaatcgccgtgactcatccagacagtctggtcttttggcagatcgtggaagagtttggcgctggcatcggtgacttcgatgtcggccttgccgtattcgcggttgtctgccggttcgacatcaccaccgagtcgttgagccatcagctgcataccataacacacgcctagaatcggaatgccaagtttgaaaatgtcctcatcaaccccgagcgcaccttcgtcatagacactgttcggaccaccagagaagataattcccttaggcgcgatttccttgacttcagccgctgtgatggtatgaggctttaattcagagtagataccaaattcccggatacgccgggtgattaactgattatactgactaccataatcgaggacgatgatcttgtcgtaatccttgttctggtcatttgccacagtccgccacactcccttgtttgaatgcactaattttacagagttttcataagctggtcaatcatgggtgagaagcctctcatctgagtaaaactgtcaagtgacagtctcaccagtctaactgatttcaagctttcacacatgtacccctcagtttctgaaaaccaaccaaggctctattttaccattttctcaacgaaacctggtcaattttatgtccttttgttttatgcaaaatgacgtcggcccgattctttgtgggcaagatatattccttgaggttcttgagattgacatcatgccagacctgccgcgccatggcaaatgcatcagcccgattgccaatggcgtattgatagtagtaattgcttggatcggtgaaggccgtgtccagcagaatcccgaaacgttccaggtaccactgctcaattaacaccggatccgcatcaacataaatggaaaagtcgaaatagtcactgacataaatcggctgcttgcttggcagctgcaagacgttaatcccttccacaatcaggatatccggccggtcaatgacttcatattcatttggaacaatatcataaatctgatggctatattttggcgctcgaaccaccccgctcgcatttttgacgttgttcataaaatgaatgagcagttccatgtcatagctttccggaaaacccttgcgatccagaatcccgcggcgttcaagttccgcgttgggatataaaaagccatccgtggtaatttgttgaacccgtttatccggataagcccgactcaacagcaattgcagcagtcgtgcggtggtgctttttccgactgccaccgaaccggcaatgccgatgataaacggtgtgtgcggattgcgctgcatgcccagaaaacggctcagggtaaacatatcgccctggtagtcctcatagcgaatgtgaatcaagtggcgtaatggtgaatagatggttttgacatcatcgaggctgatttcatcattcagtgagcgtaattgcgccagctcggcatcggtcacgctggtaaaattttgcgaatgaaactgtgaccattctgcccgatcaaacttgtagaaattcatttcggattgcataacttaccgtgtccttgcgtttaatgttcttattttagcatagaaacgcgtccatgtttggttaaccgcgaaaacgcgttcatccgatgaaaaggcatgtgcaaaggcccttgatcgcaatggcaaatgctgccgatcacgcccaaaaatattgacataccgtttcctatttggcgtcgtttgtgatcttcgcaactgcggtttccttacgtttttcttaactgccgtttatcttgacagtttcagaataattgttcacaatcaaaccaacgaagcgctgtcatgaacttaacaagccggctggaggtgctgcccatgatcgagttcttgctggaactcttctccgatattatctttgagtttttactggcccccatctttatgccagaatttgatttgaccgcatcgcctaaatttaacggttttcgcatggtgctcacttcgcttatcgatggtgggattaccgcagctggggcttggttattgattgaaagcctcaccgcggacccgatttcaatcatgatcgtctttgttgcggctgtgctcttgctggccgggctcttcatgtggtaccgggttagcatcagatttttcaactatcgccgcgcgttagttaaagaacgggcagaaaagatagcggccgaaaaaccgtatcaagaactttaaggttgtcccccgctacaaggtccattttcaaaaggaggtgaacggcatcatgcgtcagatcctgagctttctcggttcgattttgatcgccatttttcttgttcccacctttcgccgcaatccccgtccattttggtattggacgtggtacatactgctggtcattttctgtgttagtgtcacagcctttgcattgtggttgctggttcttacccaacttcgggccacaaaaggtaccattgtgttggtcggcctgttactggttgtccttatgccggtatttttgattcgggcaacattgcggtttcgcgattatcgcaggcgggccaagcaataattggcatacaaaaagcgctctggtatgagcgctttttagatacctccattaatcctgtaacttaaaggccagtttcatattcggagctgcggcggcaaccatttggcccagcagttcattgctgttggtcatggctaaatcggccattttcttgttaacagcggttaaatgtgcctgaatgtctttggcatcctgcactgctttatccgtttcaagttgcagatgacggcaagcagccacagtcttttgctcaaacacatcttcttgatctttgaacaatgaaaagtcgtagtcgccaaacgttgccagcagattactgagccaatacattttggtgacatcgaacttatcgccggtgtcgcggtatgctgccggtgtatcggtaacgttagcataaaacggaaccactgtgttgaaggtgttcgggccaaatgccaaccagtgaacacctgcaattgcagcaggcacatcgttacgaatttgcaaaatgtgaagttcctgattacggttgatcccgatcggccggtacagctttttctgcgccggcgtgccaagcgaaccgtaaacatcgtatggcgtgttttcgtagtgggaactttcgacaaacttcacgtcttcgatactgatctttttgttagtgcggcagataaacggaagatcctgatcgattggcgtggtgtcgaattccggattgaaatacttttggccgtaccatgcccgcgggttgttgtaacgggtgtctttgatagtggccgagccgaagatgtggcgcaagttgtagccttctgggtctgggttgaggtgataggtctcaatcagatcacgcaggtcggcgctgctcattgtatcatcactggcaaaatcaaaatcggtaatattgaagcgattcggtgcaaccacgtacgcatcgtcaggaatgcggatcgctgcccagtgatggccgccgatgctttcgaagtaccaaacttcatccttgtcggcaaaggcaattccgttactttcataggtgccatattgttgaagcagactgcctagacgttgcaccccttcacgcgcactgtgaatatatggcagcacgatggttggcatgtcttcttctccgatgccttcagctacaagcggatcaacgccgagcacccggctattggtggtaattgtctcagttgaggtcatcgccacgttttcgctattaatccctgcagccgcccaaataccgtgaccgtcctcagcttcaggcgttgacgtataccctaatggatcggccggcagatcaatggaaaatttgctcaaaacagactggtaatgacgcggctgatcctcaggtttaacgtacacaaacttttgcggatgtaatggtgattcgccatcttcgttccgggcaatgatcgtggaaccatcgatggaagccttcttaccgaccaacactgtggtacaggagccgacataacgttttgccaaaataatcgtccttctttcaaaatgaatccgcagatgtgcagaaccgtgcgggaatggatttatgattaactttaccgcgtgaagacaggtttgccaagggtgtgcgaaaacaagcgcaaaaaatagccatccctaaagtttgacagcctcgggatggctatttgtaatctcagagccgctgttaatggcgttgttgctttaaaaattttaacatgcggtttaattgtgcgtctagccaagcaaactcagaatccagctcatcacgaatttaaaataaacagcaattcaatttgcggctattaaacgttaaaaataaagcataacaattgaaatgtgtggaaccgcgaacaccggtttgctacaatcaaattggcaacgtcaagagatggcggctactctcagacgaagggggtgatgcagatggttttcttccctgaagctcacaacccactgaagaaaggagcctgtgtttgtcggtcttcgaagctctgagtctggtcaatcaagttgtggataatttcatgacgttgattgtgctggtcacagtgttgacagccgaaaacaagcgcaaaaaatagccatccccaacgtttgacagacttaggatggctatttgccacttctgagccgctgttgacggcgttgttagttccacaagggctagcgactggaaaccgctagcctttttacatattcattttagcatgcagtctaatgatgcgtctagccaaactattccggacttaccaaattctgcataccgaaatgagatgggtatctaaccatttttgaaccgcgccaaattccaatcacccgaatccgaagactacaaaagacgcgctattttcgccagaacgaaaaaatagcgcgtcttttgcttgcagctataaactctaatcatacgtttatacgctaacactgtagcaaacacattttccccatatctgccccatcttttgatcaacatcagcgctcggcaactttcaatccagtggcacttcaccaaagctcgcgttaatcttccgataatccgcccgccgttcagcgtaacccgcgagcagccgcttttcaaagtccgattcggcttctactggtggcagtggaccgtcttccttgtggcgggccacaaaagttgcaaaggccgttcccacttgaaaacgctcgccgctagctaagtgctcgccgataagttgcacgaagacttcaagtgagcgatgaccgacgccgctaaccatacacttgataattagggcatcccccattttaaccggtgcggctaatcgaaccatatccagtgatccggtggctaatccgcgtcgacctaatcgttgcgcggcaatggagctgacgtcatcgatccaggtgaagatctgaccgccaaacagcgtctgatgggcgtttagcatccctggaaagacgcgataactggaaactgccaatgtatcacgcattttaaccattcgcttacccccgctcatacaattcttctggcaccttgtccaacaacggcgtcacatccggactggctagcattgtcagccgatgcatggcccgcgatgcaacggtgtatagcaattcgcgttcgtcttcttcgtggtagtttttcgcgttaacctgccacagcaccacggcgtcgaattccaatcccttggctaagaaacttggcacgacaatgacgccggccgccaagcgttgattttcggacttgatgagggtgactttaatgccggcagccttcatcttagcataaattgcttctgcggcttccaaggttttggcaatcaccgcggtggtttgtttggcctcgtcattcaccttcagctgagcttgcagtgcggtcatcaaacctgcttcatcaggccggacaattagtttcggcaatggaccttggcgattgaaggcaacgattttctgaccggatgtcaaaatggctttggtgaaatccgtcacctgtttcgttgaccgataactttgcgtcaactgcaccacacgggttttctccggatcgaacaacttgctggtctcattaatcagcgtccgcgagtcatcctttgtgaaaattgcctgattcaagtcgccaagtaacgtaaatttcgcacgggggaaactggctttaagataagccaactgatatggcgtgtaatcttgaatctcatcaacaaagacatagcgcatttcgcgttctccgtgccggccggtaatcaaatcatataggtgcaaatatggcgttgcgtcagccatgggcagtttgcgttccttgaacatggcaataaagtgatccacttctgcttgccagtcagcttcggaaatcccttccgctgctaagtcgtaaatggcaggcacttcgcgtaaaaagctgacatattgcccgcgaatgttgataaaccggttgcggacaatatcttgctgaatcgcgtcaaaacctttcatgaccaactgccgggcaaagaagcgatattcatcgtcactattcttaaattcttttggcccatcttgttgcatggagcgaatttcttcatcgcttagattctgaactgcttcttgaacccactgtgctttggtctcggattcaattttgcgattcaacattttaatcagccgctctttagtcgcattcaggcggttgcccatatgataattttcgttatagctgtagaagatctcccgaatccgcttgcgtgaaaagaaaacttcgccgcggaaccggatatccctaaaccgcaatccggagcgttccagactcgttgcataggtctgggcagttttaaagaagtccaaacttcccttgacccgggcaattttcttttgcaccggcgtcaactgctgttcgaattgggaaaagaggttctgaacctcaatatgtggcaggcgccgggtgacatattgataatacgtaaattggaccatgttttgttcgcctaattccggcaacacattactgatatagtcggagaaaagttggttggggctaaacatgatcacttggctgctcgtcagattaccgcgataacgataaagtaagtacgcaacccgctgcaacacggcactggttttcccggagccggctgccccttggacgaacaacaaatccgctttggtatcgcgaatgatctggttttgttcgcgctggatcgtcgtgacaatggtcttcatctgggtatcggatttttcacccagaacttccagcaacatttgatcgccaatggtttcggttgtgtcaaacatggtctgaatttgaccgtttttaatcacaaattgccgttttaaggagaccgtgacttgttgcgggccatcaggggtttgataagtcaccttacctaagccgccatcataataaatcgaactaatcggtgcccgccagtcatagatgagaaacttgccagcctcattcgtaaacgaaccgaggccaatataaatcgtctccggcttttcgcgaccttcctgaaaatcaatccgggcaaaataagggtttcccaacagccgctgcactgtcaccagctgctgtgcgctttgcttccaagcattcgtccgctcatcaagcacccgctgctgttgctgaatcgaagcagctgtttcaatggtttcagcataattcgtgaagtttaaagaaaaatcgttgaaaaagttatcactgatattcttctcttcggtcttggtcttggccatctctttagaaagccgctccttggcacccgaaagctccttcatgatcgcatccaaatgctgctgctctttagcttgttcattcccagccacgacgtcatctcctttaacggttattaaataatcgttataacatcttatcacttatgaggaaacgccgcaaaaaagagtgtgagcgcgaaccggcgcggttagaagtcggagtgtaagtggcctcaggcgtgatggccgggctttggccattgcgactgaggtccttacacgcagacttctgcgccggtgagcgcgttatgggcataagccagaacacaagcggccataaacgtgatggccgggctttggccattgcgaccaaggtccttacacgcagatccctgcgccggtgagcgcgttatgggcgtaagctagaacaaaagcggccttaaacgtaatggccggactttgcccattgccaccaatgtccttacacgcagatccctgcgccggtgagcgcgttatgggcataagccagaacacaaatgcccctacttcaacttcccgcgcaacaacggcgtccaagcctccaacacatacccaaccgccaatccaaccgccacgcctaacagaatctttttaaacggtaaactgaccaacaacccgattaacacacaagtaccaacgatgacggcacgccgattgaaaaacgatttaccttgacgtgaaggtttttgattttgtatcatacgctttcctttcatttataaacacttttcgttacgattgactcatccattatctctgatcggaggccattatggaatctatttcacttttaatcgtcttgacagccgcgttgttgacgccgctgttaatggcgcactttcatattaatagtatcccgactgctgttgccgagattctagtgggcatcatcttaggcaaaagtctcttaggttgggtccatactggcggcgaaatgcaggcgttaagtgaactcggtgtcaccatcctgatcttcctgtctggcatggaaatcgacttttcgcttttcaaaccacagcccaagacggacaaaggacctcagccggccaatccagtcgtgctagccacagttggatttgcaacggtcatcatcatcagtttgggattcagttacctactcaaattcattcacttctataacttcccgatttttgcaaccattctgttcaccacgattgcgcttggcgttgtcattgcggctttaaaagaacaggagttgttacatcaaccgcttgggcaaacgatcctgctgattgcggctttgggtgaagtgattccccttatcagcctgactatttactcagccttaaacggttcaagcgataacaatctatggttactgctgttactgctgctggcggcgttggttttactagcgcgattcaaacacatttacagcttttttgcggcgattgataaaagcaccacgcaactagacattcggttggcgttcttcttagtcttcaccttagtgaccatcgcttcacgagtaggtgccgagtccattttaggtgcctttcttgccggcatggtgatgaagctccttggtccgcgccaagaaactcaggataaattgacttccttaggttatggcttcttcattccaattttcttcatcgtcactggggcaaacctcgatttgaaagctttagtcgctgatcctaagagcctctccttgattccgttggtgctcatcggctttttcatcaccaaaatcggcctcattcctgttttgcggcagcggtttaagccgcaaaacgcattggcaggcacgtttttagccaccaccaccatcaccttggtcattccgacgttaaccgttgggcgcaaccttggtatcgtgaccgagcagcaatccggcgcgttcacactggcagcggtcattgcctgtgtggcggggccaatccttttcaatagtttcttcaagcctgagcccgaaaccttcaaaaagacccgcgtcacctttattggcggcaatcttttgacggtacccatcgcacaacatttaagtcctgagcgctatgaggtgcaactatttaccgatcgggtagaaaattttcggacgtataactccgaagtggcaatcacattaacggattatcaggaaaacgcgttaaaagctgccggcgcatattattgtgacgtcatggtgctgggtgatttcgacgcggacaccaattacgacttggcaaaaatggcattagcacagaaagttccacgaatcatcgcccggtttgccgcaaaagataccacctctgatcgctatgaccgattgcgcgatgacggcgttgaagttttcaatgcactcgatgccaacgttgcgttgctgcgtagcttgatcgaaaccccgtccacgttgaaaatccttgatgatacaattgcgggcatctatgaagtcaccatccgcaattcgcgttttgccggtcttgagctcaagaatttaccgttcattgacgacatcaccgtaagccagatttatcgacaaaagaaattcattgctcctcacggcgacacccaactgcaccttggtgaccacctcattttctccggggacaagcacctcatccgcaatatccgcgcacaggttgaaaagttaaattaatgctgctcaatcaggatgtgaaattctgctttgatactcaccaatgactgatctcagtacaaaatagttataaatggcagcacttccttttttacgccgttgtcaggctattttccgtggtacaatgagattattctaagaaaaaaaggtgatcaaatgaaacaaggaacaacgatcctgaccttagacaatggctaccacttgtggaccaatacgcaaggcgaaggtgacattcacctgctttgcctacacggtggccctggtggcacgcacgaatactgggagaattttggtgaagaactcgctgatctcggcgttcaagtccatatgtacgatcaactcgggtcgttttactcggatcagcccgattattctgatccggaaattgctaaaaaatatctgacaaccgattattttctcggtgaagttgaagaagtccgcaagaagctaggattggatcacttttatttgatcggccaaagctggggcggtgccttgacccaactatatgcgttgaaatacggccagcatctcaaaggcgcgatcatttcatcgatggtggacaatattaacgagtatgttgagcatatcaatctggtccgcgaagaagcattgccaccttcagccgtaaaatatatgaagaaaatcgaaaaagccggcgattgggacgatccgcaatatcaaaaatatgtggatgtcttaaatcgcggctatgttgatcgcaagcagccaccggcaatctcacatctaattagcacgatggcaacgccggtttacaatgcgttccaaggcgataatgaatttgtcgtcaccggtaagctgaaggactgggacattagcgatcaaattcacaacatcaaagtgccgacattgctgacatttggcgaacacgaaaccatgccgctaaaagctgcccagcgcatggctgaagtaattccgcatgctcggttggtaacgactccaaatggcggccatcatcacatgattgacaacgcaccggtttacttcaagcatttgaagcaattcatttccgatgttgaaaacggcacctttaacgactaatggtaaaaaccgcgcccttactgttaatatggtcgcggtttttgtctatgcatctttttaacatgaaaggatctcaccatggcttacaccgttgattttaaaaccgttagcaccaacggcttagaaagttctcctgttgcaccggctttggctgggcttagagccaatgaagcccggtatatttggaacaaatataaagttccctatgtcgcctatcctgtcagtgaaaaaccggacagcctcgcttgggtgcaggcaattcttgcagaacgcgagctccatatcgctgccaagccacttgaaatctgtgaccttgcgctaccggatctgcgctgggttgaagtctattatcaagatggactagctatcaatgtgatgtatcaccttactgatcccaaaaaacgggcggtcggctttaaactcagcgatggcatgaccgttcccgccgaactcgcggacaagtttaaattcgcccgccaaaagtcaaaactcgccggcaccattcgcggatcctttttcgtaattaaaggaagttactgatcgcaatatctttcacgtaccagatcagattcaccaataaaacggtcgatgcataactgcgcatcgaccgttttattgtattcacggtaaaataactgacaaaataagttgcacattcaacaacgtaatgatgccggttaaaacgtatcccatccagcgcacgaccggagaattaacgtgctggcccattaagtcacgccgatcggttaatgccactagcggaaatagcgtaaatggcagcgcaatgctcagtgctacttgcgcgtaaacaataacctgctcaaagtgttgctcgctaaaacccatcacaaagccaatgatcatgatcggaatcagcgtaaccaaccgcgtcaataaacgtctggcccacagcggaatctgaatgttcaaatagccttccatcacaatctgaccagctaaggtactagcaatcgaactgattaaacccgtgatcaataacgcaaaggcaaacaaggtgctcattaggggactggctagtccacccacgattgccggatttttcaagccgttataaacaccttcaaatgcggtcgcgtggctactcatgccataaaataaagttgcccccagaatcagcaacagcgcattaatcacaaatgccgcgactaaatggacattagaatcccatttgccaaaccgcagcgcctcggtgacttgtgcgggaatatgttcatcgtatcggcggctttgggccagcgatgaatgcaagtagatattatgcggcataatggttgcacccataatacctaagcttaataacaacatgccacgattagtcagaatcccggtatgcggaaccaaccccgcaacaatgccacccattgacggccgcgcccgcaccacttcaatgccgaaaataatgccaactgtcagaatagatgccaacacaatcaactcgatccggcgaatgccaaaccgcaaaaacatcaacaccaccaacacatccgcgatcgttagcagcatcccccacatcaatggcaggccgaataatagcttcaacgcaatcgccgtaccgacaactccggtcatatccgttgccatcatggctgcttcgttcaccagccacaatccgattcgactccacttcggaacaaacgccgcaatcgcctgagccagatccaaccgcgcgaccaccccgagtttaatggccagggtttgcatgaacattgccgccaaaattgacaatagcaacaccgctaataacgtctcatgatagcgactcccgccttccagcgccgtcagccaattaccgggatccatatacccaaccgcaaccaacgcgccgggaccactgtaagccaggaacttttgaacaaacgatggttcatacactcccggtacctgcacactgcgattaatctcatccaaactaggctttgcttgctggacactgagctgctcatttcgcttggtcatgacgcatcacctctgcagcaaccttttctttcgccagcgttgctaaaaagtcacaaaacgcagaactgccattcatggggcggacagttttaaagactttaccgccattagcgcgaaaagtttgatagttttgaacatcattttcttctaacgtctccaaacaatccgtcacgaaactaggcgtcgtcaccaacacccgccttttgcccaacgctgctaaggccattaaacggttgcgtaaatacggctttaaccacggcaccggtccgaacttcgactgataacacgtctctacaatggccggtggcactttggtcagataacgcttaacccctgctgtagtcgcttcacaggcttgctgataaggatcgccatgccgcaccatcgcggttggaatgccatgataactcataatcacggcatcatagtcaccttgtatgtaggcatcgtccagttgttgcgctaataacttctgataagcggactgctcgtaaaagtgctcaacgttcaatgttttaacacccgatgctgcgactttttccaggattgtcttggtggtgctttgggtatacgccggaaaaaggggaatgacaacaatcggccgatccccacgcgccgccattacttgcaaagttgcggcaatgggatactgaccgccataagtcatcgccatttgaacatcccaatccggaagtgcctggcgcaagcgatcacgtgtgacttgcgtataagcaatcaacggtgagccagcctgcgtccactcgtgctgataaaatgtcgctgaccgccaactgcgaaatggtagcacaaatccacgtaaaatcggttgccacaaaattttaggcatggtaatcacattctgatcgcttaaaaactcccgcaaataacgtcggacatctttggtctgcggcgaaaccggcgatcccaaatttacaattaataacccctttgccatttaactgcccccattgtctccaaaaattataatttaagaataacacaggtccatcgctttaaatttggtttcttggagcgagtcgtttaaatcatcccggttatcaactgccaaagcctacgctgacggcaaatctttttcgcgctttcgggacacaaaaacctcgccgcaccacaatattggtcacgcttcccgccaaccaactcctgcttctatgctaaactaacattagaaagataaaatgtttgccgaggtgaaatcggcgagcgttagactgtcgaggaggcaaatttaatggctacgaaaggcattaccgtctacctagtgcgccatgggcagacatggtttaatcactttaacaaaatgcagggttggagcgactcgccgttgactgaaaacgggatcaaggacggcaccaataccggagtcatcttgcgtaatgttgcctttacccacgcgtattgcagtgacactacccgggcaacccggacagcagacttgattttaagcaaaaatgtcacgggtaagattccgctgacagtgacgccgtttttccgggaacaattttacggctattttgaaggtgaagattcgggacaaacctggtacatggttgggttcccccatggcgcccgtacttatccggagattctcgaaaaatacggtgtcgatgcgtctaaagacttcatgcatgacgctgatccgtttcatgaagcagaagacgctcgaacttactggacgcggctaatgaaaggatttcggcagttgcgctcggagaatcatgaaggcgacaaggtgctgatggtcagtcatggcacaacgattcgcagtattgttgacaagtttggcaaaaatgatggcttcgtagtaaccgactcaccgcgcaatggttcaatcagtaaaatattactgacggacacaggcattaaggtcttaagttataatgaattcgaagcctgattcaatttaaaccttcaagcggtgatttttcagccgctttttttgatgaaaccaaaagggtcacacacccagctttgcatggttgtgtgaccctttttcagacaactttattccctatctaggccactgcgactagtgaaccaattcttttttctcaatgagtgaaccgccgtggatgaactctggattcggggtcaaatcgaagcgttcggccagctgttccagattttcgtctgtgatttcgttgacaaactgaccaccttgcgcctgaattgcggtgtagatagtagcggctttttcaacggtttcaattaagccgtatgtttcgtcaatcgaatcgccgacaccgaagataccatgcagcggccacaaaacgatgcggtattggcccattttttcggcagttgcctggccaatttcgttggttcctggcgtcatgtatggtaaaacaccaacgccttcagggaaaacaacgattgattctgcctgcatcttccagagaatgcggctgaacaatttttctttccacggtaacgtaaaggtcatagcaatggtgttcgttgggtgacagtgcatcacaacccgctgattaggatcctgcttaagccgttggatatgggtcatcaaatgtgccgggaattcactggtcggctggccgccatcggaaaagccccagagtaaatcaacactttgaccgtcttgattaatccgaaccagtcccgtatcgcgttccgggaagtctttgacgttcttgaaatagcgaccggtcccggttaccaagaaatattgacctgccaaggcactagcatcaaacttaatcgggatcgtgcgcttgacttcatgaacatcgccgtactgaccgacttcctgctttgtaagccgatagctgacattgccgccatttcgttcatcccagccatgttgataaagattccacgtcaccttacgcatctgttgcacaaatggtgaatcaataaacgcctgtgtatattccggattcaagaaatctttttttgaacctgccatgaaaacgttccttctttcttctggtcatcatgccaaagctatccctatacagtgtcaaataaacagatcaacttttttgttgtcttaaaaagcgtcaaacctactgcacccgaatagccattagcacgtttgttattaatctttcttacagcttctattttacgaagccatgtaagcgctcgaccagaccaaatgtacgcatcaaaacagcgaaatcggaacagatgcacatatcaccccgtactctgcaaatgaaagctcaatccggtcataccatgacgaatagcgcttcacggttggcccggcagtattttgatttttcataacgcactaaacaaaaatcggctttagcgtgataggcaaaaccatcgctaaagccgattacgattcattttaacggttcaaatcttttcacaccacattgccgggttgcttacgactttgaggccaggttcttattaatcacaatactctggtaaatccagacggttgccagataatacagaccgtacagcacgatgaataacgcgaaaggtactaacaaatgaccatatggctcgcttaacagggtcttgaacaactgtaatccgaataacacgtgcacgatgccgaccactcctggcaaaaggaacaaggcgccgatttcctggcgaatcgaccgacgtaagacgcgcggccgggcaccgattttttgcaacatgagataacggttcttatcgtaattggcacccgatagaattttaaacatcaacgttgaagccaacatcgccaagaaagcaattcctaggaagaagcccatgaaagccaagccggaatacaggccattgaccaccgcatagaattcaaatttctgatcgccattgctgctccaaagccgtggatattggtgctgctgcagcgttacaatcttttgaatcgtatcataattctgattgaagtctttaactttaatggtcgtcaaggtttccgaatttcccaacttggcaaaagtggcagcatccgcaaccttcatctgcttgccgcgattgttcccgatgaagatgccaaaagcaccggggtacaattcgatcagcttttcaaagttctgactggtgactttgatgttgggtgcattgatgcctttatccaccgctttaatttccaatggatgggcgtcaagtttcgccttactgatgtagacggttttagcatctgatttaagttcgtattgctgcttggccgtcacatcctgcaacttattgatttctgcgcgggtggcggcatttggtgaagcaaccgtcacgtcgtaaactgtcgactgacttgccagcttgggaatgtcatgcgtaaagcccatccccacggtaatggcgcctaaagccagtgcaaacagcatggcaactacggataagatgcgggtatagtcccgaatccgaaaactgagctgggacaatgtgaacgtatgcaactgcttggctgcaaatgtccgattccgcttcattaaactgattaaagccacaaagacggaattaaataagaaatatgttcccaaaacaatggttaccaaagctagcggaatcgccattaactgaaacttagggacattggccatgctgtaataaccgatggccagcaagatcacaccgaggacaatctgcaaggcaaagctgcttttgcgttgcttaatccgattcggtgtctgtgcctgatgtaataattgcaacatcggcgttttcagcaattttgccgcgttatacatagcagacaaaagaaatagaacaaagaagaaccctattgtccataaaatggctggcacccagatcggtgaaaaacccgtggctggtgcatgtaaagcggcgataatccattttccaataaaaagtgtgccaaccatgccaataagaatcccgccaatcgtcgccataatcccgactgtgacggtttcaaggaaaatcagctggccgattttacgcccttttgcgcccagcatcatgaacatcgcataatcgcgttgacgcatactgagcaaaaagctgttggcgtacacaatataaactaacgtgataatcgccagcaaaactgccccgaacccaaaaataaacggggtgaagccgatgggtgaatttttctttaaaaagctcgtgttcgttgctaaagccataaacatgtagaaaacagcgctggcaatgaccagtccggagaataagaccgcatagtcgcggaaacggttttttaagccgccaagtgcgagtttacttaacattcttgctgcctcctacttctgaaatgtgccgagggtctcaagaatctcttgatagaaagcttcttgactcttgtcaccgtgaaccagttcagaaccgatctgaccgtctttgatgaacaaaattcgactggcatagctggcggaaaacggatcatgggtcaccagcagaatcgacacgccttcgtcacgattcaaatgcgccatggtatccaacaattcgcgcgcagccttggaatcaagtgcgccggttggttcatcaccaaaaagaatatccggctgctgaaccaatgcccgagctgcggctacccgttgtttttgaccaccggacagttcggttgggtaatgatccaacacgcgttcaatgccaagcgtttgcgcgatcttatcaacggcttcggtttgctttttagcgctgacattttgcaaggcaagtggcaatgcaatgttttcccggccggttaagttttctagtaagttgaaatcctggaaaataaagccgatctttttggcgcgaaaatcggataaggcgtctcctttgagtttggtcacatcggcgcctttgatgcgaacggaaccggatgtcggggtgtctagcgtgctcagaatattcaataaagtggttttaccggagcctgaagcacccataatcccaacgaattcaccgggttcaacctgaaaactcacaccctttagtgctggcgtttgtttttccccttgtttgccatatgttttcgtaacattttcaaccgttacaacaggttgcttgtccatgataaacctccatttgcaatgtgcttgctttttatttacaagattaatgataatggctgccagcaattttttcctgataatgcactaacggatgccggatcgaaactaacgggtttgtaagctactttagcttttctttatttttggccccatctagccgcaatccttgctataatcacacatgagctatgaaaatccttatgaaagttggttaatcgtgggaacctttcgcaacaaagcgcccgggctaagttcaaaatcagcggctgattgaacttagtaaaggagcacattttaatatgaatgatttagaaaaaccgcaaaagcagttcattccctggatgattgtcggcttgatggactttgtcaccgtcatcgggtttgacgacatcatctataacttccagaatcaaggcttggtggcattcaccagctggattatcatgaccttcttttatgtcattccgtataatctgattgtcgcgcatatgggttcgactttttccgaacatggcggcgggatcaccagctggatgcgcgaaaccaatggcgatacggttggttactatgcggcttggttttattggatcaccgggctgccttatgtcgtggacgtagccaattcggttgttatttcttttggctggatcaccaacggcaacggcaacattcaagctaaccttggtaacgcatggttcggtattctcacggccgttatctttgtgatctttatctggttacagcacttctttaaaaataaaagtcttgagatcatgtcaacaatcggcggcggggccatgtttatcatgacggttttattcgtgatcatgaccttcatcggtttatccaaaggcgccccgattgccacccgcccgtttgatttcaaggccttcatccccaaagatttcttttcactgagcttcctatcgacttttggcttgttcgtctttgccatgaacggctccgaacttgctgcaccttacaccaaggacatgcgccatcctgcccgtgattttcccaaagcattgaaaatgattgcgatcatgaccatgttcctgacactttttggcaccttttcattaggggtatactttaacgcccaccatctgccaaatgatttgaaaatgaatggttcctactatgcgtttcaagccattggtcgtcaattcgggatgggcaacagtctgatgtatctgttcgccgtggtgcaaggtatttatatgttagcccagctggctgtgattctggacgcctcaacccgggtattcctgtccgatgtggccaagcgcttcatgccgcgtcagttgacaaagatgaacgaagacggcttgccgattaatggttactggatgacaacgattctgtgtgcgttgatcatggcactcggcgcacttttgccgaaaatcaatgacatcttcaactggctgctcaatctcaacggtattgtcagcccgctgtccacttgcttcttgttctggtcctacacgatggtccggttacatcaggatcggttcccgacgcctgattatacgtttcttaaaaatcgaaaagtcggcttagttgtcggtatctggatgttagggattacctttttacttggcacccttggcttcttcccgactgacgccaccgcggacacttttgcactcatgctcggtttgaatatcgtggtgccaattggcatggtcgcgcttggcgttttgatgccgtggatcgccaaacgtcagcggcaagcgaacaacggccttgcgtttagccgcaacacctggttggtactcactaccctcagcttagtcgggctagttgtcgcggctacttatgggatacacgtcaacttactcgatcacttaacgcctgtcattcagtggccactgattatcatcgttgaccttgccattgccggggtggtgctcaaagtcaccgcaaacggtcggcatcaacgggtagctggttcgcctgatgagggatgagttctggcttactatgttaaagaacgttttggcgaataaagattagttatacgatgccctggcaacgtaacctgttgctagggcattttttggctgtaaccggattgtccagcagaaaaaatcaactgcgagtatctaccagtcaacgacatcgttaccacaccgcgtccatcgtagcaaaaagttggcacttactatgctggcagtaagttaagtagccatcgtaacaacgtgataaaattaattgtagaaattggtttttgcatagctgcttcgacttatttttaaacaatcgttgaagactcagaatattaggaggtgccatatgctcagctacacgatcatttataatcctgcttccggccacgctaaaggcccgactgccgccgaacagctcaaggccaaacttgaagatcgccagcggcaagtctccatggcaccgaccaaaagtgctgatgacgcccgaaattttgcttatcaagcccaatcggatattgttgttgcagttggcggagatggcacgattaaccaagtcgttgccgggctcgcaccgcgcaaacaaccgccaacactcgctattttaccggaaggcacggtcaacaacctggctaaagtcctgcatattccgttgctgctgccactggcgatcaagaacattctagaagccaagccgcagccattagacattgcacaggtcaatgatcgctacatggtaagtaccctgacactcggcgttttagccaatgcggcgttgtccgtcactcaaaaagaaaaacgccattttggtccgatcatctacttattaaagggttttaaagttttggcccaacaccaacactggatcctacacttgaacagcgcccataatcactgggaaaaagacacccaatttctgctagtcagcatgaccaattccgttggcggttttacgaatgcggtgccagatgccgccgtggatgatggtcatctgcacgtttttatcgccccaaaactaacctggtggcgctcactactggccatcccctacttcatcaccggcaactttcagaaactacccggcatgacgtatttcgccaccgagcaacttaccatcgaggctccaaaaacgctccaaagccgggttgacggcgacccgagcaccaagacgccgctaaaattgactgtcatcgctgaccatattcaagtattggccccaccggtgggaaaataatctggaagtgccgcatatgaatgacttattgcatttatatcgcctacttttaagttgcgcagtttcaacggcttttgactgtcgtgctgctttttttactagcctgaacagtcctcgaatagtccgttctaatagtctttccaaaattcccgtgttacactagacttattcaaatgagaggggtgaatcgccatgcggttacgcaaggttgcaccatgactgtcgattcgttagtaccgatctgtggcgataacgcccggatctatgaaaggaatttatgactgaacaaatatctaatgaagtaacttctgaaaatgtactgattgctggcatttcgcggcaacaacctgactttgactacaccatgaccgaactcggtgaattagccaaagcggataactacaccgttgtcggcgaagtacggcagaatctcgatcgcgcagtagcggccacttactttggttccggcaaagtagacgacattcgccaactggctgatgtccgcgaggcttcaaccgtgattatcaacgatgaattatcgccttcacaattgcgcaatcttgaaaagcagaccaaactgcacgtgattgatcgcacgcagctgattctcgatattttcgccgaccgcgcgcgcagtaaagccgccaaaactcaggttgaaatcgcccaattgcaatatgcgttgccgcggcttcatcccagcgccaaccgcctcgaccagcaagtcggtggcggcgccggatttgccacgcgtggtgccggtgaaacccaacttgaactcgatcgtcgggtgctcaacaagcgcatcagtcacttgcggcaagaactcaaagatgccagcgtcggcgatcaagtacgccgcgcccgtcgcgaagacaacgccattccagttgttgcattagtcggctacacaaatgccggcaaaagcacgaccatgaacgggctgctgcagctttttgcggatcgcccggaagacaaacaggtcttcgaaaaagacatgctatttgccacgctcgataccagtgttcgccaaatcaccttgcctgataatcgcaaattccttctgagcgacacggtcggtttcgtctccaaactgccgcacaacctcatcgacagcttcaaagccacccttgctgaagctgccaacgccgacttgctcattcaggtagttgattattccgatgagaattacccggaaatgatggccatcaccgaaaaaacgctccgtgaagtcggcatcaccaatatcccgatgatcgaagcttacaacaaagccgatttacgcgaaggcacccgttatccggaaataaacggccaacgcctcgtctactcggctcgtgacaaacgctcgctccaagccctcaccgatctcatcaaagccaatctcttcggccaagatgaagaacacacctacctgatcccatttgatcaaggtcagctcgtcaactacctcaatcaggaaactgtggtcaaaaccactgactacacggaacacggcacgcgcattacagccgttgttaacccggttcaaaaaggtaagttggcacggtttgcggtaaaagaaggcgtttaatttacgcttcaaagcaagacaaaaacgctttgcctttccctgcttaataattgtaagcaggggtggcaaagcgtttttttgttgcagtacgagtcgcggtgtgcttagaaatcgggaaaatgcagccctgatcacagcgaagccacaagtagcctcttaacggaatttctaaattgaaaaacgccacttaaaatgtcaaatatgaatttcaatcaagcttctacaaacccgactactccaaaataccgaatttatacccgttactgcgataatacgcaataatcttgggcagtgttttaacggttagatccttccccacggcatcatgcattaatacaacgcgtacgtggctgtcgggataaaccatcaaagaccgcaagtgatactgtagcatagcttcctctgttttcggcgcttgtgccggacccaaagcatccccaactgccgcgttccaatcgatccaatcaagtcctaagcgaactaaaccagtatcagctccagtcaagcctttccaactaaaatggccacccggatagcgccataggtgagtattgaaatcgggtcccaaagcttgtttcacagcagtctgctctgttttagcctcattttcaattgccgatgttgcacccactcgattcggataaagcaaattgtagttgtgtgtcatactgtgcaaaccaattgcatgtccggcatcatactcagctttcaagaccggtgtcgtttccggcgaaagttggcgacccacaacgaaaaaggtaccatgaacgctttcccgattaagaatatccaagacttgaggagaaatgatggtattcggaccatcgtcaaatgtcaggaacacgactttttctttgatgctgctagtgtttggggcggtcatctcttgtttgacttgagcgatggggtaagcatacgggtcggctgcaggaatatgggtacgcccagaattcgattgtacctgctcagacgactgccgccgagccgcctcttgttggcgacgtgatgccgcctgcttgctaaacatgctacgttttgattcacttatacgaaccgaggcgtaatggcggctagcactaagcgacttcgctacattagtctggtgatcaacatacaactttaacgaaaaacagattataacggccaataccgcaattagcgcaaggccccaccctaacaaaagatatttgtgtttcacgcttaccctccacattgtgatcaaagattatccgaagttgagtttaccatgagacacttaaaaaaacggtaaaatggttttcttttaatcaagtcatcatatatgtgagtcgttcccgcagataagcaccaaacccaatatcatttaagttttgcctgattcagcatataattcgatttcaaataatattgaacatcatcgaatttcttaatgaccgccttctcacttttatttggctttgtcgtaagcttattgtcaatcatataatgatttttttcgccaaaaacagggacttgtgcctcgagatcttgcagcacttgcatatactgtgaacctttccatcccacgtgtgaaaagatttccggaagaacaaacataggactcatggtctgtccttgtccggaaaaatccttggccatcaattttttggccgcctgattagaccacatgacgtaaggtgtattgtaataattctcgtagccttcccgtgtcgactgcttcaaattaacaccaagcattttatatgttgaattcttgtcgccgccccatggattatgatcaccccagaaggctaaaacaacaggttgatctagttgatctagctgatccttaagttccaagagcgcatccgaagtctctttaatgccagtcaggtaattgttaatgatggcgtaatcctttttgttatatccctttttccacggtagcaatgtgtcgccatcaaaatcagtgccatatggaccgtggttttggatcgtgactgtttgattaaagaattgcttaccatttgcgtttacggctttcaattgcttgacgagatcagtaaacacttctgaatcaggaacaacgtccacattagcaacattcttgtcataatagttttctctgaagagtgtcttttggaaaccgagatatcgatcaatattttggcgattataaaaccatgcatcgcccgggtgcataaatctggtgacgtatttttgctcattgaaataatgaacaaatgaattagtcataccattaatggggcttaaatccgcaaaaccggtcagcaccttgcgttccgtatccacagttccaccaccaaaaattgtggtcgtcaattcacctgccataccttcagatgctacctgatgaaatcccgcgtagacagaaggatcgatatccaattgatcccacttagaaaaatcttggaaagcttccagctgaattgtaatcacgttcacgcgcttattggcaggaatattttggtactgatattgagtcagcgccgatttggcacttgcggcatcataattctcaggcggaagtaaccagtcgtttttaactgagtgaataaaagaaaacatgtagccattaacaacatagcgatctgcatctggtccccaggggtcattgttcgccaaagtataataatcatcgactaagtagtaccgatgaagcatgaaagccgatccgaccatcacaagaacaagtgcgattatgcgcgtattccaacgaatcatcgcaggtttaagaaatagaccaacgatgatagtcagtatcaacaagctaccaatgataaagaagtactttaccggtggaatataactatatcttgaacccatattgctagcttctgatgccaaagaaatatctgcaaattcgaagggatagtcacgatattgcaacatgaagtaattaaccatagcaacaataatagctagggcttgcccgacaaaaattgccaattgcacccgattaaaaatcaagtaagttacgagcatgacaacgaagatcggcaaaatgttgaacaaaaccaaacgtgcacttgaaaaaacaaggagcgttaattttaagtcgtagtcaccagatgccaagtaaatcgttacgatgccagttatgatagccatgattaaaaggacaaaagcatttcttaaaaatagcgcaatctggtagcgattaaagcctttgtaggttttaaaaagacggttgttagcctcaatgcgcgcacttttctccaatccagtgttgcgcacgaataaccgataaaaccgtggtgataccactagcgaatgaggtgccaaaaatcccatcttagccttaagcgttcgtgcttgaggaagaagatgtccatgatcatcaatatccagtccaacatggcggctatctggggttacccagttaagcaaaaagtccggcacatcagctaccaaccaagtattcgctttaacacgccgatgagaccgtttacttaagcgcttaccgaattgccgccaacgttcttctgttaatgaaacgcttaacaaataatgccagaaaacagcttgatactttagctcctcaatttgcttcagtttaaatctcagttcgtttagaagtaacggcaaaagaatccaacatcggattgggcgatatcgtaagtaaaaaaaaaggacagctactttgatatttaaccgactaaaacgtgtctcaagatcaatcacaaacacaaacctcccaaaaagaaatccatccccaaatggactttaataaccacttataatttaatcgcattcagttcataaaattaatggtatcacgtctagtttacaaaagatactttaaaagatatccctgtcataatatgcaattttgcactgaaatgaaaaccgtctttttaaatacaaacaaatgttaataagcgaaaaaactcaagccagagtcagtgtacatctttagaacgtgaaaacccccaattgtcgacaatggcgacaattgggggttaatcgaaaactaaaaagccatttgataaggaataaaggtcttatatgcaccactgattaagaagattaacacaaagatgacgccacaaacacctaccattgctaatgttcgcgtcttttttggcataatcgaaaagacgatggtaggcaaaacaaccgtctctgtggttgttgcaattgtcgaaagtcgcccaccaattgttgataactgtgacaaagacagcaatgttaaggtggcaaataagtaaaccaacatcaggaacttaaacttgtctttgccaccaatcaaggcatccgcaacaataccacgttgtaaaatataaaaaccggttatacagatcaaaacctgcataagggttaccgggtcaaataaacccgctgataaataattagcgtttgtgacgtacggtgcatagcgtggtaatgtgtgcacaatgatcacacttaagattttaggagcaataaaacctcccgctgcacccagaacaagaaaaccaagcacccatttaaaagtgatcttgcgaaatagaagccaaaatggatatatgagcaaaaagaatagagccgaaacatggatcgttgctgataaaccaactaccaacacaaatggcaacggcttctcatcgtaaacaaactttagtgccaacatgcaaatgacacatacaagtgacgcacgaatctgtcccatatcgcgcataaagaaaaagcgactcatataatatgcaatcggaatgatcgcaggccgaaagtattctttagcgaagcaataaaataagactaacgtgaccgttgcccaagctaaaaggaaaagccaaaacggtgcatgaaccaagttgaagacattgcgcaagaataaaaatccaggttcgacttgaccagctgaataatcacccgcatagattgtcttgtatggcaaaaaatcattaccagtttcatatcgcaaacctgcaacaacagcaagcatgaagacacccagccatgcccaaacggacgacattgtcacacgtccgagtaacatgaagattatcataattgcaaagagacctaaataaaaagccacaacatcattctcctactgccctttatgcgatcaacgtttcatcatttgccgatgaagccctctggtttaccactgttaagcttggtttaacacagtcccgattaaagtagccggtaactgtcgaacttgggcaattgtctgcgctacacgatgcttagaagggccattagccttggtaacaatcacaacacctgttgcaagctcggcaattaagcccgcttcactagcatcagccatcgccgggccatcaattaagattaaatcaaattgatgtcttacttgatcaagaaaggttttaaatgaagatcctgccagtagcttggccggatcaccaagctcactgccagcaggggctacagcgagttgttgaatcttggtgttaataacaagatcgtcaacgttaaccgcctgagcgtcattgacatgaatcagggaagaaagtccttcagtatccttaacgtcaaacactgaagctaaaatcggccgatgtaggttaccttcgaccaacaacgtctttttaccttccattgcaaagctagcagcaagattagctgccacgtaagatttaccctcaccttctgtagcagaggtgataagtaaaactggccgatcagaccgactcatctgtaacgacaagttatttctgagtgtccgaaattcttggctagagacggacgcatcactcacaaattgatgtgcaagttcatttgtcatggaaaactcctttaaattaaacacgatcaagtcaaaaccgttatatcatacagagatcagttcatagcttcttcgtcgagataacaccaagaaccggtgcttttgcgaccttaatcagcgtctcttttgtcttaatagttgcctgtttaatttctctaagaacaatccaggcaagaccaactaagaatcctataatcgcaccaatcacgatgaggacaagcggtttggtacctgcagcaacatcactaggttctgctttagctaaaattgtaacggtatctgtatgattcgtaattgacgaaatggtcttttgaaatgccgccgctacctcgttggcaattgacgcagcatcattggcattttttgccgttgcatgaatcgaaaaggcacgcgaattatcttcattgtctaccttaacctgtttttgcaaatcaccactactaattttcagctgttctttttgaagtaattgtgcagatgctctatcataaacagccgctgttttaaacaaagatttaccagtagccagtaactccgaatcatattggttttgatttaaaatctggctcagtgattcagtattattcttctgctgattgacaacggccagagcagttgatgaataagacggtttcttgacaccataagcataaccgcctgcgatcacagcgcccagcaacaaagtgcaaagtgccaaccaccagttctttcgaagtgagaccagcaattctttcatactcaataagttatccatgattcctccatcataaacacatttcttaattatagacagccgccttcattatttgcgttttcatcataccgcaacatcggcaaaagtcatacgtttgatccagatttaaagaaatttgcaaaggtttttccccacgcgatggtaccttgttttatagaggacaaaagcgtgctatcaatcatcttatagtaataactcggccaacgccagttattataagcggcttgaactagaatcgggaagaacagcagaaagtaaatgttaccattcgttaattcaagccccaaccataaacctaccaagttagcacccgcagaaataagaaaagccttggtatagggaataatgtttgcattagcaatataagaggcatgaaccgagtgttgctgataaagaaaataatacaggattaatggtaaaaagacttccagtgtcgggacagaggcgggcttgatcaacttcagtaatgggaaaatcactaatagcgtccctaccgatgcgataagaaaaagccaaacataggcggcaacggctttggaagtcttatcgcggatagaagcaaaatcttgtttaacaaaatttgactgtaaaatcggattataggcgccgttgatagcagaagaggcagttcctattgcagacgcaaattggacccctaccgaataaacacccgtcacggacagaggtaaaaaggctccagccatcagtgacatcccctgagaagttacataattagacatgctgacaaggccatcacgccaggtatttggccagataaacaaaaagatttccttaatttcatgccaattcatgggtgacttcagtacatcacgatgagatcgaacctcttcatcttgccagtaaaaatgactgcagatggttcggaaaataataccatacatcaccagtccgataactggtgatagaatggacggataaatcagaaagccaccaaatgttagcagaatctggagtgaccgtgagaatacctgtgccttattgactgaatcgattttacccgatccgcgaagcaatgccgaaaaatagccgaaatacaagtttaggaaaagcgagaaacaaaataccagccatgtccacttatattcagcatctggtaatttgctgaacacaaacgcgttcatataaatggtcccgaaaatcccaaccagcacaacggcaactatcgctagaatcatataaatcgcgcgggcagcgtgaatcgtggaggccaataaatgataattaatcacggtatgatcatgttccttatctaccccacgtgatttcagcgttttggctcctgaccaaatataagcaatattacgggcaaacgccggatcaaagccaaaatcaaacaaagcaatcaggccgttgatgcttaaaatcaaataccaatagccaatctcttgcgaattaaggaaatgaaagatgattggtagcaataaaaagttgcttgccatcgaaaagatcgttcctgcataactccatacaatgctttttcttgtcacttcaaaccgatttggcaatttgcttcctcatttcacttagtttcaaaacttgcataaattcgtcgcagtcgttgttgcatcaatggccacgcgaattctttttggtatatttgtcgcattaaaaccgcttctttggcccaatcttggcgcttgtcaacaagctcctgcaacccagccgcaatacctgactcagaaggttcgcaaaccgcaccaaaaccatatttggttaaccagttcgacataccagaccgcttaatcattaacagcggttttcccaattccatagcttcaaagaacttatttggtgaagcatagagatgatttttaaggacgggatcataaagcgcgactaagatatcagccgttttctcgattccgttgactttctcgtaaggcacaacgcctaaatagtcaattcgttgatcgcgtttggccgcgtccgcaaacatattttgaaattgtccttggccagcaacggttaatgatagcgccggattattttcaacggcacctaacaattccggtaagcatcggtacgggctaagtccaccaatgtatacgattctaaagctcgtttgttttggatttataacctcggcatctgcagcaactgaactatctaatggcgaattgtagatcacagccagatttttaggcttagcaggttcaatttggcgccggcggtcttcagagcagattagcgtccaatccgccgttgccattgtcacgttctcccagtgaacgaccattttccgataccattcaggataattgcgcgtgtcaggtgcatagtcgaagatatcataaacgaactttgtttttgttttcttaacaacctttgccgtcacataaccggtatgcacattacatgcctgaaccgcatcgtattcgtgtaaatgtttacgaagccagcgatacaagaaggcttcaaagcggatgaacgcaaggaccttaaaatatttaaaagaatacgacaacttgattccagtgaagatggccttcagtttctgaccgtcaaattcaaaagtatcggtcgtcattcgaccatgtggctcctcccgccacccaagaattgtcacatcatggccggcagcctgcaaagcggcactctcttttaataatctagaatcatcatccacatgtcccgtagacacaaataatatcttcatggttcctcctgatccactcactctcttcgcatagaacgtctgcatcgcaaagttaatagacgtattttagcaaaaatggaaaaatatccaaaactctgaatttgtaaagcagcatcttaatgaccaacttcttgtctttcttgtatagcattaactttttaaacgaatattgggccatcttgtcgcggatatgccgcttaagcccaaggtcgtttgatgccgcaagattttgaaaataaatcgacaaccgtctcctcagtatgtattcatcaacatctttatttgcggcaacatcactcgaacgtagcacgcgttcgacttcatcgaccacctttgcataatcggttaacttctcggtgttaatcttatgagcaatggaacctgcatgctggtagtaaacatacaaagcatcgtgtaaccgataaatgttattggcacgcagcagaataggcaggaaaaaggccaaatcctcggcatactgtaaattctcgaagcgttcagtgccgataagctttcttgcaaatactttgttatgcggaaatccaccgataggatcatgggcacccgtcaacatttcatgtaagatgtcagcaagcttagtcttctcagctttcttcactgctggcgcctcttttggaaccttatctttttcgaccaatgagagataatcaaagacgagcaaatcaaagccggtgcccttgataacccgtagaatgcgattgactgcaccaggaagaagtacatcatcggcatctataaaccagacatacttaccattagaattgtccagaccagtattacgtgcaaatgccacgccacggcgattttcatcaattatgacagtgtcggcatgtgtctcatgataatgctgtaacaaactcgcactgttatcagtcgagccattattgacgaggatgatttctacctcaggtggcacttcacccaaacttttaaatagtctcggtaaatactgttcactgttaaacactggaatgacgatactcaattgataattcatggtgtcctccggttatgatggctggatcaaagcttcaaatgacactcattattctttgtcatgcaacaggaaagctgctgatccaggccataaaaataaagcctgcacactgatgggtagacgttctgccgcaatatgttgtgactttcttgagcattataccacagccctaccgctttcctgcgacaaacctagcaacttaaggcaaccttacattaggcgacaatagcttctcctccgtggtatgccaatgcttctcactaaatgtcatcatgtcggcgtcgggacgaatccgcatcttctcccttaacgcttaaccacttcatatttaccaaaaaaatcctaaagccaccataaagaataagcgctaaacacgtcaaaatatttatgattcctgctatatcaaataacctagacggctgatagccaagcgtcacctggttgcttcccttgcgaggcgttacgatgagtgcaccaatattactccgatgatattctgaccgcgacaacagggtaccatttaacatcactgttgaatgtcgatatacaatagccggaatcagcactgattttcggctttttgctttccacttataaacaacttgactatcagagttaacgcctatgactacttttagtggatgattcaaaatctgacttttataagcatcataagcaaaaagggtgttgccggtttgtgttacaggtaggtagtctggcgtatttttggtaataacgctaaagacgtgtgactgatcataggcatgattgaacaaatctcgaattttactttgatctttaatggtcgagtcagcgctaacagccaattgatcccctctccatgctgatgccttttcgttaacccacgtatagccattaatcaggtttaatcccgcaagactaataaaagcggcggcgattaagcgcaactgcataaagttaccacgtccgagtttctgaagtgacaagactgcccctaaaataatcatcgtcaaggcaaccgcattaaaccgctgaggaaattgaattgtttgaatgacagggaaatgctttcctatgacattccacggaaaaagtggcgaactgagccagagaaataaaagtccgtcaacattgatgattttttcatacaaagcaaggtttttccaactcaatgccgcaaagaccagttgaatcacgacaacaaatgacagaatcaagccaaagtccaaacgtgtcatattgcccagcgataattgtgaggcgctcccgatcaggtctttaacccggtacggcataaccaggctttcgtgatgtaaatcaatcaatgcggccaacgttgctgcgtttagtcccaccgcgatggcaacagccccacctgcagctaataatgttcggtaacgatcccgggcgagataaagacccggaataaagaaaacaaccgcgcttaatacatacagtaaggctgtaaagttctgaactgccagtagacttccagcagccaagccaaagagaaccgggtttatcggccgatcatgattcctcaccatccgaattaatggaatggtggcgaaaggcaaaagtgcggccccccaacctcttaatgctgtgtctgtgacgtaaaacatgactagtggcgtacccatgtatagcaccgctgcaccaaatgctaattgccttttgacccgacaatagcgtgccaaaaaatacatgccgcttcccgctgtcagtaaacataaaaagcttgagataatctgcgctctaaaccaagttttaaccagaattaaaataaaaccgtttaaataagcaaacgcacttccataaacagcattaacaacccgtcctgactgccgaaatgcataaatcgattggaaaaagttgaagtggccatttttaatttgcattgcggcttcataaaaacgattccattgaaattcccaatcatctccaattgccattgcatggtaattaatctgcggagctaagacaacgagtgccattacaataatccccacgatccataaaccatcacgcttccattttacgcccctgatttcctgcatctttattgtccccatcctctatcatctcgtctaagatcttcaatgataatagtttacacgctcagagtagaaaagtgtcacgaccattaacaaccgaccgacttaacagaaaaacaccttgtagccgctgataacaattctaccagttattacaaggtgtttaacgtagagccggttctaaaaacccctgacgcttatttaactgttaaaccacttttatcaatccaataggtctggccatttgcaaattgtaccttaacataggtgccacgatctgtcttttgctcaacagaggcatgaacctgctgaccgtcaaaccgctttgcattatcattaccacccagtgttgtaatactggtatggtatggaccgtccacatacaagccatcagtacgggtcttctgattgataacggcactataactaacgctctttgtagatagaattggacttaaagacgaaaaactcgttagtgccaatttatcagtccaatacgttttaccatttcctaacctaatttgaacgtaggttgagtgcgtcggacgcgaagttgtcgcttcgttgatgacctgcactaaccggccatttaatgatttggtattggcattaccgatcgcagtcgcagcggatgtatgatatgggccttcctgatacaaaccatcggcgcgatgagtctgatcaactatggcaagatagcttacagacttagtagtaagaatcttatcgtaactcgatgtcccagtcgctgtcgtcgttgtcaagccgcgtttgtcaatccagaaagtctggccattcgctaatttaactcgattataagttgtaccaccggctctagttgtaacggcttcagcaatcacctgaaccttttgaccgttatacttagtggcatcactgttaccaccagatgtttcaactgaggtatggtaaggaccggcagtataaatgccatcagcacgccccttttgttgaatcgtggccgtataattcacagctttatttgaaacaactttatcaaacgaaaattgtgccgtcccgttcttgtcaatccaaaaaaccttgccatcttgtgcttttacctgtacatatgtacctcgaaatgtagtggcctcagcttgtacatgcacagactggttattatagttaacaccgtcaaaattagaaatggcagttgttgcactcgtgtgataaggcgcagcagtgtaaatgccatcttttcgcgtattctgattgacaatcgtggcatcataacttactgcttttgtcgaggaaattgaatcatatgcaggggccggtggcgttaccgcattgggctgtgtaaataagcctgtatagtcaaccgtgacatcaattgactttgatgcaccgggcaaataggctaatgaagaatactgccaagcgccaaagtcctgattccacattgaattagcacttggcgtataaggataatccgcaatccaggtgcggcttttgccgactgtattgatagcagcattagagtattcataatatttaccggtgtataaaacgtgatgtgtgtatccacgccgattaagtgtttgccaaaatgcatttaaattaccgccaacatcgccactcacgtcatttccttcaacgtccgccacaacattgacctgcttacccacatttagcttatctagtgtgttagcaaaatgattagcctctgccactgcatcagcacttgacccgaagcgactgtaatgatacatggaaaccgtcatacccgcattccgtgcatattgaacttcgcttgcagcaaatggattttggtaattggttccttccgaggccttaacaacggcaccttttacgccaagtgaacgtagtgtattaaaattcgcttgcgtcatccaaccttgataagacgcaacatctactacgtctgttcgcggtaccgattgattaccaatcgtaaaactcatcatggtcaacggacttgcagcaaacgtctgaatatttgcctgtgccgcagcctgcgttgtcgtatcgccattttgagcactcgagaaagttcggacgccgtttgcagcattggtattcggcatccccgcgccactttcattagaatgctgattcatatcatggaaagccgctgcttggttttgtgttgactgcgtgcttgtgctctcattagtgtcagcagatacactgactggtgtccccaatacaagttgtgaaaacaaaagtgacgaagcaatcgcagcagacgcccaaaataacttatttttcaaaattttctcctttgaccccataaaaactcctcctagaacgaaaccttaaacacagaccattatacatggaccacgacaagttttaaagaaacattctgatgacaaaaaaatttgtggctcaagtactgacgattcttaaagacaatcaaattcggtgatcagaaatctcacggtcgaaagttcttttctgaacctgaacaagccattggtaaagtgtcggtaccgccaacaagaataaaacataatactgttcaaaccgatatcgcgcctgagtttccataaaaatataagcaaaaaagaacataccaaaaacaagcgccggtaaaaggtagctcattcgcgttgtcacccgtttttccgttaaaacacgcttgaaggtccccaaaaccgtgctggaataaataactatccctgaaaagttcaaagatgagattagtaacggatggcgatccaggaaatgttgattaccgccaagattatattgattatcgacatttccaatgaagcctgtgaatcgcttcataacttcctgaatatcgatgccatgtgtaaaggcatttcttagtttctcggcagccgcgtctttataaagtgcataatcgaagtgataggccttcaaatcataatagagctgtgactttcgggcacttgtcgtatacttgccgctaacgcctttcccggtcagaccaattaagaacttatagtaagggttcccgcctttgatcccgtatggtgcaatacccgaaagaataaacagctgattaatggcccacccaaggatccaaaagcagcttagaaataagacggcctcacctaaacgttgccgacttttttgctgaatcgcttgaataattaaggcaaccaaaatcgccattgccactaccaccgcagtcggacgcaaaacctgggccactgcgatgcaaatagccgctattaaaagattcagccaagatcgacgtttaagaacaaagtatatcgctaaggcttccaacaacagaccctcgtgttggttattaataatgccggcgccaatgaagataaatgggaaaaatgcaaacagccctgccccaaaaaaagcaacatgacgatttgaaaatagccttaacgttttataaagtgtcagaacagttaaggttatgaccaccatttcaacaattttaaagtataaaagacgatcaccaaacacgcgcatgaacactgaaagataataggcatagccaatctggaaattataatatctaaagtaatcgctaggcttaactgcttggctcttaaaagtcccattgacaatatcacgcgcaccttcaagcaatacctgatagtcactgaccggctttgttcgatacacataattccaaagtcccaagaaaataatcgtgatccctgccagcaaaaatagagcttgccaatcagagaggttaacggtacttagtttaaaaagtaaaaaaaaggtgattacaacgcccatacctcccagtacaaaggcgggtgttccccaagcagctccttctaccacctggattttaaaaagacacaataggcagaatatgaagaccccaacaagcaggtaccttgccaaccgattaataaacttattagaatcttcaagaataagttcaacacgctgtttcactttatgtatttcctccaattctcctcgcaatctccaaagtatgaggttctcgttgaagcttgtaatttcaatataatcccgactttaacgacgcttctccaaacagtcatcccccaaaatgctttcattatgccgcagcccctgaaaaggtcttggtgagctcatcacgacttattttgccacggatgaagtttcaagattgcaacaccgccatgttatactacttttcggatgttgctattagatcaattcggctaaggagggatattggcagtggatcttattttgttgccattcatcggttttatttttgcaagtatgcgcccaagtcaaaatcttcaggatgggcatttgggcaaaaacgctaccaacaacctaaagggtattagtatcattttcatcattctgcaccatatcaatcaagagatcggtgaagtaggcgggacttttttttcgtctcgcttaacgcttgcaggcaggcttggcgttgccatcttcttctttgtctcaggttatggcgtcatgcgtcagtatcagataaagggatccacttacttaaagaattttttatcacaccgagtgttaccaattgtggtactttatctgcttgcaatggcgatcatctttccgattaagcaccagtttatgggattgacactggctcaagcggttatttcaatgactgatggggcgccgttcgtaaatgacagttggttcgtgttagccatcatctttttctatgttgttttttggatttctcttcgaatttctcatggacatcctttacctttgttttcctgcttattccttcttactggtgtttatatggtttacatcggaacagaaggtatgggcgaatggcttatcaatgccgcacttgtattccctgtaggcgttctttttgccttttatgaacaacgccttgttccttttattcgccgatattatctacccttgacattaataacgctaacaatcttcgctctgttcttcactttagacgagatgcatgggcaaatgcgttatcgtgtggtcagtgaagttttcttcgcgctatctgtcatgatgattagttaccgagttgaattcgtcagtaaaatcttcttaataagcagcgcgtggtccctaaacctatatctctaccatccctttatcgccgattggctatatagcatcgatgcaattggatcacacagcgttgtttataccattgtggtaatttcattaagttatctggcggccggcatcatcgcgttgttacagttatgtcttcagcggctaaaaagcaggcgtcttagcgttaaaacagtctgaacatggatcctcattttcaattcagatgcacttacccgtgattattggtaggtgctttttttccggcttgttcgcatctacaaaccattaataccttgacgttgaagaacctcacttaagcttttcagactcgtctttggtatggcgctcttcactctgccatgtttgttgactaataataaaacggggacggtgtttactttccagataggtcttaccgacatactcaccaataacccctaagcttagtaactgaatgcctcccataaatgaaacaatacaaacaatagaggcccatccggcaaccgtggccccgcgaaaagccatcagaactgcccaaatggttccgacaaagccgaaaagactgacaatgcctccaagttcggcaataaacacaatcggtttgatagacagacttgtgacgccattaattgccaacgccaccatcttagacagggagtaatggctctttcctgctagccgttcatgccgttgatagtaaaccgaggtgcttttgaagccaacaagtggaaacattccgcgaagaaacaaattgacttccttaaaatctgccaagtgttgaagcactttactacttgctaagcgatagtcggcatgattgtaaacgacatccacacccatgagacgtagaaatcggtaaaagctctgagcacttacccgtttaaaccatgaatcactttttcgatcggaccgaaccccataaacaacctcacagccatcttcataagccgtcaacatgtcgttcatagcattgagatcatcctgaccgtccgcatcaatagagatagtcacgtcacagtggtctttagcggtcattaaaccagccaaaactgcattttgatggccccggtttcgactttgctgaatgcctaaaaaatggtcgtccgcttgcgaaaactcctgaatcaaagaccatgtgcgatcttttgacccatcatcgacaaaaaggacacggctattttgcgcaatccgctttttctgaatgaattcagttagtttttttaaaaatctaggcgccgtgatcggtaaaactttctcttcgttatagcagggtattacgatccacaatactggaagcgccatattcgttcctctccttcaatcacactcgccgccgcaaaaatttgcagtggcgagtgtgatgtttattctgctacttaaatgctaccgggcgagttgcctttttcccaaattcatataaaatagcgtctaaaatgcgctgtgaagcatggccgtcgccataaggattcttggcttcggacattcgctgatattcctgatcatcgtccaaaagttgcaacattgcagtcttgacagtctttggatctgttcccactaatttaagtgtacccgcctgaaccccttcaggacgctccgttgtaccgcgaagcaccaggaccggcttacctagggacggtgcctcttcttgaacaccaccggaatccgtcatgatgaaatagctacgtgcggcaagattgtgaaagtcaaccacatcaagcggtgcaatcaaatgaattctcggatgatgacccagtattgaatcagcggcttcctgtacaaccggatttaaatggacaggataaataatctcaatatctgggtgtgtttcgacaacttctcgcatcactttgaatactcgccgcatcggctcgccttgattttcgcgacgatgcatggtgacaagaatcatttttttgtccggatcaattaactcaagtacttggtggtgataatcatcccgaacagtttggtccaaggcatcaatagccgtgtttccggtcacaaaaatctgtttttccgggtgatgctctttcaaaaggttggtacgactctgctcggttggcgcaaaatacaggtcgctcaagacatccgttaactggcgattcatttcttcagggtaaggactatatttttcccatgttcgtaacccagcttcaacgtggcccaccttggtctgctgataaaaagcagaaacactagcagcaaatgttgtggtcgtgtcgccatgaactaacacaatatctggcttttcctttgcaataatctggcccaatttaagtaaaacgttgcttgtgatatctgccaatgtttgtcgagacttcataatgtttaaatcgtagctaggctgaatatggaaaattgaaagcacttggtcaagcatttctcgatgctggcctgtcactacagtaacttcctcgaattcatcacttcgctgcttaagtcccaaaacgaccggcgccatcttgattgcttctggccgggttccaaatactgtcataactttgatctttgccaagtcggcacctcattctttttttgattaaacgactaatgttgcattgcaagaataattttaaactcagaaaaattatagcagattattcaataggaatctaaattccatcagcatttgcaatttgctacagaagacttaaagaaaaataaaacctccaccaaattgtagaggttacatttgtcagtgctgcttaaattgttagtctgttaacgtgtcgctgttccttcttgaattgtctttattggctcaagcccggaaatcatataaagcgcattgccttctgtccaagtaatctgattctgacgaacattagcgtttgtcaccgttagatcaacggtgccgcgctgatctggcaccggcaacgcatggctggcaaaccaagcgacaacctgtttagctaatggtaaaggatcctccccgttaatggcagatgccttaaccgtcacgatccatcgaccctctgtccatgtcaggtaagttgatcctgccgctccctggctagttgcttcaataccgtctccaagcgccacttttggaaggctggcagttgactgggataccgctacttgtgcttgcgcatcagaggcatttggataagtttttttctggatggccaattccgcatttatattctgcaacgttggatcgttaaagggcagtgcgacgcttcccgggctgaagaaaatcgaatagttgctttgatcaccagtagcgaaaatattcaaatattgtgactcggcaacggcatatgaagatggccacttagctgaggcaatttgattaaaaaccgcctttttcaactttgcataacgttgctcaggcaaattcttgctactggaagaatctgacgccttacttccaacctgattgctgctactgagactagcacttttctttgagccattaaccccgttgctttcgcgattcgccgacgctttagtggacttgtttgtctgactaacattacttgatgcttttgcatggttattctgaccagtctgaccgcaccccgcaacggtcaaaagtaacgccaaaggcactatcacaagtagcttcttcatttcccgcgcctccctttttatataacttaattatatccccgaattcaaaataattcattgccgtcactcatttaattaacctgaattgatatataatccttgtcgaaattaatggtgactaggtaccactactcggaatttgcattgagaaaaaacaaaaaacggatattggaggtggtttttccattccaatatccgtcacctgtttgattgacgctaaattacaaacgttgccaatttcctgcattaggacagatgtgtgatgtcttgttgaacgactagatcatgaagcttctgccgttctggttcagtatcctcttcaagtccttgcgaagaaactttgtcgaaaagaatcttaatggtttgcaacagaatacgcgcgtccagaaaaatactataagttttgatatataacaagtcaaactttagcttactatgataatcggaagcatatttaccataaacctgcgcataacctgtgatcccagcacgaacgttgtgccgtaaatagtaatgcggctcttgctgattaaactgatcaacgaaatatggacgttccggacgtggcccgacaatggacatatcaccttttaaaacgttaaagatctgtggcaactcatccagtcggaacttgcgcaaatatttacccactggcgtaatccgcgaatcatgagccttggcaaggactggtcctgactttgcttccgccgtagctgacatggttcgaaactttaagattttaaattctttttggtttaaggtgatgcgcgtctgcttatagataatcgggcctggtgatgataatttaaccaagatcgccgttacaagcataaacggggaagcaaccaccaacatcaaaagtccgacaacaatgtcgaagatacgtttcagaatcgcgctttcaggcttaattctgaattgagttattcccatgacactttcatcttcaaagttcattaagtttggtcgcagcatcattaagttatcaaaggttgacggcaatagaattgtcttctcttttttaataataatatcaatgatctcacggcgttgttcgtccggtaagctcttggtgagataaaagatatccactttgtcaatgatcttcttagcattctcaacaaaatggtctgaaacgacgtaggtaaccttgtgcttattattctttgctgaatggaagttctctaaaacagcaggtaattcatgttcataagacaacactgctactttgtaattacttgtaaagtgaatatacatgtagtagatgaacactcgccaaatgcccaaaatcaaaatgctgagcaggaaagaataagctaagactagtcttgggaaagcgaagaaacgccccataaacgtaatcatagttagtcccaatatcgtgattgtctgggcaaggaccgtgttaaaaataatgtcactgattcgccgattataataaacataaacgcctaagaagaaatttaccagtagaaaaagcagcgagatatagactgccgatccttcatacattttaaagttccactcaggaatatcagatccaaaccgccagtaaaaggcgagtaatatacttaaattaaaaagaccgacgtcgccgatcattgttaacagccgtttgaagccattccattcggcactctgtttcatacagcaaccctctcaataaatatctttggtcaaaaacaagctcactcattatagcatacgtacagaaaatgtccgccatgtcggtcatttatcgtggaaacacccaacaacggcctctcagcgttgataaggtatcccatcacgctcagcactttttatacctcgtcgcgcagaaatgtcagcccataaatatgggaaaacggttttaaatgcatgtttcaaacgcccacgcatgcccaaattagcactaccccatgaattatcaaaaagatgctccatatagtttgcatttgagttacgactggcatatgtaaagtaatcgcgcggataaaccgtaattttcggcgccaattcctgacgctgaccgttcatccgaaaatcggggtataaacgcatcaggattttcgtgacaacaggattactggtcattttctgcatgtcatcttgtaaatccggaaacttccgacctgcgtatacatctaaaatctcagctaacagcggtgttttggactctgcacctataaaagacgttaggatactattatcatactgaaatccccataccattttttgattcaaaaacggcgcaaggtccttcttgacaatcatatcggtatccaaataaaaaccgccgtattggtacaaaactgcgtaccgcaattcatcggccgcataacccagtttgcccgcctgatacattttttccgaaaatgcatacttgcttaagtcaaaattcttatcgttccaaaacttaaactcccaatcaggaagttgtgttcgccactcgttaacgcgcgcttcaataaatggcggtggcgtcgttccaaaccaagcataatggataattttaggaatcataacgcttctccttttctgattgttatcgtttatcggtgaggcccattaacgagtaatggagaaagtaatagaagcttttaaataaacccaagtgctcgtggcgacgatagattgtccaagtccattgggcagcctgaattttatttgcgctcaatgaagtctgatgcttccgatatttagcgagaatttgctcggatgcaagataagcaaccgtgccattgcgggcaatcgatagccaacaagcataatcttcatgattaatctcgggaaacggatacttttgagcaattttacgtgatagcatcactgtcaacaatccaattcgatttcccttcagcatttcatgatagtccaattttgtttctgagattttgcgctcaccaatttttgtaccatgatcgtccacaacttcataggaacaataggaaaaatcaacctgatgctgctgcataaacgttaattgaatcttcaacttatctggtagccatatgtcatcactatctaaaaaggcaacatactcgcctctagaatgctgaaccccgacattgcgtgcattcgccacaccttggttctcgtctagtttaatataggtaatgcggctatctgtagcggacaatttttccaccacttcaaaagtgtgatccgacgaagcatcatctacaattaaaagttccaaatccttaaagctttgttccaataccgactgaacggtattaggaaggtacgtcgcagcattataagctggcatgacaacggaaacaacaggtgtattacccaaagcatctctctcctacaaaaatagattgcgctaacacgacaaaaataaccagccagtatctcaccgcctggccgatcattgtttactgaaccgacgccacatacttggcaagtccctctgcaagtggcgtgtgggtcatgaagtcaaactgatccagcttgtccgtttgtgcatatgaatcgcgaatgtcaccaagacgcggggctttatgggtggcatgtaacgttttgccagtgagtttttcaagctctttggcgacctgatttaaggtggtttgtttgccgttagcaacgttgaaaacatcatcccgagcgcttggggtctctaacaagccgcgaatcgcatgcacgacatcaccaacatagatgaaatcgcgggtctgttcgccatcgccgaagaaagtgaatggtttgtcttcttgcaacgccgccatcatgatcgacagtaccccactatagggcgacttagggttttgcttcggcccgtatacgttgaaaaagcgcgtgcaaaccattggcatgtcataaagccggccataattcaaaaccgcgcgttccgtggcaaatttgtcaactgcatattgagttagcggtttaacggccatgtcttctttcttaggtagctcaggagaatcaccataaactgcagcggaacttgcaaagaataactttttataaggtattttctgggtgcgcaaggtttcaatgatgttcaggttcgcttcctgattaacctgatgtgtcgcgtacggccgttcaaccgaatcagcaacactggcaatggcagccaacaaaacaatgtaatcaaatcggccttccatcaaaagctgggacatgaaggcatgatccgtgatgctatgttcataaaaggtaatccggctagaatcgggaatattggttcgcaagcccattgataaatcatcgacaatggttatcgtattgtcaggatccgtcaacaaaagctccgtcaaattggaaccgataaacccggcgccaccggtcactaagtagctgctcaagataatttcctccgtcttgcttgttttatttctctctcatggtatcacagcagcgaccagaccaccgcagctaatcgcaaatgttaggaaaatgataagaaccggtcaacgccttaactgttacccctttgcaacagcctgaccgatcatttgcttgaacgggggcttcccagctgtcatcggcggtttgtggtcaaaaagtaacagcaacccaaatcgatccaagactttgccaagtgtggtgaggcaacgtacccagttacgaaaaggaacgatcgttgcctatatttaaaattgaggtgacaccgtgtcaccgcctgtacgcttttgccagatgattttgcaaaataactaaagcaaatcggtcctgaccagacaaagttcgtctgccgaggaccgattttaatggctattaaagcactgatatcgagaatcattcaattcgactgtaccaaccgccgatccaaccaccgacttgccaaagataacgcgtaattcacaacaaaatacatcacggccaatgccacaaacattggaatcatgtagttaatattttgaccataaatgatttgcgcgtgatacgtcgcttctggcagtaaaatgatcgttgccagtgatgtgtctttgacgagcgaaataaactggctgacaatcggtgggatcattttcttcaatgcttgcggcatgataatgtaccgcatcgcctgatagaaggtcagaccgttactgcgcgccgcttccatctgccctcgcggtacggcattgatgcctgagcgaacgatttctgccaacattgccgattcaaagatgctcatcgcaacaatggcagcaacaatgacgttaagccggatgccaatgtctggcaaagcgaagtaagtgaagaatagaatcagcagtagcggcaaattacggatgacgtcaatgacaaagccaaccgccgccgaaaaatatttaatcttgacatagcgtgccaagcccaaaataaccccaaggacgaagctgaaaaaaatcgaggcaatcgaaacttccaaagtcacccctaagccttggagcaggtaccgtaaattaatccacgaatacgcatcaacaaaattttgcataaaacctgctcctttctaggcggtcacccattttttctcgagataacgcattaggtaactcaacggcatcgtcaaaatcaaatagaaaatgccgacgattaagtacgtatcaaaagtcgaaaaagttgtcgccgcaattaatttaccttggtacatcagatcaaatccagcaacgaaggccagaacggaactattttttaccaaattgataaattgattgcccagtggcgggatgacaattttaaatgcctggggaaaaataatctgcgtcatcgcctgcgtataagtcatcccgatactccgagcaccttccatctggccgctggggactgcttcaatcccagcacgcacggtttctgcgatgaaggcactcgtgtaaatcaacaggccaatggtgcccgcggtaaagccatcgattttgacaataaactggggcacgatcacgtagaatgccaaagtaataactagcagcggaatgttacgcacaacttcgacataaattcgcccgatgactcgtagcggtttaaatggcgagatttccatgagtgcaaataacgtcccgacaatcaagctgccaatcaaagctaaaatgctcgctgctaacgtgaaaccaagtccggaaagaaaggtgttccaattattggtaagaattgaccacatgttattccacctccttaagactgaatcctggcacatcgccgaaccacttcttgatcagctttgcataagtcccgttttgtttgagttgtttgattgccttgttaacggctttgacaaacggcttctggcctttgttaattgcaatcccgtatggctctttagtgaaggtacccccggtgacaatatagttcttatcctgttctgacatcccgtataaaatcccattgtcagtagtcaaggcatcaccttggcctgacttcaaagcggtgaacgcctgcgcataatcggctaactgcaagacagtggtgtcgggagcagcttttttaacattatcaactgaattggacccttgcacgccgataactttggtgcctttcttcaaatccttcactgacttaatcggactgccttttttaactaaaagactttgcccggcattgaagtaaacatcggaaaagtccagaatcttttggcgctccggggtaatcgtcatggtagcgatcaccgcgtccaggttcccacctttaatcatcggcacgcgggtatcactggtcacctgaaccagctgggcgtttccttttttgcctaaaatctgcttggtaatcgccttggccatatcaacatcaaagccttcaattttaccggttttaatgttcatcaagccaaacagacgggtatcagccttgacgccccaaataatcgtattggttgccttggcgttcgttaaaatatcacgatccgccacacttttgccacagctgcttaacggtatcatcaatagtaacaacaccagtggcaggagcatgcgtttccacatttttgccattttaatgtccctcctcgtgagcgccagccagcgtgggtagaagccggattgtgtggtcattgcgaccaaggttcttacacacaggtttctggtcgggagccaacgcgttatcgtagcgcgagtcctcccggcggaaatgtcccgccagcaaacgcctcataactggaatcaatcctcaactggtcttgtcacactaatgattgataatcttactgataaactctttggcgcgaggttcttgcggatcgtcgaagaactggttgacatcggttgaatcgactagaatcttgccatcgtccataaagacaatccgattgccaacatggcgggcaaatcccatttcgtgggttaccactaccatcgtcatgccttgttcggcgatcttctgcataacgtccagcacatccccgatcatttccggatccaaggcactggttggctcgtcaaacaagatggctttaggcttcatcgccagactgcgggcaatggccacgcgctgttgttggcccccggataactcacccggaaaactatccgccttactctccagtccaaccatctttagcagatcgcgggcttcctgttcaacttccgccttgtctcgcttcaagactaaatcagggcctaaagtgatgttttgcaagacattcttattcgcatacaaattaaaatgctgaaagaccatgccgacatttttacgaatccggttcatatcggtttttttgtctgccaagtcaaagtcattgacaatcaattgtccggaagtaattcgttcaagaccattgatgcaccgcaaaaccgtacttttaccagaacctgaaggcccgataatggtcaccacctcaccgcgatcgatggttagattaatattttttaaggcttggaatttgccaaaatacttgttaacatcgtgaaattcgatcatagacatgttcgaggacctccttgggttcgcttgctcttatcatggattttacagagaaaattaatgatacgcaaatatttcttttcaaaaagtcaagttttatgaccgccgaatccgtaaaactcccgaaactcgggattccgcaccatcaacgattttcgtcgtgacttacccgtgaactctgatcaccatacggcactttagtatcggccaactatcagcattaaaaaaagagccgcgagttttagtggcactttcaaaactcgcgactcatatgcatttttattcttaaccatctgacagtagcgactacctaccgctgatgacgccgactttcacgcgtaggcaacggcggttcttccgcggaagacgttgctttgttttctgtcacagaagtccgcgcctcttctcgtgttggcaaagttgcaggtgtggccggctgttcgccttcgcttgcagccggcgtcttatcctgataggccagctgcaccgttaagctgtatggctgcttctccttgcgcaaaccactgcgaccgagtaacttttgctcaccgccaattaaaaagacattggcggcgactagatgataatcacgttgcgcctctgctgccggtaacaaaccaactcgttcaatggttgctagcggcttagccatcaacgcattcaagccaccggtgatgattagctcgtgatccgtgtgctgcaaatcgaaaaacggaattggaaacggcgcgccaatagctagaactggctgctgggtttcttgagccacgcgactaatcgctttgtcatcaagcccttgataattcagactcaagactccctgtttgaccagactggcaactaagtcatccaaattggcttgctgttcagccgtcatggtcacatccgccgtcagcaattgatcctgggtaaacacgccactggccggtgctgcccccagttgcgttttcaattcgttttcggcagcagttttcttagccgaattactgcccaaccacttctcaactgtcggcgaaatatcaaaccgggttgtcttatttgtaaaatagtataagaagtttaaggcaataaaatacaaaaagacaacaaacgccagcatgaacaatgcaccacgaattcgaaaatccggataccgtaagttttgaatggcgatgtaaagtaggtaaaaattggcgacaaacgctatccacgtgaaggcttttccttttggcttgtcagcaatattaaagtagccaagcacgcggttgataatatcaattacagttaacatcatctcatcctttccgcggcttattgaccgccactgctggtggtatcagtctcttggccattatcagtaccagtttgatcggatgcttggtcgtcactggtcgtggtgctgcttggcgttgaagtggaaaccgttgatgcggtcgaagcgctcggcgttgaagtagaagcctcggtgctcgttgtttctttttcaccagatggatgactcgcctgtacctgcgactgacttgctgcagctggctgcgaagttgatgtttgacttggctcagcttttgaagacgctgattgcgcagcccgtgaagccgattcggattttatttttgaaaccaattcactttgttcggttgccgattttggttgattgaccggattaatcgtattcacaatattataggcactaatcaggacaatgagcgaaacaatggcagtcggcggtaataatggcggtgttcgataagccatgaagccagctcctttcattcatcgattcattttaccctaaaaacagcccgaagcatcttaagttaccgctaaaattatacgacattctaagcagcagccaaaacggctagcgaaaaccgctgctttgaactatctttaccaacatctatcgcctgcatggaaaaggcagttggtaaataaacgaaacgacatcagataattgatctgatgccgcctcatttagtcgtaccgttaaatttttttcacagcgcttcagctaccgattagcgtttttcaagcgatcagcatgttcttgacacgctgcgcataagccgtagagttcaaaattatggctctgaatcttagcgccgggtacctgttcttcaaaataattcaagggacacatttttaattcgatcactttgccgcagttggtacaaataaaatgatggtggtgcggatgttgaaagtcgcactgaagcttaacgacaatttgatcgtcttccatacggctttcaacgatacccatttcaatgaacgacttcacgttgcggtaaatcgtatcatgcgacacccctggaaattgcgtgcgcatataccgatcgagaatcgtcaccgctgtgtaccgatgctgatttctacctaaataatcaaccatcgattcacgctgcttggtgacgcggtagccatgctgttttaactgcttcaaagcaatcgctgtgttatccataagaggctcctttggcttgacacttgaattctagacgtgtattctatcaaatcgtactggttacgattagcaacttacagtgtatcacgcctgataggaggaagcaacatggctgaaaaaaccgattacgcatctgctgcacgccgtctcaaaagtaaaaaccccaaaacccgttcacgagcaaaacgggttatcaaggcagttaagaaaacgacaaaataacaatcagaacggcaccttattgtcgctgccatgtcgaaaattgtaaaataaaaacgttaaaggcctctaacgacaagatttttgtcattagaggccttttagtgctgccatcaagcattttatcgacacattaccggtctactagacatttcacaaaatgaatcgcgataattctcgaccagggttctttttgccaccacgtcacttctgttcggtgtcgaccgacaaaaagccacaacttttaagcgccaagtccttcatgaaccggtcaatttgctgtcgcgcttcatcccaacgatcatttttaatgactgtcgcaaacggtttaagttcatcaggcaaggttaagtcgcgtttgtattcagggcttttcaatcgcgctgccaccatgttcggctcatctcctcgaccaagcaggcgatctttcaaaaccgtgggatcgtcaatggtcagaaacaaaacgacgacttcttttggcagctcacgaacatacgtaatcgcgcctttggtatccaaaacgatgcttaggaagggatgcttagcccagttcttctccagcgactcatgtgatgacccatattcatagccggcataagtgactttttcaataaaatgcttagtcgcaaaacttgccggtgtctcaaaataataatcaaccccgttttgttctccagtccgcggtggccgcgttgtgtgagtcatcacccgatgaattcggtagttgtcgcgcagatacgcgctcaccgttgttttaccagtccctgttgcccctgtgatcacaatcaacttatgcgcagccttcatgagcagcctccttaaatgattgcctcgattgtaccaaacctacgccgattcgtcagctcaaaatcaacgacccttgcgctttgatgccaaactcgctgaccgggttcacttacgtcaaatcctggtaaaaagcaatcacaccaactttactactttgaacaaagccaatattttcgtaaaaggcgcgagtttggggctgatcatcggttaaaaggacccgctgacgaacctgtggaaattgatctactaatgcgtctaccaattgccgcccgatcccctgccgttgataactgggcaaaacgagtaaatcctgaataaataaaatcgtctcaccatcgccaactgcccgaatcaaaccaactaactgatcgccatcataagcccccagcacgcttaacgattgcgctatcgcccgctcaagtttcttcggatctcgcgtgtacatgttccaaccgaccgcttgataaagggcaagcacatctgcctgatttaactgacgctgatcaattttaatcataataaacctcctcctgaatctccaccgccatgctacgttgatgaacgctttaatgagttctattgtcgcatacattcatactcaatggatatgttcaggctcgcgtaatcgtaacgcgctcacagtcgcagcaatctgcgtgtaaggaccttggttgcaatggccaaagcctatttgacttcagaaagtagctagtaggcagtaaagtttcttatttaggcaattaagagagctgacattgcgttctataacgcgctcacagtcgcagcaatctgcgtgtaaggacctctagtctaaatggccagagaccagccatttaggctagaggccacttacactccgattgctaaccgcgccggttcgcgcttactaaaaaagaccggtcaccatgaccgatcttttagttactatttgcaggatgtgaacgataaattagagacgacggccaaagcttggtgcaaagtaagcaacactttgaaccgtaacgttttgtcctggctccggtgcgtggatgtactggccgttaccgatataaacgccaacgtgataagcattaccaacgctaccccagaagaccaagtcgccagcctggagatcggaaaccgaaacatatgagccaagtgtgctttgcgcctgagaggtacgtggcaggctaattccggcttctttagctgcgtaatagattaagcctgagcagtcaaacccagcaggtgatgtgccggcgtaaacatacggtacgccgaggtatttagcggcgttaccggcgatgctgccaccggaaacggaaactgtgctgcttccagctgaagcgggagcctgagaagatgcagctttactagagccgagactatttgaagaagcggttgtgctagaggaagcagaagtgcttgatgcgctagcggtggaactagcaacggctgtcactgctttttgagccgcctcagctttggcagcttcatcagcggccatggctgccagcttttctttgttagcatcaatcgtttgttgagcatcggcagctgccttatcagcatccgcctttaagccatcaatcttggctttatcactttcaagctggctcttggttgcaaccaggttcttttggttagcttcctgagcggctttcaggtttttaaccttggcttcggaatctttaacggcttgcaaagcttcagcgctcgcttgactcaacttgctaactgtcaatgaccggccgacaagatccgtcagactgtcggaattcaaaataaagtcaaaatagacattgccagtaaccgagtcgccggcacgcttttgcagagagatcagctgatctttcaagttgctcttacgcttgctgacttcctgattggcttttgtcagttgtgatgcgaaatcagcgatcttggcctgactgtccttgatcttggcttcggcatcctgaatcgccagaaccttattggaaacctcgttgttcagtttggcgcttttttcgttggcagcctgaacctgtttcaacaaatcgtcattttgcgcttgcaggctcgctttgtcgtctgccgcatgaacggttgttgccgcgaaacccgaaaccccaacaccggctaatgttgcaaccgtgatggcacccgtaaccaattgctttaatctcattttatcgccactcctgctctcattttgttcacaaggttcacactaacactgaactgttacaaactcgttacagggtggttaccatcagaatacttttgcgattacttcagcagcactttatgatcattttaataaccattttatttctaagttatatttacgtttttaaatttaaaaaagtcaggaataaaagcggctctttactcctgacttcctgcttattttgtcatttaatgctaaccggattgaaactagccgcgactcgctacctagcttcattcatcgtctcaccgtaaccgaattacttgattttaactaggaagtaccgcttctttccgcgccggacgatgacatattgaccatcaaaatgcgtgcttggatcaacttcaaaatccaagtcgcgttgacgggtgccattgatggtgatcgcaccgttttgaatatcttcccgggcctgccgccgacttggttcgatcttggtagtgtctaccaaccaggtcacaatattctctgccgtttgcggcgcttcaaccgttggaaattgcttaaagccttgcttaatatcatcagcacttaaatccgcaacatcgcctgagaaaagtgccgcactgatgctttcggcttgatcgactgctttttgtccatgaacaaacttggtaacggcgcgggctaattcgcgctgagctgcacgtttttccggatgcgtcttagtggcctcgaccaactcggcaatttcatcacgagataggaacgtgaagaacttgaggaatttttcgacatccgcatcgtcttgattaaaccagaactggtagaactcgtatggtgacgtcttttccggatccagccaaaccgctccgccagccgatttaccgaacttagtaccatccgctttcaacatcagcggattggtcaagccgtaagcacgggcgtcaggtccctcaagtcggtgaatcaaatcaatgccggccgtgatgttcccccactgatccgccccaccgatttgcagctgcacatcttcatgcttaaacaaatggaggaaatcaaccgactgtaaaatctggtaggtgaattcagtgtaagaaatgccagtctcaagccgacttgccacgacttccttattcagcatgttattcaccgagaacaacttgccgtaatcccgtaaaaagtcgagcatggaaattttggaaagccaatcgtaattgtccacaattcgaaaatcgtcggttccaaacagattctccatctgcgccgtcaatttcttcttgttcgtcgcaatggtctccattgtctgcaagaccctttccgagttgcggccagatggatccccaatcgaaccggttccgccaccgattaaaatgaccggtcgatgtcccattaattggaagcgcttgagaatcatgaaaggaatcagatggccgacatgcagagaatcgccagttgggtcggtaccacagtatacgctaaccgccttttcttcggttaacttgcgcagcccggcttcatcggtcagctgattcagcgccccccgccattttaattcatctaaaatctgtcctcgctgtgtttctgtcattagaaaaatcctcctcattacgatatggctagcatgatcagcacgttagcctcgagccaaaatgtacctaattacgaaaaaagtcgtccctgatcaactaagatcagggacgactttcaccgcggtaccacccaaattatgctttgcatcactctcatggatatcggcatgacccgcggccagaattcattgagctgtaattcgtgctatcaggcggaacggtttgcagcaaccaccgtttttctgaatgcctacctagataacactactgcgactcagctggtaaattttataggtcaaattttaacacatgcacgctatttgtacagaggcagtcgttaaactcatccacgaaaaccgcgcgctaattcccaaaagcctcgtttcggaaaacccaccgcaatcttacggatcttgcggcgcatcttccggtggtaaatcggccggataagttttaacatcggcatccagaatatcgtacgcatccatcaatttgcgttcgactcgttcgcctaattcataagaatccgccacggtcattgtcggatccacccgaatgccgatcgtcagcaacaccgcatcgccggcataacgcgcttcaatgctttgaaccccgagaactcccggaacctgcgtaatcgtttgccgataagccgcaattttcttggtgtcaaacccatctgtcaattcaaaaatggcatcacgtagaattgtccaagcggcatataaaatcaaaaggccgaccgcaatcgctgcgccgccatccagccacagccacccagccttcgcacctagaatggccagtaaagtcccaccgctagtcgcagcatcggaaaaactgtctttagacgctgtccgtaatacgctgctgtccagttgcttagcgcgaatatgattcatcaacgaaacactcgccatggccacccccgcagccaggctcacataaaccgccaaaacaccgggcacttgcactttaccttggtaccatgcctgcaacccgtggtagccatcaagcaccacgtccagtccaacgactaacataatcagacctgaaaacaaggttgcaatcgtttgaaatcgccagtgtccaaatcgatgctcactgtctggtcgttgctgggaaacttgcagcccccataataagataagcgccgaagccacacctgtcagattattcaagccatctgccgccaatgccctggaatgtgctaattgcgcgatccacaattcggccactgttaaaccaccataaacgaccagattcaacgccgctgcatgctgggcacttttcagacgggcaaatcggcgttgttcatcttttaaaatattgcgaccagcatccatactaattccccctcgtcagaaaagtcgttagaggctattataaagcaaaattgatcttaatcatcgtttaaacacgctttttaacggcatcaagcgctttcttacaaaacttttacataggaataacctgttatttgcattagccatggttcacgctgaacaataagacttttgtcacgcttgggcgatctggcgcttcaaggcgttagttaaccgctcaagccgggcaattgtatcgtttaaggttaaataataataaaccatattgccttcacggcgggatccgaccatcccaatatctttcaagtgtttgagatgatgcgaggtagctggctgcgataatccgattgcatcagccagatcattaacactaacgcctacgtgattatcggctgcaccgagaatcataatcagcttttgccgacttgaattggataaggcatttaagtggccgatatcctgcttgaattcttttaatgcttcctgttgtgctgaactatatgccgccatagttggcctcctcatgaattgcgctgagcacacgcggtgaatcaattgacattcacaacgaataatacctgaaatcataacgattgcaacaaatatgcaaaccgttcatactatgcattaggataatcaatgactacttggaggtgcaatatgacaacgacaacaacctttcacggcttaggtgcggacaatacgttaaccgtttatgccgatggtgccaacgaattacttaatcaaagtgtcagtatgattcaggcttatgcgcatttgctatcgctttatgatgacgaatcgttgctaaccatgattaatgcccaggccggtaaaacaccggtccacattccggtacgaccggtgtttaatctcatcgcccaagcagtagcctggagcaaacgtggtctaggctacaacgcgttaatcggcccgatcgtcaagttatggcgaattggctttgccgatgcgcgcgttccatccgccaatgaagttaatgcagccctagctttaaccgacccgaatctagtcgagcttgattcggaaaatcaaaccgtctttttacctaaagaaggaatggttttggatcttggcggaattgccaaaggatttattgtcgatcaagtctatgatttatgggataaaaccggggttgaaggcggcttgattgacttaggtggcaaccagcgcctcgttggtaaagcggccagtggcattcctttgtggcagtggccaatcgcggatccccgccatcccggccagcgcagcattgcaacgctgacaaccgagccaaaagccgttgtgacaaccggcatttttgaacgccattcagagattgccggcaaagaataccaccacctcatcgatcctaataccggttatccggtcgagtcgaacatggccagcatcactgtcattgccgataatggtcttatcggtgacgtgttatcttcagtcggtttctacgctggcgtcccggctggttacgatgcaatcgaagcagaaggtcaggaagcgatttttgtcaccaaagacacccgcgtttatcaaactagcggattacgcgaaacgcttgcggtgacaatgtagaccagctgttttacctggcgactcaaaaagcagcagccattttttggttgctgctttttgcgatctctaatttagcacctctaacagctacctatagctacaatcccgactttttagatagcttgccaaatcacgcttccaggcggcaccatggttcccattggcaaaagtgaccgcagattagccggaacaagcttggcattcgggtcttgtaaaacctgaggcgagcaggtggggttggccaagacgaccaacgtctgggcctcgttttgccggacaaaaccgaggctgtcttcaaacgtgaacgggaaaaatgccgcatcggctgctaaagctggttgatcgatccgcgtctgtaacgcaatctgatacatatccaaaatggcttgatcttcgtgcccccatggataaaaggcgcggttgtccggatccttgccgccggttaatcctgcctcgtcgccataataaagacaaggtacccccggcagccaataaagaagtgacacaatcaattgtaacttacgccgatcaccattcaacacggtcaagattcgcgccgtatcatgcgtgccaatgttattaaaattaaacgcaaacgcattgggcggatagttttccttgagcgtcattaactggcggacaaaaccggccgcgctgagttgaccgttgacaaaatcaatcaacatcgaccgcaacgggtaattcatcacggcgttcagctcgccaccttcaaaatactggcggcgtttgccataagcctgcttattcgatgcatcttcccaaacctcaccgatcaaaacccggtcaggaaactgatccaatgtcgtccgaatttgatgaataaagtcgtcagtcagctcatcggcgacatccaaacgccagccatccacgcccagatcggtccaataactgatcaccgaatcttttttagcggcaataaaattgtgaaaatcctgattgtctttattaatcgccgggaggtctttaaccccccaccagctgttatagtcatcaggaaatcttttaaacgaaaaccacgatgcgtatggtgaatccagactgttcgccgcaccaacatcgtcatattcgttcacggcattgaaataccggctgtcggcaccgacatgattgaacacaccatccagaatcacatgcatccccagctgatgagccgccgccagaaactgcttgaaatcatgcaatgtacctaacacttcatcaatcgcataataatcaccggtatcatagcggtgattgctgcgcgcctgaaaaatcgggctcagataaagcgcattaatcccccgtgcagctaacagcggcaatttttgctgaatgccggttaagttaccaccataaaaatcccagcgcaacacttcgccattggtaccgcgaatatacattggccgatccgactggcgcccatagataaaagaattggctttcggtgcgttgacgtggccatccgcattcccgttattaaaccggtccacgaaaatatggtaaaaccgcgcatgccgataccattccggcactgggtcaaactcattgaccacggtcagctgataactgttcacatcggcattttccggataaacttgcccgatcccgccaaaaccgccatcaaccgcaccaaagcgttggcggccttcatcggtttgcagttcaaaatggtaaaaccataaaccagccgtctgcggggcaaaactcaccgtataaccattcgggcttttggtcattggcaatgtctcggtttgatccccgcgcccatccggcatgataatcagtgaggcttgcgtcaccgcaccgtcagctttagccgtgaaatgaatcgttgttgccttccgaactgccccaaaaggctgccgatcggtgaatgaatcaaattgaaacatctttttcctccatgtaacgcatcagttgcctgagccatcatcttctggcgtttgcgggaccacatgccaaatgtcgcgaccatagcgctgaaccgtaaagtctgcggaaaagcgcccactttctgcaatgtttaccaacgctttcttcgcccaggcttgcggctgttgatacaaggcatccagcttggcattagcggctaagtaactttcaaagtcagctaacacaaaatattcatcgttatacgtcagcaaggaattgaagatatcgcggccttccgtttcaattcccggaatctggccattaaccagcatatccaacaccgcatgcaagcgcggatccttttcataaaagtcgcgggcccggtaatcaccgcgctgataataaccggcaatctcatcttcggttaagccgaaaatttcaatgttatcatcgcccaccgcatttttaatctcgatgttggccccatccagagttgctaaggttaacgcgccggcactcatgagcttcatgttactggtgccactggcctctttaccggctgtggagatctgctcggagatatcagcagcagggatgatcttttcagccatcgtcacaccgtagttaggtaagaaaacgacttgcaaataagggctgacttccggatcaccgttcaccatatccgctaccgcattcataaccttgatgatctctttggcataaacataactgggtgcggccttggctccgaaaatatgcaggcgtttcggtcgtttttcaccgcttttaagcgctaaataggcatctaaaattcctaatacatgtaagagctggcgtttataagcatgcagccgtttaatctgcacatcgaaaatagcatccgggtcaaccttaacgtgcacggtttgatcaatgtacttagccaatgcccgtttattttcggctttagcggcattcaggtcggacaaaaagtgcggatcatcgctgaaatcatgtaacttccgcaatgccaacggatttttccgccaggtagtgccaatttttttatccagtaagtgcgccagcggacggtcgccgatttgaatccagcgccgtggggtaatgccattggtcttattattgaaccgctccggaaaaatctggaacaggtcgtgcaaaacatcttttttcaataactcactatggatcggggccacgccgttgatcgcgtgagagccaatggttgctaagtaagccatccgtacctgcccgttacctaaaggagcaatgcgatcaatcatggcttgcccaaactgcggaacaaaagccagacggaagcgccgatcgatttcctgaacgatttgataaatccgcggcaacagaccgctgaacatatcaatcggccagacttcaagtgcttcggatagcaacgtatggttggtgtaactcataacctttaatgtaatccgccatgcctcgttccaactgacatgttcatcatccatcaaaaccctcatcaactcaggaatcgccatcgccgggtgggtgtcgttaatatgaatcgcaacccgatcggcaaaccctgccatactgttatgcgtccgccggtaatgacgaacaatgctctgaatcccggcactggtaaagaaatactcttggcgcaaccgcaattcttttccggcattgtcagagtcatccggatacaagatctgggtgatttgattgatgcgttctttttgttccaaggtaaaccgcgagccggcattaatcggcgcttcagcggaccatagccgcagattgttcacgacgccattgtgatacccgaccatggcaacatcataaggcacggctagtacatcgtcagtttggtgatagatcacccgcaaattaccgctgcgacttggctttaattccacccagccgacgaatttaatcgtgaccgcgcgattctccttacgcgtctcccatgggaacccattgcgcatccagtcatctggcagttcaacttgataaccgttaacaaaggcttgtttaaataacccatattgatagcgaatgccattgccattgccggccatccccacactggccatcgcatccatgaacgccgacgctaatcgcccaagtccaccgttgcctaacccaggatccgcctcggcatcaaaaatcttctgcggatgcaagtccaaggcatgtaaccctgcctcaaccgcatccaaaatgcccagatttagcaaattagactgcaacagccgccccggtaaaaactcgattgaaaagtaataaacctgtttggtctcttcttgctcataccgcttcttggtgtcagcccaaggttgggcaatgtatgtccgcgtcaacaaggccaatgcctgataaagctgttgtgaagataggtcttcaagcggtgccgcatacattttcaaggccatgtctttaaagtctgcgatgaattgttcctttgttaatgccatcaaatatacacctcatcaaaattaaaccatcgcaaccattttggcgaacatgaacaacgaggtctcatcgaatgtccgatccgcaactaagacgaaatgccgtcttgtcggctgcgactttcattcgacatgacctcgcgatgacactcatgctttacctaggatgcgattataccccttcaagtaagctgccgccgaatgatgccaatcaaagtccattgccatagcctgttgttgcagacgggcataaacttttggctcatcggaataaacgtgcttcgccatgcacagaatcttggccaacacgccggcattgtaatcccagaaactaaaaccagtgccagcgccggtttcggcattgtacggcgtgacagaatcacgcaggcccccggtttcatgcacaatcggcaacgtaccataacgcatcgccatcatctgcgccaatccgcttggctcaaacgcgcttggcatcatgaagtaatcagccccagcataaattcgttgcgccaacgcttcatcaaaatcaattcgaaccgccaattgccctgggaaacgatcttgcaacgacagaagatcctcttccaagtcgcgatcaccggttccgaggatcacgacctggacgttattttgaaccaggaagttttctaaggcatcaacgagcaaatcggcccctttttgccgggtcagccgactcaccatcgcaaaaagcggatccgaacgtttcggcagatgcatttcttcttgcaaaacgcgtttgtctttcgctttgccttttaaatccttggcactgtagttatacgtcaaatgcgggtcggttgccggattgtagacttcatcatcaatgccgttcaagatcccgactaatttaccactttgtttgcgtaaagtgccatccaaatgctcgccaaacgccggtgattgaatctcctgagcataactagggctaacggtcgaaaccagatcagcaaagttaatcccgccttttagccagttcaccgagccgtcctgggcaaagccatcatcattaaagctttgccgtccgataccaaacaccgtgtccagaatcgacggcggaaaccatccttgaaattgcagattatgaatggttagctgcgttttaatcgcttgataaggttgaatccagccatacttttccttcaataacaccggaatgaacgctgtgtgccagtcattggcatgaatgatatcgggaatccactcaatcacctgcagcatttcaatcacggccatttggaaaaagccaaaccgaccgccgtcatcccaataaccgtataagccgtcacgatcaaaatattgtcggttatcaatcagataataggtgacatcgcctagcttaatcgttttaaggccgacataaaccggctgtccgcctatttcaatcgtaaaatgggtcagatttttgactttaggcaaatacttcgcaggaaatttgcgttcgtaaaaaggaattgccacccgaatgtctacgccttgtttcttaatggctttaggtaatgcataggtgacatcgcctaagcccccggttttataaaacggcgcgctttcggctgcagtaaaaagtactttaagcacgggccgtcaccccctggccgtctggttgaaagactttctgattcttggcaaacactaatggttcttccggtgtgccttccaaagccagattcggtccaatgataacacctttgtctaaaattgcgtatttcacgctggaaccggtcccgatcttggtgccttgcatcacaatactgtgatccaccaaggcatcgcgatgaatatgcacgttccggaaaagaatcgagtgattgacttccccttcaataaaatcaccggtgcctaacaaactgtttgcaacatgggattcggttgagaaaaatgtcgggatttcgttcttgttcttggtttcaatcgagttagcactatataacaaagcttggtagttttggtcttctaacatgctcatgttggcgtcaaagtaacgcttgatcgtattgagtttggccaaaaagccggtatattcaaacgcgttggcattgttttgcaaaaccgcttcccgcataatctgtggcagacgtttaaaggtcggcgcttccgaagcatcggtgagcaaatcgatcaagtcaatcgtgccgatcaggtaaatatccatgaacgccggaatcttaccttctttaaggtgtccccgattctccgcggccggaacaaccgagcttgcggttcccaattcggtcatatccaaagtcagatcttctggttgcatggcagcttccggcagattcttatacaccgccgttaccggactttcaccagcttgatggtatgccacaatcgcatcaatatcgacattggcgacactttgggttcccatgataatggtatattgagcgctgcttttacgcagaaactgaagataatcgtcaaaataccttgcccgcagctgcggatcttcataatcgcggccagccatgtacggatacgtgaaaacaccacctgttatctgatccatattccaggttgagccgctgcggatatgatccgtgacactgcgacccgacttgggcaggaaaatcgccacactgcggacatttgcatgatccaatgacgacagcggaaaatcaatgagacgataacgcccagcaaatggcagcgttccaatcgggcgggctgctgtcaatggctgaatttggtcatctttttcattcagatcaatgattgctgctaaatcgccttttctcattctttttcagtccttcctaaaacttccccataaccaacaacactaatttcgtccggtttgccgatcaccttaccgttatccccgatgatcgcattttcgccaacaatcgcatgatccacagtgacattcttgccgatcacggcgtttggcatgatcatgctgtctttgatcacggaaccttcgccaatcttgacattctggctcaggatactgtgctcaatggcaccggcaacatagcagccatccacaatcatggagcctgatactttggcggtcttggttaaaaacatgggcggcaaagcttcattctggctgaaaatccgccaattgcgattgccgatgttcaatggattattcggattcaagaattccatgttggcttcccacagactctgaatcgtcccgacatctttccaataaccacggaacgcatacgcatagctggcttcgttgtgggtcaggtaggccgggatgacatcgtgcccgaagtcttccatcgccccatcggttgcatagctttcagtcaaatattgtttaagcgttggccagttgaagatgtaaatccccattgaagccaagttgctcttaggcttagccggcttttcttcaaattcgataatccgatccgtgtcatcggtgttcataatgccaaaccgcttggcttcatctttggcaaccggcataaccgccacggtcaatgaggcttttttggccttgtggtaatccaacatggcctgataatccattttgtaaatatgatcaccagatagaatcagtaaatattgcggattataagaatcgatatacgcaatattttgataaatcgcatgcgcggtaccttcaaagaacttttcgccttcacttgacgcgtatggctgcagaatcgtaaccccggcaccacgctcgttgagtccccagctcgccccgttttgaatatgccgattcaattcaagcggttgatactgggtaatgacccccgccgtattcacccctgaattagccaagttacttaaggtgaaatcaataatccgatagcgacctccaaaaggtaccgagggcttggcagtggttttggttagtttacccaaccgtgtgccttgacccccagcgagaatgatacctaacatttcagtactcatgatgacggcgcaacttgcgccttcccccctcacttcttcttatgcttcttaacaatcaggtcttttttcaccggttgcgttcgggcaggcgccgtcccccagtcgcgttgatgactgatggccggtcgttcctgatttgaaattgccagtggcggctgctttccggaaagtgcggctggccgctggtggtgcttagtcgccaactttttaggtaacggctgcagttttttgggaacaattagtaacgcccccattgctggcaaaatcacatctaaccaagccggctcgccgtaatgatcacctagttgggcggttaaagtcgcctgccacttggtccaggtaccgccaaagtcaaggttttccgtattcaaaagaatcgtgtacgtgcccaagcttgggactggcacgcggaagtggtctttttgcaccgggacaaaatttaacgcgaccaccgtgaagtcatctttttgcttgccataacggatgtaactcatgacatccggttcatccgccattgtgatcttaatgccaagtggttcatgatcctgttgccacagactcggtcggtttgtatagatatgattcagcgttttcgtaaaagtttgcattttatggttcatcgggtctttcaaatcaacccactcaagctcgctccagtcacgccattcaaggaattgaccccattcgctgcccatgaataatagctttttccccggaaacgtcatttgccacacgtacatggtgcgtagattggcaaactggttgtaccgatcgccaggcatcttgtgcatcaggctcttcttcccgtgaacgacttcatcgtgggaaaacggtaaaacgaactgttcgttatacatatacataaatgaaaacgtcaataaattcatatcactgtgacgataaaccggatcttcttcaaagaacttcagcgtatcgttcatccaacccatgttccatttgtaattgaaccctaggccaccggtattaatcggcgctgacaccttaggataggctgaactttcctccgccatcatcaagacatccggatgcttggcaaacaccttcgtattcagctgcttcaaaaaggcaatgccctcaagattatcgcggccgccaaaccgattgcgatcattttctttgccggcgtcataatccatgtacagcatattcgagaccgcatcaacgcgcagcccatcaagatgacaatgatcaagccaatacatcgcgctggaaatcagaaagctttgcacttgtgctttgcctaaatcaaaattccaggttccccagcgaacattttcggcgcggtgcggatcggtgtattcaaacgtcggggtaccatcgaattgagcgagcatatcggtattcttaatgaaatgccctggcacccaatccatgatgatgcccagcccggcgacgtgagcggcatccaccaatctcagaaaatctgccgggtcgccaaaccggcttgtcggggcaaagtagcccatcagctgatagccccatgaagcgtcaagcggatgctccatcaacggaagaaactcaatatgggtataacccaattccttgacgtaagggatcaacttatcaatcgcatcctgataggtcatatacccaccatccggaccggcgtgcgtgtcgcggataaaagaacctaagtgcacctcataaattgccaggggctcagcatatggccgccacttactacgcttgcttagccacgaatcgtcatgccatttgattcgcggaatatcaaccagtcgggcagcactgcctggcttacgttcaaatccaaacccatatggatcaatcttttcatgtgtggccccatccggaccgaccacctggtacttatacaactgtcctttcttggctgcgagttcgccgtaccaacagccggtttctccttgccgggtcagcggactgccgcgccaatcgttaaaatcgccgacaactttaatctgttgggcatgtggcgcccagacgagaaacgaccatttgccaggtgaaacttcatgggcaccaaaccgattgtaactttgaaaatcctgccctgagttgaagaggtataaccaatcttttaatccttggatcatgatcactcccccaatcacatcatccgactcgttgcatgtggttcaagcatcacgaatatttccttccgccacaagtgtaacagcacgaccatgaaaaggctcaagaaacgctcaccagatcactttttttaaatctgaccacccttgctgccaagaggaatataatcctcctcgccgttaattgtaaccgctttcggaaaatattaacagtaaatacaatttttttggttgagttatttgtgagaataatctaacatataggctatattatttaatgaaaacacaatgttttccaaaccgattccggtactaggtaagtttgtgttttggcaattgcaaccaaccactggagggatgacgatgagcgtcgatattgattggaacaaactaggatttgattacatgcaactgccttatcggtatgttgcccactggaaagatggcgcttgggatgacggcactttatcaagtgatcccaacttaactttgaatgaaggttcgccaattttacattatgggcaaggtgcttttgaaggactcaaggcttatcgcaccaaatcaggagccattcagcttttccgtccggatcaaaatgcccaccgtctgcacaactcagcagaaaaacttttaatgccaccgtttcctgaagatcgcttcattgaggcggtcaaacaagtcgttgccgctaaccatgaatacgtaccgccatatggcaccggcgcaactttatacttacgtcccatgttaattggcgttggccctaatattggcgttgcccccgccaaagaatatatctttgatgttttcgcgatgccggttggtccttattttaaaggcggcatggtgccaaccaagtttgtggtggccgatcaacatgaccgtgctgctcactacggcaccggtcaggctaaagtcggtggtaactatgcggcctcgctacaagccggaaagtttgcccatgaacatggttatggcgatgcgatttaccttgacccgatcgaacataaatatattgaagaagtgggttcggctaactttttcggtatctctaaggacggtaaaacccttaaaacaccgaaatccccttcgattctgccaagtattaccaaatactcaatcttggcgctggcacatgatcgcttcggcatgaaaaccgaagaaaccaagattgccattaccgatttagaccagtttggtgaagcaggcgcgtgcggaactgcagcggtcattacgcctatcgccagcatcacatacaacgatcacgaacatgtcttttattccgaaaccgaagtcggcccacatactcaggcgatttataacgaactcacgggtattcagtttggcgacgtccctgcaccagacggctggattgtcaatgtacccgttgattaaagcaaacgtcacgcaccgatttcaaactgcaaattaaaagcagctgtcaacgcatcttcatgcgctggcagctgcttttgtattgccattgatatcgcgatctttcttctaaaactcatccaaacaaactgacgattttgattcacacctgttagcgagcaaaggcaattaagcgccaataatcaccaacacaagtctggagcgtaatgcgctgaccgccacctgtaccggtaatttcattccaaagatcctgaccgtcagctgtaacggcttcaggcgaaacctgaactaaccgataaacgtgatacgtgcgcggacttccggcggcatcggtcaccgtaattggcgaaccgataccaagcgaaagcatcgcagcaaacgctccgggattatgcccgataaagtgcgtattctgcccactgacgttgctgtagtttgcctgaccgccccaagttgcggcaccgttcattggcgcggcgtccatactttcattaccaataatgtacggaacggtgaccccggcaaacattaatacccgactcgcataagctgctgccggtttcgccggttgtgcttgcggctgagcggttggttgagttgctgattggttcgtgacggctgatgcggttttagctggtgccgctgcaacagtaaattgcgcggttgatgtgccagcggttgcggttccggctgacgcatttgaagcggatgcagcggaacttgttgatgaagcggtctgattggttgccggcgcgctaacagcacttggttgacttacttttgtctggccggatggtgttgggtcagacgatttaacgactgcttgacctgagcgaacactccaactaggatgcgctgccgcctgaactttttctggcgtcaccgcagcggttgctctgagtaaatcgctcgatgtgcttacatcattagctttctcccttgtgctggtgcgcaatccggccaagtctcggctctgaattgtatgactgactgtggtcgtaccaaacagcccgcccaatacaagagcgaaagtgatcagacttctgcgaaacatatagactcccccagtccatattgcaaaatgacttaccacactattaacttcgagatggccatctcttgatttagattatgcacaatttaatgaagcaggtaaacaaatatgcttacttttaaaaagtcgattttgttatttataatcaggataatacttgatgataagcagtttccgttttttaaaaccaaattatcaaaggaatctttttaaaagttggtttacagcattttataaatatcgttatttttaggccttgatcagcgcgcttatccccgtcatttcaacaaaaaagcccagtgaacaaaacacgtcactgagcaatttatcatgatggttaacctttaaaaattcgaaaaaccgattagcagctcaaatactaccaccatgaacttcagtcgcagctacggtcagaataaaggcgtcgggatcaataccatgaatcagttcaatcaggtgccggaaatcgctttgctcaacgacgaccatcaacatctccctgttttcatctgaaaagccgccgacaaccggttgcaccgttaaaccgtgcggcgtttcgtcgcgaatccgctgtttcaacatatccagttgatcgctcatgatgtaaacggcttttttacggtcaaagccggtttcgacataattcatgaccagactcgtaatcgtgagtgcaaatacggcaagaataaaggcctcaacacctgacaccggaatattgaagagcgaaacgatgacatccgtgatcagtaacataatagacggcttcaagccaaaatatttcttgaaaattagcggcggtaccgtcgttccaccgctggaagcatccatttggtaaagcaatccgaccccaaaagcaaataccacactaccgacaataatggccaatagccgatcggtcacaaggttaatctcaggcgtgatccacaaaagtaatggcagcatgaaactgccgaaaagaatgcgttttaaggtgctgcgatcgaggaaaaaccatgctagccctagcatcagcagattaacagccatggtggttaagccaacttgaatcccggccacttcctgaaccagaatcgcgatcccggttgcgccaccagcagccactgcatgcggggcgtaaaacatattgatactcaccgcaataagcgcaagcgccgccatgatccacagccatttcagcaccggatgtcgcatcgttttttgcatcaagccaccctttctatggttatccatgtttctaacttattatgttaataactatacgggataaaatgcttgctgacaaacaacgctcattttaaaaccgtggttagtcaccattgcgtaactcagcaaggcgccgttttaacacctccacctcagcctgtagcgcggtgccaatatcggtttctgccacggtgcggcgccgtgcctccgtttcaacaactcggcgcgtggaaataatgtcggttaaattggcaatcgcatcggccttggttgtaaacggctgatgggtgaccagctgcatgccatacgaattatccaacaaagtatacccgccaataccggttgtcttttggtaaggctttgaaaatccgccgtcaatgacaatcattttgttattcgccatgattggatcggttccttttttaaccggcgtatgaccattaatcacgtgaccgacttccggatcaagcacaaactcacgcagaatttttttgatgaaatcaggatccttgcgcaagtgataataagcattacggccttctgcatgcgtcgcgggatccttgataaagtaccgctcaaatgtggtcatgtcgtgcttgccaaaaagcggcgaattcggaccggtccacagataccatagcaaatcagtcgccaagtctgctttttccgtgggctgactgtaggcgaggcgcaaattggcttccagcatgtcaaacaactgccggcctgtataagtcgtgccttcaatcgttaaaccaatgaaattgccatcttcatcaaccggcacgcacccgtgtaacagcaaattgcgattataccgcagatacatactgccgcgatccatcaaaaaatccatatggcgatgcaacttttccgaatgggtgaacgactcgactaaggaatcaatgacctcctgctcttccggcaacagtcggtaaggatcagccgggtcaaccgtcgcaaaacagccattggtgatgggataagtatgcccattcaactgaatcgtggaaaaatccgcggctaacttgtccagcaataaccgatgatccatttcaaattcaggacgccgcttgatggccgggccttcaagtttgaactgaatcatggcaattgcctgatgaatctgggtgatttgtaaccgttccgcctcggtaattggccgatccgagcgccccattttaggcgaaaaggccggattatcctgataatattgttccgccaagcgtgctaaatggcgcaaattaatcccataaacatcttcaagaatgctcaggttgttgtaccgggctgaaatccgcaccagattggcaatacacaacgccgaaccagctgcaccgccgatccataaaatatcatgattgccccactgaatatccaccgaatgtcgctgatcacgcttgatcaaactctcaaccacctgatccggcgccggcccccgatcataaatatcacccataatgtgaaaatgatcgaccgtcagccgctgaattgtccgacacgtcgcctcaatccactcatcggcctgctccaaaacaatcaagttgcgaataatctgccaataataagccagcttatcaggcgtgtccgcatcgttatacagcagctcttcggtaatataaacaaactccggcgccatcgccttacgcactttcgaacgggtatatttagtcgcggtaaacgccagcaagcgaatcaaccggcgaaaagtggtcagataccactgctgcaaatcatccccttgcagctcctgatgaatcgcagtcaaccgttccgacgggtaatacaccaaaaaagcaaaccgctgcaaagtcgtctcggtcatctcatcccgaaaacatgaacgtatcttgctcttcacattaccgctgccattgcgcagaacatgctgaaacgcattatattccccgtgaatatcgctcataaacgcctctgttggcttgggcaggttcaaaatcgcctccaagttgatgatctcggtggcaatggccggaaccgtttgatacttggccgtcaattcactgtacaaatccatgatgcagctccctttcgcatagaccaatttttgactcatggcaatatgatagcataatttcggcttttgtatacggtttcaacatttttcaagaaaatcataaatatctgctaaccctcagcgtgctttgcaacttgatggacgcacaagttggcgctgcagttctgccatagcgggtcaaaactataccaactaaaattcctgttggctgtgattcacgccataaaaaaagccaccatcaacgatattctgtatcgttaatgatggtcaagcaccgcacgtgacgctggttggtacacttcacacactcgatgtatttaacaaagccgcccaaagcttttgccgccggacttcacgtggtaaaaagacccggacagagtcttgattaaacccaaacaacagtcggcgttcatccacaatgatcggacggcgcaggatagccggtttttctgccaacaaatcaaccgcctgctttagtgatagcgcatcgaaatcaatgtcaagtgcctgaaatgccttagatcggcgcgagactaaactatcaacgccatcctccgaccgcgccaagagctcaagaatctgctccttgctgataccttgctttgacaacgaaatttcctgaaatggcaacccattggcttctaaccatgcccgagcctctcgacttgatttcgaagaacccgacgtatacaacttaatcatccaatcacccctcgcagaaacaacagtatatttctatcgtttcctagctaataccacccacatgctcgttgctaacaacattcactggcttatattgattcacccaggacacttttttattatcttaatgataacttaacataacgagactcgcatgacaataaataagcgtttgcaccatcaccactctggttatgactcatcaatatcaagccaaagcacatctagcagttaagtgatgaacggttattataaaacttaagtctcgccatcaataaataacagcatttacagccaaattaagccaatataagtttgtgaatttttagcataaaatctgatacatcagtttcatatcagcggttggttctctttaaatttagcacaagcttataccgctttcaataacaatttttgaaaaattaattttcgattactaatattcaaatattttcaccataatctgacatataaaatactggcgataaattgtcttttaataagccttcatgctgatcgttctaaaagttgtgggcaaaacagacgggcgcaatttatttcaaattttattatactactttttcaaagcaaaaaaagcggccgccaaacgatttttctcgcttgacggccgctgtgcgcattacttcgcaccgctagcttctttctttggcttgtcgcttgctggttgcacttcactgacgataatcgcaccatcaatcaagtcagcctgtaacttcttagccttcaggtgatccaggtagaagtcggtaaccttatcgcggatgttgcgttcaatgacccgccgtaatggtcgtgcacccatcgcttcatcgtaaccttgggcaatcaaccaatccttggctgcatccgtcacggtaagtgtgatgcctttcttcgccaaagtcttgttgacgtcttcaagcatcaagtcaacgatcttacccaaatcattcttggttaagtgactgaattcaacaatcccgttaaatcggttcaggaattcaggacggaagtaaggcgccaaccgcttcatcaaatcttcgtccttctccttctcgccagttaatgcttcattgccaaacccagcattggaagtggcaatgatgacggtgttcttaaagtcaacgacattaccttggccatctgttaaccgcccatcgtctaagacttgcagcaacagcgtcaagacttgtggatcagccttttcgatttcatcgagtaagacgatggaataaggattgcgccgtacttgctctgtcaacgtgttcttgttgtcattgtatccaacatagcctgcgctggtgccaatcagtttggataccgctgtacgatcgctatattcggacatatctaaccggatgatcgcatctttactgccgaaaagatctaacgccaactgcttagccagttcggtcttcccgacaccggttggtccaacaaacaggaagctgccaattgggcggttaccttcatcaaagccagcccggttccggcgaatagcgcgggcaaccatatcaacggcttcgtcttggccaattaccttacccttcaggcgcttaccaatgcctttcagccgttcaatatcggatgcacccagcttggaaaccggaatgccagtcaaacgttcaacagctgcagcgacatcattcggggttgcgacgacaggcttctcgttgttcgttccttcaagctgatgttgcttgtcggcaatctccttcttaaggttggcagctttttcaaaatcttcagcttttgccgctgcatccttttgcgcgttgagatccttgatttgcttttccagttccaccttgtcaacaatcgggtgcttgcttgctaagtgtgccgcggtcatatcaatgaggtcaattgctttatccggcaaggagcgctgtggaatatattgaatactataatccaccgccgccttcaaaacattttccggtaactgaacgtgatgatgctgttcgtaaagcttcttgacgccttccagaatcttgaccgtatcggcagcgctcggttcattgattgtgacatcgttaaaccgacgtgccaaggcgctgtccttcataatggtattgcgatattcatcttgcgtcgtcgcaccgatcacagtgatttcaccacgcgacaaggctggcttgataatatccgcgaggcccttaccgccagactcttcgccaccagttgcaccggcgccaagaatttgatggatttcatcaaagaacagaatcacattgccagcagctttcacttctttgatcagattctgaatcttttcttcaaagctgccacgatattgcgtgcctgcttccagattcgacagatcaatcgaccaaatctgcttgtctttaattgattcaggtacattgcccttcacaatcgcttgtgccaagccttcaaccaccgcggtcttgccgacaccggcgtcaccgaccaaaattggattgttcttcgtccgtcgactcaaaatttcggcagtttcctgaatttcgtgatcacggccaatcaccggatcaagcagaccatccttggcttcttgcgtcaggttgcggccaagcttttcaagaataccgcctttcttaaccgcttgttcgccagtcgtttcaaccgggatttcatcgccttgctttggcagctgaccagtcgcccgatactgcgcaaattcatccggcgtcatttcgtggccattcaccacatagcgggctgactcgcctttacccattccttgaagcatctgattgaatacatcgtccatgtcatgattgaaaaacggatcgttaaagtttgccatagtcgaattcctccttgttgggaatatgcggggaaaaggcggtggtggcggggagcttattaggatgcacaagatcttgctgctttcctaaacgcgttcgcagggccagaaacctgcgtgtaaggaccttggatgcactggtcaaaacccgaccagcacatccaaggccacttacactccggtttctaagcggccctgttcacgctctacaaaaaagcactcccaggcgctctggcagtactttcgtgtcgtgcttattcacttgttggcacttatactgttgcgccttttccttgtttacataatgtattatagcatgaaattagcactcacgcaacccgagtgctaattttttctcacgctaagtcaatcaaggcgtttctcagttgattaataccgcgacaacaaacgcttttcaaccttacgctcattaaaccggactaacggatccccattaaccaaggcgcgagcattttcctcaaaaattcgggctttcttttcgccacgcttacgagtcaaccgcttgaacgctgcactcatctcataactgcgacccggcaagtgatgggcatcagaagcaagggcatgacatgtgctaaaccggcatcgctaatgtcttcggaaaacaattaccttcttgttgaagtaagcaatagataaccatctaaagtgcgaaagttgagtttgtgatagcgctagttatagcgaagatctttatgttaaaatgggacagttctataggaggaggatctataatgaaaattctaatagtcggtgccggtctctttgggggcgtttgcgcgcatgagttagcaaagtttggtcaccaaataactgtaattgagaaacgtgaccacgttgctggaaatatatacactaaagaaattgaaggtattcaggttcatgaatatggggcacatattttccatacggttaattcggatatatggaattatgttcagcagtttgcaacgtttaatcgttatacaaatgaggttgttgcaaattacaacggtaaattgtataacttgccgtttaatatgaatactttttatcagatgtggggcgtcacaacacctgcccaagcccaggctaagattgcagaacaaagaagagttctctcgggaaagcagcctgagaatcttgaagaacaagcaatctcactagttggaacagatatatataacaagctaataaaagactatacaactaagcagtggggtcgagaaccatcaaaacttccatcattcatcattcgtcgtctaccagtgcgtttcacgtttgacaataattattttaatgatccgtatcaaggtattccaatcggtggatatacacagattgtaaaaaaaatgctggacttgcccaatattcaaactaaacttaacacagatttttttgacgccaaagatttctatatgcataactttgaccacgtcatctttacagggatgatagatcagttttttaattaccgttttggtgaactcacttatcgttcgcttcatttcgagaccgaattaaaaaacatccctaattatcaaggtaatgccgttattaactacaccgatctagcaacaccatttacacggattatcgagcacaagtggttcgagtttggtggaaaaaataaaagtcagactatcatcactaaagaattccctcaaaagtgggaacgtggcgttgagccttactaccctgttaacgatagtgaaaacaatcatctgtttacaaagtatagtgactacgccaaaaaaaacgcccctaatgttacatttggaggacgtctggggttgtatcgttattacaacatggatcaagttatcgcagcggctttgcaatacatatcacatagcccacttacaaaaaaatgacattaataccttgaaaagattcttttttcgatcttacgttcattgaaccgagtaacaggatctccattaaccaacgagcgggcattttcttgaaaaatacctgctttttcttcgccacctttacggatgagtcgtttaaatgcatccttcatttcataattgcgacccggtaaatggtgagcatcagatgcaaagacgtgagctaatccagcattaataatatcttcagaaaattgttggacctttttcccaaaagttccaacataactactagcagtaacctgggctaacgcacctctttgaatcatttgataaagtaaccctggatgcttcatcagtcgggtattccgctcaggatggacgatgaccggaatcatgccacgctgcatcacttcaaacaacatattttgggtataaagcggcacatcgtcagacggaaattcaattaacacataatgcccgctcacgtcacaagtcagaatatcgttatggtcaattgcttctaacaactgaccgttaatccgcacttcctgacacgggaaaaccgttagtggaatattgcggcggtctaactcgtcttgaaactcatccgtcatccgaatcacgtcagccgcatgattcgtataccgtccattcatatggtgcggcgtcatcaacgcatgcgtaatcccatcagccaccgccgcctgtgccaattcaagcgacgtggttaagtcttttgaaccatcatcaattcccggtaacatatggcaatgcacatcaatcatcattcagttccccttccaatactatctagtatctaatgaagcgctcccaaggtcaaatttttttgtaacagtttgttaacgtttcacaatagatcagcgagctggcagactttgcggtataatatgcaaagattacggaggaaatgaggtttaaagatgaaaaagatcctagtacgcgttctactcgtcgtactcgttgctgcgctggggtttggcggcttcgtgtactacatggttcacaactcgacatcgcaaatatattcctataataagaagacaaacaaatcttccgatgataaaaccaccagcaaaaagccggtcgcatacttactgctcggtacagacacaggcgaacttggccgctcctacaaaggccgtaccgacaccatgatcgtgatggtactcaaccccaaatcaaaaacaaccaccatggtctcagtcccacgtgacaccaaagtcgattttgatgacgtcacaatcaaaatcaacgcagcctattcttacggttcctctgacaccgccatggaagccgttgagaagctgttaaacatcaaattggatggttacctgctcgtcaacatgaaaggcctagaacagatggtagatgccgttggtggcgtcacagtaacctcgccattaagctttgactatgaaggcaaatcatttgttaagggtcagtcatatgacttaaacggcagtgacgccttgaagttctcgcggatgcggtatgacgatcctcaaggcgattatggtcggcagatgcggcaacagcttattttgacgtcggttattgggaagcttaagaagaatccaacgactgtgttgagtcagaaattccttgatgcaattggtaagaatgttcggactgatgtttcgctagcgtctgtcaagaacttagcaacagattatcgtgatgctggaaatacaatcaaaagtgatcagttgcatggtactggccaaaatattgatgggcaagattatgaagtaatgtcagataacgagcttacaagagcacatgatgtgattcaaaatgcattagatgcaaaataaaagctattaaaaaactacgccatgatttgatgttaaacttaatcaagtcatggcgtagtttttaatcaaacgttaaaagcgctttatgagtaaacgtctaatagtacagtacctacaaacacagagatcctccttctatacttgttctatcaagcagattggagaatttttatgtctcaacccaacgacatggtgcccgttaagatggttaaccgcgatggcgcttctgttgtcgtcaaacccaaactaggagccaaagtaaaactggatgacgccgaggtacttttctacaatggtgctgacaaggtaatggcacgcattattttacaggagctgatgaagcatgattccagatctgtccaaggctaacatttacatcatttgtagccgcaccgacttgcgcaggggcattgatggtttggcggccttagtgacagaggaataccagatggatgttttcgataatgctctattcatcttctgcggcacccgtaaagatcagttcaaggcgctgtattggaccaaaagtggctttttacttctgtataaacgctttgaaaatggctatatgcaatggccgcgcgatcgcagtgaaattcgccgcctaaattatcgccaaatgtcacgcttggtcagtggtttagccattgaagaacgacgcaccattcaagccataacgcccgggcatgtgtactgatactgcgaaaaggaagccttttctagaaattaaagaaaaggcttccttttcgtatgggcgcttgatatactcacttcaacaattttaacggaggatccaaaatgcccgctgaagcagccgttatgcaagcccaattcgactacctcaaacaagaaaatgaactgcttcgtgaacaagtggcatttctgatgcgccgcctttacggtgcgaagcgtgaaagcctgaccgatggtcagctggatctcttcgaaaagaataaagctttcaccgcgccagagccgacggaaccagaagcagctggcaagatgccagctaagcggaagaaaagaaaaggcaggaaggcagcacaactggcgaattttcctgaagtgcctgtgcatcatgaattaactgacgccgagcgtcagtgcccaaattgtaccgccgaaatgcgtgagataggtgtcactgttatcagtcgtgaaccagttcgtattccgacacatgttgaagtccacgtgcattatcaacacgcctatgaatgccgtcaatgttcagaccaactagatcatagcgtcatcaaaaaagcctccttaccccacggccgttcattaccaatagttttgcctcacccagcgtccttactcagacgatgatcgaaaagtttcgtaaaaaggtccccgtctatcgccaagagaagcattgggaagacgttggtcttcccctaacgcgtcaacagataaccaactgccatatcttggcatgcgattatggtttggccgatctttatgagctaatgcatcaagagctgctcaagcagacaatcgttcacgctgatgaaaccaactatcgtgtcttagaaagcgaaaaggtgaagacctactactgggtattcgcatccggaggctgtgaggataagccaatggttctttatgaacatgccgattctcgtgcgactgagattccgaaacacttcttaaccggctatacgcattatcttcaaaccgacggttatcaagtgtacgaaacacttgatcaagtcaccagggtaggctgtctggcccacattcaccgcaagttctttgaggccatgggcaaacagagcaccacgaaaagtgctgctaaaacgggggttgattattgcggacgcatgttcacaatggaacgcaaatggcggctgctcacaccagaacaacgctatgaaaaacggcaaggccaactcaagaccgaaatgactaagttctttacttggtgtgagaacatccacgtcttaccgcaatccaaactaggccgcgcgatcgagtatgcactcagtcaacgcgaagccctagaaaacgttttgttagatggtcgtttggagatctcaaataaccgtgttgaacgcgccgtcaaagaactggtcatcggccttaaaaactggccgttttccacgagcttcaaaggtgcccggtcaaacgggatcattttgagtgtcatacgttcggccgaggccaacggactcgattgtcgcaagcatcttgagtacttatttactgaattacccaaccttcctgttcctggcgatgtcgaggcattgcaggattatttaccatggtcgccgaaagttaaagcaaactgctcacgataaagctgatttaaaaacaacggcttcgatattccttacagcataagggatatcgaagccgttttaaatgtaccttacaatcgtacgcttacataatttcggcgtccggcaagggttcgttggaattattcgccgatttaggctgatatatgactggcagagtgtgtgccgcgacagtctcaggctcatatgttatttgcaattttttaccatgacaggaacactaaggaaaaactaaaaggcaccgtcccttttaataatagaaattatatttctaaaaagaatcgacatatcaaaactaaacgtacgatgttttacgtaataaatctcaagagatgcccgttctggatagccaatagcacttcgaccactggcctgccaaagtcccattgcacctggtttagctgttagaaactgattaacttgatttccatattccactaactcactttcaactactgggcgaggtccaatcatactcatgtcgccttttaaaatattgataaattgcggtaattcatctaacgaggtttttcgtataaaagaacccaattttgttacccttggatcctctcctgcaggaagcttgtaattattttcaatatacctctcataaagcttagggttctgacgtaataactcttcagcattgactaccatacttctgaacttatagataacaaattttttgccgttttgtccaacccgtatttgtttaaaaaacagtggtcctttattttttccccaaaaacaaaacggaattaaaaaaagagcgcatactaacacaagagccattccaaaaacaccgcagaaaatatcaaacaaccttttttctaccaagtaccttaaagtcacctgtgaatgatccgctattatttcaacctgaccattatctgaaccaaactgtttttccaaatttaatccccctttaacaagctctcttacagctcatcaaatccccaaaatacaaaccatggacttattttaaaataaccttaacatttaagcaagttgcatttgtatgaaagtcaaatgccatttcatatcaaaacaagtgaattccgtagataaataaaaatcaagcgtatggaatcatacttacttaatatgcgtgtttaacctccatcgaccaccagaaatcttgttaagtaagaaaatagaaattttcttcacccaatgttgtttttccatgaagctaactggaacttccttataaaccttatcatttgcggtaagccaaacatccaacataatttcagaaagaaaacccaaggctctcttttcatttccttgtaattgttcataattcaattccttttcaaccttaaacaaaacatcgaaaagccatgaagaatatgcagaaaactcagagcgttccattataaacatattgaacatatgagctgactttgagcttaaaacatggtttaaagccagcctataatttttaggcatctttgaaaaaataacctttaatgctttcattccatcagctgaatgactatgcaaataatgactctcaatcgtttctatatagtagtgtctttttttgggaacgattatcttattgcctgcaaccagtttttcaagatccgtgcgagtcaagatatttttaaacttatccgttcccttgattctaccactgacaaagtaacgcctgtactgaacaagtccaacatagtcacttgacagatttttccacccccagtaaagggccgtcaactcattatatcttggattcttatctgatatattgtccccttggtcgtctctgataaaaccaactggagttccctcgtgaaatgcacttcctactaaaatcggagtatagacagataagtcctccggtatcctacagtttttatgtgacgccaccaacatagttataatcaagatttctcccccaaaactttcacaaccaagaatcaataaattatttaaaaatacgtccgtgtaataaatcctcaaatgaaataacccgcaaaactcttaaaatcgcaaaaaaagcactcagaataatcattactatcattacacctaaaaacttcgcaaaagaataatgtattattaatgaggtgatccacgaagtaacgctgaacaatgccgccattacaaaaatctctgaaaacaaggaaattataaactttcttgaagactttttaaagtggtacttaaaaataatactcgggtcattccaagtgtaagtcattaaacgtccaaacagagttccaacaatcacacctgcaacaccaattttattgactaaaagtattgaaaaacctagatttaaaaaaacggaaactactggtatatactgtctatgaataaatgacccagttgcctctctaaaaacaagtaacggtaatccaagtatagtaacatataagttagtagcaaacaatgcactgacttgccagccaaatgcatactgatgtcctagccagacttcgataaaaggtcgtaaaagtgcagagacacaaattgaaacaaaggttgcaattcctgcagaaacactaaatagtcttttaaaagtcagaaatagatgctctgaccttgaataaacaatattaccaattgtagctgtaaccgaagttattagcgaagttactaatgctaacaatgcattcaagatcatcatgtagtttgaatagaaacctgtaatactaatgtttaaccattgagatatgacaatgctatcggtcgatgtgtttatcactccacttatttggtaaacaaggagaggcttgacatagtccatgactgatcttagatccttaaaagaagcaattctctttatgtgtgccacatatggatatcgattattaacaacatgccaaatataaatattctgtaaaatagttgctgcaattgctacgattaaataagcataaaagctttgaaaaataactaacagtgctatctgaaacaatgattgtactattagcataactgcaaatgaattgctcacaatatatcccagctgatcagcattcagaattgaagtcttatatcccataaaatatgttaaggcgacattcagcaagtataatacaaacaaaatctgtacatttaactcgcctgtgtaggttttagtcaatgcaggcaatagagggagaattatcattccaatcattacaatagcaaaaccgacaaacaagtaaatcgttctatagattctcatcagttccacgattctctttttatcgttttgtgccagcggtttatacatatgagtgacaacagcggccccaaaacctagctctgtaagcgacaatatgctcaatatgtttgtgaacaaaccattaagtccaaccgcctgttctccgagtgtatatatgaacgcagtccgcacaataaagtttaataatatttttataagctgcattaaagttccagatattgcgttccttatcgcgagtttattttgcctcatatgactcagtcctgtcattaaccaattcttgcaaatcagcaaaggattcttttaaattcggcggataaccatttgtttgcgaataccatacctttaatttagataaagaaatcgactgctcagactcatgaaggtacacgttagagtattccgataaccagtgtttacaagtagactgaattttatgcgtcgaattatcaaatgctacaaccggaacgcctgagattaaagacaatatcattccatgtaatctgtctgttaaaacaatgtcagctttattaatttcagaaatcttatcttggaaaatcttttttctttttttatcagttctaacggataaactaggaagttcaataaccgtatccgtaaacccaaccgtcaaattattatcactcttgattgtcttgataatttcatcaaaggcgctattttcaagtctctcttcgtcattacgacgtattattaaaactttcttaaaaatcttttctgcagcgacattacttcgagagtcctgtctacatgttgaatcagccagaaaaaagacaatatcaggtgataagtgtaattttcctaacttcatctctttcgccttttcaaaactcacatactctcgggcaaaaatttcaacatcagaatagatagactgtaccctagccaattctttttttctcaactctttgaagttaatcgaagatggaaattgtagctttaacatttgaatattcgaaaattgagagaacactgactctctttccgattcaatacctgtatatatacttcccatgttacctcccccctgaaaaataatacagtcagtcgaagaaacaaaccaacgtatgagtcgtgcagttataacagaaatagagtcattaataatgattagttcgcctttttttgtattttcacgtatcagcgactcagatgctaatgctatagcaatatccccaacattgccataggtaggcactccaaaaaataaaatggattttttccccagaatcttattaatcaataaccgatatatcactgtcacaacttcaaaaactctttcaacctttttcatcggctcgctcctatctattgaattcttcctcgcttccgctgaatactgtcatatacacgcatcatgatcattcctttaattaacaaagtttttaagcttcttaaatcgaacttgtcaacttttaaatgaagataataggtctgaatttctttgcgaatcttccttttctcatctgaatcagatctaccttcataagtccgcatcatcgcagtatatgcgtttgttaacaagaaatttctagagctctttttacttgctggtatttttcctaatgttgtttgagcttgctttactaccgtaaatagatcaacacaactttgggcagatgggtcattcataatagaatcagatctatttcggtaatgatatattggatagtctgattgaatgcatttgcttgctgccaaaaagaggcgatacgtagttgctatatcttcaaaaaccttaccttcaggaaactttattccgttttctgtatataacctcagcttacatatatgtgcccacgaaaaactttcaattttagaagtagccagcgactggaaaagcatgtttcccgtcagatggatatagtcaaactcacaccctttttcacccctacttaaaatctcgcagtcttccacgaatctgtcatagttaaactgaaaaatttctggagaatcttcacgtaagattttaatgatctgatcaattttcgatatatcaattaaatcgtcgccgtcgataaaccaaatatatttaccattagatatttccatacctctattccgtgctacacttaagccagaattctttaagtggattacttttgtccgtggaaaaattaccccattcccagacttttttgcgaacttatctaccaaatttgaagaaccgtccgttgaaccatcatcaacaagaataatctcaatttccgttgaccgaatcaaagaaagctgattcaataaaacttttaactctttctgtatattaaaaaccggtataatcattgataaaagtacctgcataagatttctcctctttctaagcaaagtgcttttaaactatattcaacccaaaatatttttaaaaacatttttcaggtttcgaaaatattgtttcgggtagtacttctttattgaattagcaatcgttgaatatccaaacgagtctttctctatgacaattttgttcaaagctttggacaatctgtctatatctcccggcggatacagaaaaccgttcacaccattagtaataatatctcgaggtccaacaggacaatcagacgaaatacaaggtattccccttgcacatgcttcagctaaagtcattccaaatccttcatactttgaagtaagcaaaattgcagttggatttatgactaagtcccagggacttgcactccatcctcgaaggttaactctttttccaatgtttaattgctgtataaatgattcaattgattttatttcgctttttgacccgtcaccaatcaaatccaactgccagtctaaattcaagtttgccagacctaaaaacatctctttaagatttttctgaccagtcaacattaacctaccaacataatagaagtgcgctttcccatcattattcctaattataggtttattcggtttgactggattgccaatcataaagattctggaatcatcaacacccaaatcgtgtaactcttctttaattccagaactaatacataaatgtgaatcagctaagtgtatcttcgaaagatcgaagcccgtgccatttctcaacgaaaaatgaagccaggtaacaatcttatactttaaatgaaaaatatctcgaaccatcttagctatttgaagtaactttgtactcaggactataacaatatcaggatttgaagattttaaaaatctactaagaaataatgtaccttgaatctgccttataaaatgattattacgtacatcgttccaaatataatacttagaagcaacatgccagttttcagaatcagtaccagttgcagcaacatactgtactatgaactcatctccgaaaaaattatcattgctttgccgtatccattcattcactaccgtctctgtcccgccatgccccgagagacgaggtagtaaaacaattactctagctttatccatatcaatttcccatccgatttaaatatagtcgccgatataacttaggtaagaacctcaagcaaagaagagcaaaaatatacttccgaggtaagagccttaaatctttataatgaaaatatcttctgttgaattgtatttggccctttctagtccaagatggattaaactgaagattgtggtgtgccactcttagataggtcctattctcaaagccattaaaaacatcatcagagtatagattgtatttttttagcaattgacacactctataaatatagttttcagctctttttaatatctccggatgaaacgacctagttgtagagccatcgttcttatgcagtacgtaagtgactgtgttgatttttgcaactttgtgtaagtcaagcgttagtatgaatttaaaaacaaacagactatcttcgaaaaaattcccattagaaaagttaaggttcagtgaatggattttttttaatgaaaagcacttattcgataataatacatccgactcgttgtttttagtcaaataagaattgattaattgcttcctatcttgcaatgccaatgaaaacggggactcaacttgggttgttccattagtatattcctttaaacaaagcccaaagataaactcgggacatttttgggttatggtatcaatgtaatttttaaacgtatttccggggagctcatcatcactgtcaatgaacagtgcatatttacctttagcatactttaaaccatgattccgagctttagcctgctttaagttaggctgccgtaatatagtcatttgtgctctgccttgagagaacatttcctcaataatcgagacacttccatcagtagaaccatcatcaataaaaataatttctgttaagtccaaataatcttgagcgtaaatgctccttatcaatctaggaagagtattagttgcattgtaaaccggcacaatgactgaaagaatcggctctgctcgatgattaaacattttcacgcacctcattaaaatcaagatttactgagcccacatctctagtttcttttttagaaaagatcagacttgattgacggttctttattaaatatcccagcatgaaaaacatcgtattaaattgaagataagcgcctaatacctcaaacatgccaaaaactaacagaacgaccatgatcactaaaacacgtgtatctttttgcttgaaagctaaccaagacgtaaaaaaatatacggataaaaaacttataaagtataatagtccgttccttagagcaagactcatatacatattgtcaagctccacgataccgtaaccatttatagcctgaaaatcctcccaagtcacaattgtaggaatgttttggccgagaagattaagcccataggctttatatattgcattcccaaaggagaatcttaaagaggacaaacgatcaagggccgaaaaaagactattcgaagcatcatatttagtcatcatccaaatagaaaatgctggcaataaaactataagaaaacagacaattaaaaatccaaaaatagaaaaagatctaggtgagactaactttttcacaaaagagaaagccagtaaaagaagtaaaccaacagttgctccgcgagagttagcaacaaaatgtgaaatcaaaaaacaacaaatcgggaacaagtagtttcgcgctctccaagtattccatcgcaaaaaaacatattcgattgacagaaaaagcaaagtgatccctaacgtgttcggatgaaaaaagcccaatgaatctctgatactcccgtcacgctctatcaacgttgttgaaataattcccataaagtgtgaggtgatgattattatagtcgctataagtcgagatctgaaagaataagaaacaagaacgtcaatgttgcgaataaagtaacccacaaatattgcaagaattgtgagcataatactataataagttgatgttaatgcaattacggagaaaagagttccaaagacaaacaaacttattatatatgaaagtttgtatttcgctgcggctaaaattgtaagaaacatggaaataacaagtaaaatttgtacactgaatgctatgctcgacgcgtccttcagtacacttgaataattacttgtttgtacgatggtcgttataaacacatatatagcaaacgaaaaactgaaccacttcgtttttcgatccactttcatcaacatcaactgcctccaattagaaagagcaccaagaaaatcactaatagcgaattgcatcacggattctaagaagccgcagtcgtaaacgcgtcatgctaacaacaaggttagttgttgcaataattttcaaaaaaattatcgtaacagctgaaaatctgtgcaaagatttaggcttttctataagcgaccgcacagcccctaagaatacttctttttcttttttgactcgaaacacatctctaaaacttatttgggcaaaaaacataagtcccgtttcaaccagtctgaaatcaacaagatctttaatttttcccgagcccttaagtgaaaactgcttgaattgccgtgacaaaacaagataagactgcctatcgttcgcgttcaatcgtcgatgcattgaactaccgctagcttgaacataatgatattgaatggaattatttatagtgacacattcaacatgtgaaatgattgaattaatccaagctacgtcttcaagccaattaaaagtgaactcattcgtagattttcttaatatttctgtacgaaacattttgttccaaagaaatccttgaagttgtttatcaagtagccactcagtcattatttggtcgtgtccatgtagaacctcactccgatcaataggtccgttacggactttagggtttagaccagtgataaccatgtcatatccgataacactaatatcggtccccctaaataaaggctcaaccattttttctagccattgtgaattcactctatcatccgcgtccaaaaaggtaacgaatggggttaccactttattcaacccgtatttacgagctttcgcttgaccggagttttcttttagagaaaaaagaaaaaatcttttgtccctcagtgtagctcgtttaattaaacttgcagatttgtctgttgaaccatcatcgatgaagtataccaaaaaatcccgataagtttgatttctcaaatcggaaagaacattttcgaggttttcttggtcgttaaagaccggtacaataacggatacagatgtcccagacataagacgatccccccaaatcttctcagcatgtcagaaataatgtactgctattcaaagtagtggtcagcacttataagtcaaaacgtatccttagagttcacatgccacttctatgcttatgaagtttaataaatcttacctctgattctctgttgtatacccataaccgtatccataaccgtatcccttatccccacgtctcgctttcacacgctccacagaacccaagatttttgccttggccaatttaaggacttcgacagttctttttagatccccctttagtgttttccccatatttgctacaacaacaacaccgtcggaccttggcactaggacttgaacgtctgaaaccgctaatactggtggggcatctaaaacaataatgtcaaatttttctctagtccaatccagtaattgtcccattctttttgaattcaataactctgaaggatttggaggaattggaccagatgtgatgacactcagattgtccacaaaagtatcctcaacaacctcgtccggcttcgttttacccgttaacacagttgtgaccccatctaagtttaattttctaaatgtagcatgcacagtaggtcttcttaagtctgcatctactaataaaacttttttccctgcttgtgcccaagttacagcaacattcgcagatactgtagacttgccctccgacatagcagaggatgtaaacataattacttgacacttatctagagctgccccagcaaattcaatatttgttcgaacagtcctgaattgttcagaaacaacatgtttgggttcagcaaatgtaaccaagaaaactccatttttttgtgtttcttgatcaacgtgattatgcgaaaagagctttttaaattttaatgtcataatttagtcccccaaaaattacacacgcctacgacttctctgtggatagccttccggctcaaaaccaaccgaatctggctcatcagcgttctgcttttgcctaatcgcttcgtccatgctcttcattttttgaacgtagttaacaatccccaaattaaccaatcctaaatcatcagttataaagtcaatatcctttactgtcgtatcggtcagttcgcgtattaacccccatccataagcaataactattccagcaacaaagcccagcactgctaaaaatttcagctttggtgaaactggattcgggttagccaatgcatcagagacaattgatacattggatatactcataatcgtagctatctttgttttaaagacccttgcaatttcatttgcaatatctctagcacgagtaggactagtatcagtaactgaaatagtaaagacctgagaattttgagaacttgaaaccgtcaccttactggcgatatcgctttcagtaaggttatcgtattttgcaggttctagcttatatttcgccggctgctcttttttcaccaagtacttttcttgtacacccgtgattgaattatatcgcgttccgtaaactgccttttcggccttctgtacctttaccttttggggactcgtaagatttttagaaactgtctttaaaaccaatggccgcgtaataatatctttatatgtattgataagttgtatatcagcttgttgagcgttcaattgcatatttggattgttatcttgcttccgattaaccaacatcgacgtcgaagattgatattttggcgctaccaacatctttgtaccaaaataagcaactgccatgccaattaaccccaataaaatcatagcaataaagctttttttcaaaacatcccacaattgtgaaagattaatttgttcattcattaatttgttacccacctaatcccatagtctgatgatttctaccaaatatataaaccacatcacaaacagcccagtgactaaaagtgcagaaatctcacttcaagttataataccctagcataccctgacaagtctacccattcagggttaatccctttgaaaaaaagttgcatagaaacaccagtgctatacacttacaagtacaaaggcatttccattattacagtctctttacagtttcagtagcactccatattacattctgacctctatttgtaatctattaaaatagacttttagtttaaaataaagctatataaatcttggaggtttgtcagaaatgaagaaaaaaagcggcttacgcttgcgtgacatcatactatgcatcgccctaggcctcgtcatcgccggtgttggaggttatttctacttccgccatttccaatccgagcaggcgatcgcagttaatcagcaaacgcgtcagaagattaagaaggattccaaggctaaggttaagaaggaaaaggttttgaatcagtatcgcctttatggcctgaccgacagcgaaatcagtgccgccaagacgttatcggtgactgctattggtgattcggtgatgttggggagttcggcttatttgacggtgcttttcccgcagatgtcgattgacgctgaagttggccgacaagttcaggcagctccggcgattattgatcagttgaagtcgagtgggaagttgaaggatactgttgtcattagtctgggaacgaatggaccgatgacggaagctgacattgatggcattttggatcagctggggagcaatcgtcaggttttctgggtgacagcttatgctcctgggaaggcttggattgatccggttaacaagttgattcacgccgctgctaagacgcatgcgaatctgcatgtggtggattggtattatctggcgggcggtaacgatgattggtttgccgatgatggtgtgcaccctaatgacgcaggacgcgtgcattattacacgctgattgccaaggatgtcatgaagacacttgataagaagtaggtttttgggcgttaggatcacttgaaagctacagtggtatcaaaagttccagccaagttaaaaaaacaccgatttgatggcttcttttacataggtcactgactcggtgtttatttgcatgcttcgaagattcgagaacccgcttgtccaatacgaaagtctaaaaaatagactttcgcggttaatcgatcatcccttttttcgatctcctccaatcgctattgtcaacattgcgtttcaatagatcagttgcaaccaagcgtatcaaaaaagcgcccccaaaccatcgaggagacgctaacatacccgaaagtctaaaacctagaccttcgccatttaactcacaattcacttatccaagtccacaaaccgtgtcagcaccatcatcacagcgccgccgactgccatcgaaagcgcttcgcctagtgcaatggtgccgtatgttggccaaaatggtaccttgctgagcacgaccagctcaccggcgacagtaaacattgagagggcaaataagacgcccatgatggcaaatttggcccatttttggtggacgaatttagcgagccagcgactgagcaggatgaaggccaaggtgccgattgtaccgatgggaacgtcgagaatggcggttggtgaggctaaattggccaaaaaaacacccaacgtaaccgcccagacgtaccgacgattgaagagcgccgtgtagttgagcatctcggagaaccggacttgaacgatcccaaagcttaatggactaagcatgagggtcatcaccacatagatggcggcgacaatggcggttttggcgagactgacgattgaacgatgggtcatagatgttgtttgcatattgtttctcctttgtggctttgccagtaataacgacgatcaaaggaaataagtatcgtcgtggaagcgcgcggggcggttccgattcagttaatagttcttacaatgttcccagtttacttttccaaccaaccgccgtcaataggaattacggtgccgtggatgtagtcggcggcgtcactggctaggaaaagcgtgagttgggcgacttcttccggcttagcccaacgtttggctggggtttcttttgcgacccaggcggccattttaccatcacccgcgaaatctgctgcgttcatgggcgtgttgatggcgccgggcgcaagagcgttggcgcggataccttgggcagcgtagtctagatccagttgcttggttaggccgatgacggcgtgcttggcggcagtatacgccacgcctccgccaccgccaacgataccagcaatggaactcatgttgacgaaaacgccgtgaccacgtgccagcatttccggcagcagtgccttaatcatcaggaattggctggtgaggtcgacattgagaatatgctgccacgtggccaaatcggtttcggcaacggttttatagccatccaaaatgcctgctgtgttgcatacaatgtccggcgtataatcagcagcaagcttttttcctgtctctggatcgctcacatcggcctgaattgcgacagtcacgccagtcattggttgcaagtcgacaccaatcacctgggcgccggccgctttaaaagccgccgcctgcgcagccccgatccctgatgccgccccggttacgaccacagtctggccgctaaagtcaaactggttcatgcgtccacaagctgccaatcttcggccagaatgtcacagtcggtcggggaccacaaactgaaggcctcatcagcggttttgatcagaaaataaggattcagggtgtcgccttcgaacttaccttccggaaccagttgaacatacaactcggtaccttcccagccagtacgaacggctcttttgccttcttttagcgctggtaaaacggcttcaaatgtcattgtcacttttcctcctttataagatgatccagcctgttcacaatgttactcgccaaggcccgtgtcatcgttgcggttaattcagtgcacttagtatacgcgatttttctgcctgcgaacagtcttaaccacatgcagattttcaaaacacgcgcaggattccgctaattggcagcaagcataacttttccgaaaacattaaaacggctctaaagacaaagtgtctctagaaccgtttttgcacttattggcaaccgccgcaagttcgcctacgacacgctcagagattgatcacctgcatgagtacttcggagacgtgtgcgcgttcgttttccggcaaccgcgttaaatacttaaccaacgccaacgtattgatatcgctcatttccggggcgatgaagaaatcacccacctgcatgtcgagtgcccgcgcaatgtcagtcagcttcttaacgctgatattgttgacatcaccacgttccatgcgggatatgagactgactgaaaccccagagcgttcggccagtttttcaatggttaagttcatactgcggcgttgttggtgcactaatttgccgatattatctaacatcatgttccccacctctaatgtgcggcgttatgctttaacattaaatgaaacgtccgaccatcaaaagattttataatattatttaataatccaaagacggcctattgtcacacaacgccggtgcaagaccccacattaactaaccatttcacttctcagtatcattgtaagcgctcgccttgcgaaagtgccaaatattggcttgataatttttttaataaaaaacaatgccgggtgggtagcattgttacttggtttgatattcacttggtacaaatgcccacagcgtgccgcgggtaaattgttccccgtcatctgtatccaattcactgatactgttgttaggcggcatggtcatctcatcacgcgcatcgtccaactcggcacccagataggtactcattagcagcatgcccaacaacccatgggccaccacgagcaccttgccatccggatgttgctgataaatgccggcaatagcgtggcgcccacgatttaaggcctcagcgaaggattcagcgccaatccgcttataatcaaactcagcaagatggtgatagtaattatcaatttgcggatcgtcttgcacggaagcaagtggctgcccgtcccaatcgcctaaatcgacttcccgtaaatcccgtaccgtcacgatcgccggttgagctaccttgctttgcgccacgatcaattcggcggtggtttgcgcccgcggcatcggactggcgtaaataccggcaaaaccggtcgtagcaaaataccgcccaactgcctccgcgccagcccggccagccggagtcagcggcgtatccgtccgcccgccattgaaccgccgcgccaaattggtctccgtctgcccatggcgcacaaaataaaacttggtcatccttccacacactccttttaaaaccagtgtagcagaagattcgctgaaaacgttacctcaccataaaaacgcagtgtagtttaaacaagcttaaagatcagaattagctattcgaaccgttttcttgcgccaatactgcggatatgacaaaaagccgagaacgcgttttcagcgttttcggctctttggtgtaagaatcattattaaagattcgccttagcagaatgttatcatgtttgaccgcgttattctgctgccgtgcctgctggggccttatgatcctcttgtgcttcagctttatacgctgctacttcatcgtcagctgcaaagataaagtggtctggatagacttcgaccattttacgttgcttattatcgccttcgaccttgctggcatcataaggtatcggtacacgctggcgttcgatgtctggatcgggaactgggatcgcagataagagactcttggtgtatggatggaggggatgcgtgtatacttcttccgcactggccaattcgacaagccgcccgtaatgcataacggcaatccgatcagaaatatacttgaccatagataagtcgtgggcgatgaacagatacgtcagaccttgccgatcctgaatgtcttttagcaagttgacgacctgtgcctgaatcgaaacatccagcgcactgatcggttcatcggcaataatgaacttcggctgaactgccagtgcccgggcaatcccgattctttgacgctggccaccggagaattcatgcgggtaacgcgtggcatgatccgcatttaaaccaacctcgtccaataaagcttcgacttgatgatcacggtcggcgcgatctttagccaaatgatgaatatcaataccttctgcaataatgtctttgactttcatccgtggatttaatgaagcatacggatcctgaaaaatcatctgcgtattacgccgaaaatccaacatttgtttggagccatttttcaatttggcaatgtcctgaccgttatagagaatttcgccactggttggatcatacaagcgaatgatagcccggccggtggtggttttcccggaaccggattcaccaaccagacctagtgtttcgccttcatagatatcaaacgaaatatcctgaatggcctttacttcgtctttctttccggcattaaaggtttgaaccagatgtttgaccgaaaccaacacttttttcttttgactgtccgccatgttagttcaccgccttttcgtctggatgtttacttgcccataatgcatgccgccgcgcgatttctggcggtaactcgactttgggtgcgcctggtgctaacaaccaagtagccgcagcgtgggttggtgaaatcttgaagaatggtggttcttcttcaagatcaattgccatagcatacggattgcgcggggcaaatgcgtcaccctttggcggatccagcaaatccggcggtgtccccggaatggcatacaggcgatccgttttggtctctaatgtcggcattgcctccagcagtccccaagtatatggatgctgcgcgttgtaaaagatttcgtcaacggtgccgtattcgacaatcttacccgcgtacatgactgccacccgatcggcaatcccggcaacaacgccgagatcgtgggtgatgaagataatggaggtatcaatcttagactggatttccttcagcatgtgaataatttgcgcttgaatagtcacatccagcgccgtggtcggttcatctgcgagcagaatctgcggatggttaataatcgcaatcgcaatgacaatccgttgacgttggccgccagagaactgatgcggataatctttcaatcgtgaaccggcgcctttgatacccactagttcaagcacccgttcagcttccttcaatgcatcggccttgctcattttgttatgcagcagcagcggttctgcaacttgcttaccaatcgtcatcgtcggatccagtgacgtcatcggatcctgaaaaatcatggcaacatcattaccgcgcatggcattcaattgcttttccgactttttgagaatgtcaccgccatcaaacaaaacttcaccattggtaatcttggcgttgggtgccaataagcccatgactgtgcgcacggttaccgatttaccagagccagattcgccaacaatcgccaacgtctcgcctttgttcaagtcaaagctgacattgcgaatcgcgtggaccggtccggcataggtggcaaagtcgatttgtaaatctttcacttcgagaatcttactcattttgccacctcctaatgttcactgcgcggatcaaaggcatcgcgcaaaccatcagccagcaagttaaaggccagcatcagaataacgatgacaatcgctgggtataacaactgatacggcagcacttgcaggttcttttggccatctgacaacagcgtccctaaactagcagtcggtgctggcaaaccaatcccgatataactcaggaaagcttcaaagaagatcgccgttggaatcgtgaacatggtttgaatgatgatgatcgagctcagattcgggatcaggtgcttaaacgcaattttaatgctcgactcgccaagcgttctggcggccagcacaaattcctgatcttttaactgcagggtctgcgcacgaatgagtcgtgccatcgtgacccagccagtcaaagcaatcgctaagataatggaagtcatccctggtttgaataccagcagcatcagaataacaacaaccaagtttggcacactagagatgatttcaatgacacgttgcattaacgtatcggtcaaaccaccgcgccaaccggagatgatgccatagaaaacgccaatggttaaatcaaagaatgttgcaacaatcccgatgaaaagggaaacgcgcgtgccgaccataatccgagacagcaaatcacgcccaaggtagtccgtcccaagcaggaaatagacgtttttacccataccggcatatttgttttggccattcatatagccgtttagtcccggcaaatcaatgcctggccactttggcggtaaattagaataattaagactctgtttattcggattggctggtgatagccaaattgacacgatagagatcacaccaatgatgatcagtacccaaagtgaaatgaccgcggccttatttttctttaagcggcgaatcgcatcttgcgtgaatgtcaacgcaggcgtggcaatacgctcttgttcagccgcattcactttgacatgcttgaatgcctctggacttaattttgttgttgccattagtttgcctccccgctcagtcgaattcgtggatcaatgaagccgtatagaatatcgacgacaaggatcacaaccgttaacatcgcactgtaaagaatcgttaagcccatgatgaccggataatcgttcgttgtgatggacttgacaaattgttccccgattccgggaatggcaaaaatgttttcgacaaccagtgatccaaccatcaagtcaactgccattggcccaataatcgttacaatcggaatcatggaattacgcaaagcatgttttgccacaacctgccagcgcgattcacctttagaccgggctagctcgatataatccgagctcagcacgtccaccatctcggttcgcataaaccgcgctgtctgtgccaacggggcgatcgccaaggcaatggtcggcaaaatactatatgaaaacccaccccataacgctaccgggaatgcccctgtcttgtaagcaaacaactgcaatagcgcagcaaacacaaagttaggaattgaacgtcccagaatagcgaaaattgtagcttcggcatcaacggccgtattctttcgaattgccgcaatggcaccaagcacaatcccgataagtgttccaagcaccatcgcctgcgcaccgatctgtagcgaaggaccgagccgggaaacaatcagattggaaaccgtttggcccggaaattgataagacatcccgaagtcaccgtgcgtgataccaaccatatacgtgagatattggatccaaaccggcttatccagtccatactgtctcttcagaatttccagctgatcagccggaatcttggggttattaaatggcgtccctggcaatgccttcattaaaaagaaggtgattgacgcaacaagaaacagtgtcaggagcaggaagccgatccgttttaaaatatatttgaccatgattcactcctgttttttgggcattggccctaataagcaaacggcgttgtccgccgcaaaacacgtgacaacgccgcttgtgagaactacttattggaaacaagttccgatttaggaaaccctgtaagattcctaaacgcgttgatctgtctaacagttgctaagacaggtcacgcttttattacttaaccttggcatttacaaaatcgtaagagttagtcgggttatatttcaaaccggtaatggtcttacgttgcaaggttgtttgaacccgttgatacaaaggtacaacgccttgttctttagtgagcagttcttgtgctttcaacaaggtgttccaacgagcggtggcattggttgcatcggtcgtcttggactgtttgatcaaagcatcgtattcgctgtttgcccatttaccatcgttataactattatcggacgtaaacagatcaaggaaggtaatggcatccgggaagtcagcactccaagcggagataaccatgtcaaactgaccattttgagaacgggaaagacgggtcttgaatggcactgttgcaattgttaccttcaagcctggcagattctgttgtaaggtgctttgaatgtattcagccgagcgcttggcattcgtggtatcatcggtcaacagttccaaggttgggttcgtctgaccggtctctttcaagccttctgtccagagttgtttagccttagcaggatcatacttaactgtagaagattctgctttagtcgctgcctttgagaagtcctgtccattcttagcaaataaaccttgaggcgtcacattgttcgcagcaattgatgaatcattcaaaactttcttgatgtattcttgacgattgattgccatcgagactgcctgacgaatcttggtattcttgaagataggatctttcttctcattcaactcaagataaaatgttgcactttgcttaagcggtgtgtatccagacattgtcttagcttgtgctgcctgttcacctgacaactgagcaatatccaacttattcgattgatacaggttcaaagcagtttgcggatccttaaccacttgcccattgatcgtatcgatgtggacattcttagcattccagtaggttttgttcttcttttccttccatgaattaccagtcccattccaatcttttaattcataagggccattcgagagaaggtacttagaagtcgtgccatacttcttaccaaccttttcaacaaacttctcattctgcgggaagaatgccggattgactaacatggtcttaaagtaaggaatggcgtgatccaaggtcactttcagcgtggtcttgttaaccgctgtaacgcctaaggtactagctgccttcttaccggctgtgatatcgtccgcgttcttcacgccggaatacagataagcatactgagacttggtcttaggatcaaccgttcgccgccaagcaaaaacaaaatcctgtgcagtaacggcatcgccattgctccatttagcgttccgtagcttaaaggtataagtcttgccgccgtccgtcacttttggctcgctttttgcgatcgctggcttcaagtcactgccggaataccgatacaaaccatccatggtatcaatcaatgcttgccccgcaatcgcgtccgtatttgttgacggatccattgtggagataacatcactttccatccgagtgattgatgtacctttgctgctggaagcattagaaccacaggctgccagcaccccagcgagcgcaattgctgtgcccgcaaccattgtttttctaaatttcatcctgttccctcctaaaatgattgaacttaccttacattagaatctcattaatgtaaataagcgaatcctcaattttgaataaaaaaacttgtatgtcataaaacatcacaggaaaagaagcggaacttattgggacaacatcttgtgcatcaactatgcatatttttaaatatcccgttaagacggggatttacaaggtactaaactgtttactttagatgatcctttggggaaaccgctaagcttttacagaaatccgcgaatattaaataacatcaatttatgtccctaaaattggcttgtttttccctgaccgccattctttcagacataattttcacttctgtcaaaccagaaatgaaaaacattgtcgccgctcagttaatgctaatcgttttcaaagtacatgcttattttttgtcagtaccgcgtttgcttgtcgttttcgcagactgcggataatgacaatgattaagccaaccaccgatactaaagtggctaaccaaaaaactgttgccagtgcgtgtagaaaaggggcgcctgattgagctgagatgcgggtcacaccgggcaattgggcaaatagtaacgtggcgccgaagctgataccgatagttaagccaacggtgcgtgccagtgaattcaacgaaccggctactcctgagagtttgtcatcgacggctcccatcgttagcgcattgttcggcgaaaggaacagtgccatccctgctccgttagccataatcggccagataatcggtgccatagtgattctgactggataattggcatatccgacttgcgagatgattaacactaataagcctaaaatcgttaaatagtaccgattccaatgatcggccaaccagccggcaaatggcgtgatcaccaacatcgtgacactttgtagcatcatcagtaacccgcttgaaaatgctgagattccccccatagctttgaagataaaatggcaaaagaatgttcgatactgaattaaccagcatcacgataagcaagacgctaacggaaatcagatagtcggcgttatgcataatcaccggtgcaatccaaggagaccgggcctgctgatcttgcacaaacgccaggaccgtcaagaaaatgccgcctgccaacacccctgtaccgagccaaaattgcgttggctgctgcaaccagtagccactggcaaacatcaagatcatgcccccggtaaacagattctgaccggtccagtttgcctgctgccacacgcgtttaatttcaccgggttcggggcgacgtaacggcaacacgcgcatacctgcaaggacaatgaagatcccgactggcacattaaataagtaaatccaccgccaactcgcccaggtaatcaggatgccgccaaatgccggaccggaaattgagccgattgatataaacatcgaaatgaccgccaatgcctcagcacgggtcgcatcgggaaaatattcactgataatccccatcgaattagccataatcatcgccgagccaactgcctggaccacgcgcccggccatgatggtgaaataagttggcgcaatactggtcagtagcgagccaacgatgaacacaacctcgcccagcagaaacacgagatttttggagactaaatcaccgatatgaccaaacatcacaagcaagactgccgttgtaatgaggccaattgatacaatccacgttgccgcactgcttgagatcatcaagtcttcggagatcttcggcattgccaggttcgtgctagaaccagacaaagcggttaataatgacatcagccctaaaacgatcaagatttttatgcgttgcacccgcgccatcgccaatgctcccacaccctttcgcatgtattctatgctcgttagccaccagctacaattattccgccctgtagcaaataaggtgtgcgtcattttaattctggcctttgatacgcatagactctggcaatgacgcgctcaccaaaaaaggcgacgcatcattgcgtcacccttcgataatctaatcaatcactatttttgcgcgcgtcccttataagcacccgtatccgtggtcaccaaaatgttttcgcctgctttgacaaaatcaggcaccgtcaccaccagcccggtttcaagtgtggctggcttgccgccgcccgcaaccgttccgcctttgacagacggctgggtgtcggtcaccttgagttcaaccgttccgggaagttcaagcccgatcacttcatcaccgtaaaactcaatttcgaccggaatatttggcagcatgaacttcaactcgtgctcaatacttgaagtcggtaattcatactgttcataactatcactgtccatgaaataagcagtatcatcttgcgtatacagatacgttgcttttttccgatccatgatggcgatttcgattttttcacttgggcgcatggtcgtcgtgacattggcgccggaacggacgtcatacagtttcatctgcatcacggtgtttcctttgcctggcttatgatgatttgattccaaaaccttgatcagtttgccatccttaacaaaaaccattccggccttcaaatcaattgcttccgtcatgtcgctatcccctttatttgcattgtgccgttatcgcacgtctcaggatttagtataccataataccttgtgtgggagccggcgctaactagggatggatgaggtgtaagtgtcagccctttccttggttctactctaattaagtgatttccgatactccgagctggctccgcggtggtggaggctggcgaccgcgcagctagagtggtgggcgcgacttcgaacccgcaaagaccgcggtttcgaagctcggccttggtctaaagcggagaagcccactccgcttaagaccaatttcaccactgagcccgccaccgctccgccagctcttgctttctatccctgcactcaaacaacgagactcaacgtatccttcgttgaagagtacgttccaattaatccgataagtataatctgtccaaccaaaaaagccgaccctagcgcagatacgctcgctaggtccgacttttcccgcaactcatcagctaaaacagtcgctacatatcctcaaccaccaaatacgtcatgtctagcggtccatggacaccgacgaccaaggtcatttcgatgtcgccggagttggaaggtccggtgatgaagttgatgttgctggtttccaactgtcccgccttcattgccgcatcgtagcgatccatggcttggcgtgaacgtggcagaatgttgcttttcttgacgattgctaaataatgcgtcggcagaaaatggaagcctcggccttggccaggcgtggtcgcaacggtgacggttccggattctgctaatagataatccgcaaaaccaatggccacatccgcagccgcagcttgcttcaagttgaagtcacggccttttccgggggtccagtacattggcttgggcgtgacggtttgcttccactcatccaagccataatcatgatactgttccgtcgtcggcaagatgagcgtcttgggtgcatcgtgttcaatgtaagcattgagtgtgtctgccaactctgctttcgtagtggtttcaaacgtgacatgcaccgcttcactgttttgcttggcgatggcttccaactcgtcttgggagtggccggacagagttgtttccggcaaatcgtttaatggcacaaacggatgatccttgagctggtgccgcgggcggccggctttttcggcaatagcatttaaaaagtcctcgcgattactgtgatcaatcatgcttttgcgcctccaatgctgctttgtgttgtttgaaccaatggcggaaattctcgtttttcttcggtggtcgcggcaagtcacgcacatcggtccaaccgcgggccagctttggcatcatgccggtttgtttaattcggccgctgttgtattcattttcaacactgccttgatctttggttgccaaaacgcccatcattgcgtggtccatatcaagcgccatgttgaacagaaccggcgcactggtgccgacgccgaccattttcatgattttatcgctaaaactgtgatcggttttcagcttgtccatcattacttcccggtgcttgattaacagatggtgcagcgggatgcggacagggcaggtttcggtgcaggccgcgcatagactggaggcaaatggcaggtcaccgaatttttcatagccatccagcactggtgacagcaccgcaccaatcggtcccggataaatcgaaccatagccgtgaccgccaatgtgccggtataccgggcaaacattcaggcaagccccgcaacgaatacactgcaaaaccggctcaaatggcgttcctaaagcattgctgcggccgttgtcgacaatgaccacgtggaagtcttccggaccgtctgcttcaccggcaacttgcttaccggagaaggaacagtaactggtcagcttctgtcccactgccgagcgcgaaagcatgttgtctagcgtctcggcttccttgagactcggcacaatccgttccatccccatcacaactacctgcgtcttaggaatggccatggtcagatccgcattaccttcattggtgaccaagttgatcaagccggaatcagcaatggcaaaattacacccggtaatcccgaagtcggcttgcaagaaatagcggcgcaaatattcccgcgcaaaccgcgccaaatgttccggatcgttgtcccctttgtagccgagcttatcaaaaatcgtcttaacctggtcccgattcttggccaacgccgggaacacaatatgcgtcggttcagcccagtcgtcttcttgcaaaataaattccgccaaatcggtttccatcagctgggtgcccggaagtttcagtagctccttgtccaggttgatttctgtcgtcaccatggatttggatttaacgattttatgcgcctgcttttgcttggcaaggttggtaatgtaggctgcggcttctttgtcggtcttggcaaagtaaacatgaccgccgcgtttttcgatattatcgctgaattcttctaaataatccggtaagtatttaatgacatgttgacgaatctgctcgcctaagtcccgccattgcggccaattacccagctctttacgcgaggcctcgcgcttgtcccactgcgcatcctgcgacttggcaacgctggcttgcatgaacttatcctgttccgattctttaacccgctccaagaacggcttgtcactggttgaaatgctcatgggcgcacctcctgttcaaccccgagcggctcatgaaatttgatccgctccggattcacattgtggttcaatacttcggcaatgtgcataatcttaatcttttcgttacggcgggaaaaacggccggcgatgttcatcaggcacgcgggatcggctgaaatcagcacatgtgcgccggtactgagcacatcgttgactttttcatcaaccatttgcttggaaatttccggctctttggcagaaaacatgccgccaaaaccgcaacaattttcaatatgtggtaaaggttccatctgtaagtccttcacgtgatccagcaagacaaacggtgccgtgcgttcgcctagcaaccgggtcatgtggcaggagcgatggtaagtggctttggtatctaattcagccccggcgtcaatgacattcaagacgcgatacagaaattgggaaaattcatacatcttgtctgccacttctttagccttttgggcgtattccggatcgtctttcaatagcacccgatattcgcgcaacatattcacgcaagaaccggctggcccgacaatataatcggcgtcaaccgaaagcagcgcgtcaatttcgttgcgaaacaccttttgactttccttcacatacccggagttataagtcggttgaccgcaacaaatctgcttgaccggcataaaggtttcacacccaaaccgttccaacacctcgaccatcgccgccccgacattggggaagaaaagatccacgatgcaggtggagaaaataactactttcataatgcacctcccatattacaatcattccaatttaactatacacctgtgacaacggattagacaccgaaaacggtttcaaaatgttaaatgttatttttactggcgtctctttttccgccatgctaaccgtgccattttcttcgcgcttttgttggcagatgggtaaccctgttttaggagcataaccggtctggatagctccaatgtataccacttatagaaccataatcaatatcaatttatttatattggccactacccgacacgccgagagctcgttcttttcaccagcgtaaagtagtgtcttttcattgatataccgctgttcctcacggtttcacagccttgatttttttcttaaaaggactatcgttgaatgtgagttagggttacctaaataactcaaatcaaacaggaggcgggtttatgcggaagcaatatagagcaacattgcgggcacttaactcagattgcattggtcggcaggcacatggctttgcaaattttgaagttaccgatgatgatgctctgcagattcgcattgaaatgttcaatacgccggcggacatgaatcacatggcagtcttggaaagctccggttccgatgcgccggtcacgccagccacaagtgctcaggatcagaatcatgatggggtcatcgatgaggaagaagccgagcaagtttccggcaaagtctttgtccctctcaataatgcacccgataagttgaagttggtgggtggcaaataccctgaagccgacgacaacgggttctatatttaccagcagcgggttgtcgtatcccaacttcgccaacagctggcgaaacattatggtcatgatgttttcaccctggacaataccgtggtttacgtcaacggggttcaaagtgacgtcttgttaccaaagaccgtggcgagtgatttagacgaaaaaaagccttatctcactttgccaattgcagtgggtaagttgtacaaggtcatgggctgatagttgcgatactgctaatctaataaaaagactggaacgaagcatctcatctttccagagatgcttcgtcccagccttttggttatcttcgcaataaccgcgtgttttacatataaaattcattcacggcgcaactggctatcacgcaatggcttaaagcgtttcatttgcaacggtcgtatttgcagccaagcgttgataaatcgcgaccacttcgccagccaagtcgcgaaaagtaatggcgttcatcagatgatcctgggcgtggactagtagtaatgaaacatctgcgtgcgctccgttggcttcagcggtcaacaagtcggtttggacattgtgcgccgtgaccagagcctcatctgctgcttttaaatggctggttgcagcatcaaagtcactgttcttggctgcttgaatggcttcaaaggcttcacttttagcgttgccccctgccataatcaagcccataatcgtttgttcgttgacgttgctcatggggtcactcctatctgtcattattagtgggacacctgttttaacataaatgttcgccacggtttaagcagtggcaacaaggacagatcttcatctgtcaggctgccgattttgttgcggcgaccgtcattaggcaattcgcgcaagacaatttgtagttcaccggcgtaccgcgtatacgtttcgttcacgacgaccacatccccacgctgcaagtgaccgctcgcatcatgcactggcaaaggctgcccggcataacgcacgcgtggttgggtatcgcgaatcagataatcagacgcatcaccgcgataaagatgggcttcactaaaggcaattttggcttctaacgctgatggtgcctggtccgtgatcacccgcaatgccggatatgggcaaaagaatgccaaggccgcggcttttaaatctgcttcgtttgcaagtgcattgccgatgagaacatcatcaatcacctctgttaggcgcaaatggtgaacctgactggcaatgctgcgatggcgatcactttccaaagttggcaaaccttcactcaccggccacggcccatgatccgcacttggcgccgtcacaaaagccgccgtccgaacgccatgccgccgaaacttttgcgaataggccaaaaagcggtcatcgcctaagccggtatattgctgcggataaaaattatggcaacccagcaagttatccagtcgcggtccaaacgccatgattgcatcaatggcattcgtaccggcactcatattcagctcaattttcaagccatactgattatgggtcatcaaggcttcttcttgaccggtgaagccctcgtcaagccgcaatccccatacgcctaattcatggaagaaactaaggtcttgataatcaatgcctagttccttgaacaacggcggcgcaatgtcgacaatcgtttgaaaacccaactgattcgccttggcaaccaccgccttgaaaatagccagttgatcgcggccttgatgaccggatagttgcagtaatgaggtaaaaaggcgccgataacctaactgacgggccatggttagataatcagttgcctgatcaaccgttatttgttcgggataaagactgattccgatttttcccatgtcaatctcctatattttttaatgatggtgtggctgggtcactcaagccacgttcatccaagctgttttacaaccggttctttaaatcgcacacatttgccgcgccattttcttgaagcgccgtttacgcaaccaacctaaaaggaatccgctagtccggttgttcgctgcaccgcgagcggtacgggcgacgagtgcttcttcataaaccagtcgactttttccggcagacaacggcgacaagtggtaccgcacggtgaagtcatcactcggggtcgccagttcatatgcgtagactgaatttggtgcaaactcggtaatcgtcagccgcgcttttcgcccattcggccaatttttctcgtagctaaagccctgcaaactcttggctagcggctcacgaccggtgtgctggcgaatatcggccatggcggattgttgcaattggttgaagaagacactggcttcaacgggtagattcatgacaattttcatattgacctccttttggataagctgcggactgaacgcatggttgcagcaacatgcttcagcaaacgttgcgctgcgatctactcttctctagccagaccgagataccagcgtgtgcaaatggcagttgcgatcaccccgaatagacaactaatgattcgccaaggtgccggtaaaatggcactgaagacaatcacggtcatgctgaggttaagcaagatcaatggtgtcgtgctagacttcaaatcgcatcaccttctaaattgcgatcaccattgcgatcatcggcaacggttttggcttttttcattggtggttcagggacaattaattcaggatcgagtttgttggccgctttgacaaacggtacgtaaatcaggaagccaatgaccatgttgacggcttgcagaatcggggcgcgccaatccatggtcgcaatgatcgagttcacaaacggcggcatggaccagacaatttggttcttaaccggtgacacccagccgagcatgtgggcgccgtacgcgatagataccatgacaaccagcgcgacaataaatggaatgaagtagattgggtcaaggacaatcggcagtccgaacatcaccggctcgttcacgttaaaacagcccggtgcgatcgacaatttggccacggtgcgttgatcgtcacgtttggagaacatcaggatcgcaatcaaaagtaataaggtactgccggcgccaccgatccacgcatacaagtcaaaggcgtttcgggtccagacaaacggcagtgcttcacctttcatgaacgcattcatattggcaatttgggcggtgagccagatggaatccagaaccggtcccaaaacgttggtgccgtgaagcccgaagaaccagaaaatttgtaccagcaacgtcatgagtaacacggcccagaagccttgcgacatatttagcagtggttcctgcacgatggtcgcaatgaattcgatgaccgtggtcttgtttaagctgaacagataattcacaacgccagccagatataaggccgcagttgctggaataataccggtaaatgctttagcaatcgctggtggcactgcttctggcatccggatcgtcacgttctttttcattaaccagatgtaaagcgtcatcgccaaggcgcccatgatcatgacggtgaagaagccataggaaccgaagaacttaccaaagttgaaaaagccccacatgctcacgttcttgccatcgactaccccaccggcatcggtgattaacttggcagcacctttactcagcgtgccttttagcggcagcatgaagttttgcggcaggctcataataaacgtgcctaacaccacaatgcccccggtcaccggctcaacttggtattgaactgccagctggtaaccaaacgtaaaggcaaatagcagacctaaaattgccagtgtgccggtccaaaccatggcgttgataccgatcagccattgcatggaatcgactatccccatccacttaaattgggtcggaatatcgcgaatcaaaacgttcaagacagtggaaaccgccccggccatcatcgccggcatgatcgcaataaacgcgtcacgcaacgccactagccaacgaatggagccgatcttggctgcaaccggcacaatatgtcgattcaaccatcctataaatgcattcatatcactgtactcccttcagaattttaaataatgtcgcattaatacttaactacaattaaaattctacgggagtgctgattggcgggtcaaagattatagtagttattatttataatttttataagcaaaaagtttgactttttcggcttggttaagcgctttcacaaaggcgcgtatcggtatcgtgtttgaacgaatgcatcttatactttgccgagtttaaagattgcttctctgcagggcgttgatacttacataaatctcgcttacgagcaaatataacctctattgcttataatggattaaagttggatgtttttagcgcaaccacacgccataacgcgctccccagcgcaaggatctgcgtgtaaggacctcaggcgcaatggccaagaccgggccatcacgcctgaggccacttacactccgatccctaaccgcgctggctcgcgctcaatcataacgcgctccccggcgcagaagcctgcacataaggaccttgggcgcaatggccaaagcccggccatcacacccaaggccacttatgcttcggcttctaaccgcgctggctcgcgctcaatcataacgcgctccccggcgcagaagcctgcacataaggaccttgggcgcaatggccaaagcccggccatcacacccaaggccacttatgcttcggcttctaaccgcgccggctcgcgctcagctcacaggaggacaaactaccatggcaaacatagaatacgacccgcaaaagcagctctttcacctgcataatgatacgtttagctacatcattcaggtgattcgcggctatttggtcaagcggtattgcggaccggcgcttgaacgtttttccggtactgccaagctggaagatttcagtcacgcatttaacattcaaaatgatgcggcgccgttttcgctcacgaccttgccgcttgaatatagtacgctgatgggcggggattatcgaacgcctgcgtatgccgttcgcaatgggcatggacaattgatcgggaatctgaagtttcatgattttcagattctggcgggaaataaaaacttcaatggtactttgccgactgcgcgcaccccgcatggccagacgctagtgatcacgatgcatgacgaaaccgatacgctggcggtgaatctcaagtacaccatcgttggcgatctgcctgtcctgcttaagcaagtggcttaccataatctgagtgacgacacccttacgattacccatgcagccagcttgcaactggactttgatgatcatgcctacgatctcattacgttgactggcgctcatctcagcgaagccagcgtcacccggcaaccgctcacgccgggtaaaaagtccatcgccagcaattatggtgccagtggtccacaaggcgttccggcaacgattctggcggcaccggcaacggatgactttgcaggtgaggcgcttggtatggcgctgttgtggagtggtaactttagctacaccgcgcaagtcgatcagtttggcaacagtcggctggtgatgggcctgaatccggagctcttttcctggcagctgaagcctggagaaccgtttgtgaccccggaagcggcggtggcttacacgaccaatggcttgaatgatctcagtcatattttccaccgcttttttgccgatcacgtcatgccattgccgcggaaaaatctgatcgaatataacacttgggagtctacgtactttgatgtcagtgaagccaaggtgcgcgccgaaattcctaaggccgaggcgctcggagtcgaattgattgtgattgatgatggctggttcaaaaatcggccgaatgatgccggtcagctcggcgattgggtccctgatccggtcaagtttccgcgcgggttgcggcccattgccgatgccttgcacgagcgcggattggcattcggcttatgggtcgaaccggaaatgatcactgaaaatagtgagttatatgccaagcatccagactgggcgatgcaatacgttggccaaaaaccgttacgttcgcgcaatcagttaattctggatcttagccagcgaattgttcaggatcatctgattaaggtgctaaccgatttggtccggaccaatcatattgattatttgaaatgggattacaaccgtcatttcagccagcccggaagtccggtactgccacctgatcaacaaggcgaagtcggctatcgttacacccgcggtttgtatcgcgttttgaaaacgttgcgcgacacttttcccgatctgcttatcgaaaattgctcgtcaggcggtggccggttagatggcgggatgctggcgtatacggatcaaacctggaccagtgattttaccgaccccgtttaccggatgaaaattatgaacggcttctccttattcttcccccttaaaaccttcgtctcgcatttcacgatgtcaccaaatttgcaggactcgcgagtgacgcctttgcaaacgcgggcgctgcttagtctggtgggcgttaccgggattgagtgtccgccaagccagttgagtgacgctgaagcagcggcggttaaagccagctttgccttttacaaagctaatcgtacggaattgcaaaatggcagtctttatcggctgcatcccagtcatccgaatcaggatcaggtatgctggctgatcaccaacgaagccaaaaccaaggcgctcgtcttaacgtcagctggcgtggtttcgccgattccgcactaccaacatgtgctgttgcattacctcaacccggaagtatcctaccagactaatgacaaggccacggccaccggtgctgaactcaattatgccgggatcactttaccgctggcgcatggtgatttttccgctaccttaatgaccttgcgcgtggtgagtcacctgccacaaaccacggcactgcctggtggcgacatcggtgagttgcgattttagcgaagtcagcaaaagtttcttaggtagtttatcttatatagaaagtttggtttccacatgaagtttatcatcgcaccggctaagaaaatggtggtcgctcaggacgatttccccgttcaaagtcagccgcagtttcgtgatcaggcggcgtggctgctacgtcacatgcagcagctcacccgcgcagaagcccagacactgtggcataccagcgaaaaactcaccggcgcggcgtacgaacagctgcaaatcagtgatgtggcggcgcaccaatcccctgcgattttcagctatgtcgggattcagtatcagtacatggcgcctgacctgttggatgatgccggcttagcgtatattcagcagcatttgcggattctatctggtctgtacggtattctgcgaccctttgacggcattgtcccgtatcgattggaaatgcaaacccgtctggctgcggcaccgaatcatagcttatatgatttttggggcgatcggctgtatcaggcactggcgaccatccccggcccgatcatcaacctcgcctctgatgaatatgccaaaaccattcgcccatacctgcagccggctgatcagtttattaacgtccgctttgcccatgacgtcaacggcaaactcaaaacgcgtgcgacttatgccaaaatggcacgcggagaaatggtgcggtatgccgccacgcatcgcattacaacagtggaggaactgacgcactttgactcgccgacttatcgctttgatgcacaactttcgaccacggatgagcttgtttttattgcaaaataggacaagttgacttccgagaatggcctacaaccaagtccagctttactttgggcttggttgtaggtcatttttttgttgttaggacctttttaagtgacaaaacgactgtctgtgagttaatatataaacaatatcaagaaaggtttgtttataaaatgacaaataacattttcgtttataaaatattcgaattgcagcaaggctactacctagaatccggctaccttcactgccactattgcgacactagtttcgccgttgatgaagtttacccacaaaacggccgttacttcactgctgaagcgatgatcaaacgccacattcaacaggtccataacggtgcattggccgccttactgcagcagccagctagtcaacttggtgtatctgccagtcagcaacaggttctgcgcctgtttgcccaaggattaagcgacacggtgattgcccagcgcttaaaagtttcggcttccactatccgcaactatcgcttcaagtttcgggaaaagcagcagcaagcacagcattttctcgccgccatggccttgctcgccttgccggatgccctgatcatgccgcatgatggcgccaccatgattgatgaccggtatgcgattacgccacaagaacgagaaaagaccttaaaagccttcctcactcctgatggccgggtgacaaattggcccgccaaggaaaaacgtaaactgatcattttgtccgagattttcaaagacttcgacccgcagaaaaactattccgagaccgcggtcaacgaaattctgcagcgtcacgtatcagattacgtcaccgttcgccgcaatctgatcgaatacggcttcctcaatcgcaccgcagacggccgtacttattgggtgaacgctaacggaccggcacgttaagcacgtagaaagttttaactggccttatcggatgcaaaaaagtcacgccaaccatgagcgtgacttttcacatatatcaatgttccacagacgatttacgaaccggcaacttggccaccgtctcaacaacttgattcaaaatatccagctgctcagcataacgcaccgaaaatggctggctggtggcatcaggcttttccgcttccagtgccgcgcgcggttggttaccttgacgttgctgatgatctaaccacgccagtatctgttcaaatgtgaagcggctgaagttatccaccgtcaattgtcccgatagcaggctgccgagtaagtcgtggcgagtatccatgggataaatctgcgtccgcgccagcaacacccgaaagtcgccaaaaaagataaagcgtgcttgcgttcgcgtcagcgcggtataaaagctctgggcatttaacatatgatcggccccattaacaatggcgatcaccgtatccgcctgaccgccttgcgctttgtggaccgtgatcgcatacgccaacgtcaacgcccgcgccacactgccaaaactgtaataacaatattgctgaccaacttggacaaccagaaatcgccgcttggtatcgatatgggcaatcacaccggtatcaccgttggccataatcgtctcccgccaacgttttgtcccgaattcatcggtttgctgcaacccgttttcgcctaaaactgcacgccgctcccaggtcttaggatcaaccagcgccacatgcttgtcattttttaaaatcatgacgcgatcacgcatccgcaaatggtgcttttgtttggtcaccggatcgacataactgctgacgtattcttcctcgccaggtctagccggattgaccaaggcctgcagctcggcgttaaaccgcagtcgaccagtggcgcccacatttttattcacaattaaaagttgcgagtccagctcgtggccgcttttggctagcgcgtcttgatacgccttgattccggcatcgaaaacgcggccggcatcgcgctgattgtaaagtgccacattaccgctgacatagcgatcatcatccggcccaaatggcaatggcagccgatcccgaatccgattggccagcgccagcacccctgattgcgcatcctgtcgataaacccgtgtcaaagtcgtggccgccacctgcgaatccgctaaacagtccttcaaaaagttaccgggaccaattggcggcaactgaaagacatcgccgacaaacaacacgtgtgcctttttgaaattcacgtgtttcaacacggtataggccaagggcgtggttaacatcgagctttcatcgacaatgatcaaccgcgcatcaccaaatgtctcccaatccgactccgcattgaaccgctcaagctcctcgcctggcagcaaatgcaagtatgcatgaatcgtagtggcgggttcgtgcgtatacttcgccaacaccttcgcggcccgcccggttggtgccagcaacacactcttccccttcgcctgggcattgaaaaagtgaaccagcaaattggtcaaccaagtcttaccggtacccgcactgccattcagcacacttagcccatgctgattcacattctgaaaagcagcgcgctgttggtcgttgatgacgagttgatggcgatccaaaaattgatccagtttatcatccagttcttccggcttaatcagtggctctgcggttttctgcgcgaccgtcatgattttggccactgagccttccgtggcaaacatatcgcagctggtcaccaagtcatactgttcatttaacaaaaagccatacgccaacgcctgcttagggtcagcaaacatcgtcaggtcttcggcgcgcacccctaataacgtggctgcttgttgcttaaaccacgtgatcgtaatgtacgtcaacccttgcgtcaaaaccgccgtccggaaaatatactgcaacccggcagcgagccgatgcggatcattggccgcaaccccccgacttttagcaaacgcatccgcctttttgaaatcaaactgcgccacttgcatcagcaaataaggattagcatcaatatggtgcatggccaattcagcatctttatacgccagccagattttctcatatgtcatcgaactgagcgctttaccccagtggttggccagcactgcgacctcaagcttgccgcgaatggccgtggcaattttttggatcgttgccggcccgatccccggaatccgtttatccttaatcgtggcttttgaaaaaatcgccaaaatcggctcgtcatcggcaaacgcttcatgcaagcgacgtaaaaccgtgggctggtgcacgagcaaggtttcaagcaattgccactggcggcgaggttctttcggtaagccaaaatgcagccgcgccactttataagacggtttccgatagcgcagtgaatcggcatcatcataaaccaaatcagcagtgataatggcgcgccgattgtaataacccatgtcgccggtcactgtggcttcttgtgtgagcgtcattttgagcgccggattcgggttcaaaacccgcactgcgtaaactttataatcgctgctatcactgttgaacaacaacttaataatctgtaggtcaacattttcataaacctgagtctgtggcaccgtgcaccaacctcctctctaatatatttcgcgttatcggtcacaattgcatccgtaatttagtcgtctcatgggtggcatcccggtcaagcttggtggcaatccgaaaccgaaagtccgctgggaagctctggagttgctgctgcgcccattgttggatgaacgttggctgatgccgcggctgataaaacgtcaagtcgcgacggtgggtactgtacacgaccacatcttggcatttgtgacgcgcagcccattgcaaacccgccaccagcgcgataaggcctgcagatggtacatagaatttttgcgccggtttgtaatcatcaggcgtgagttccgcgtttgccggggcacctgcatacgccagttccttgatcgcgtcatccaaaaattcggtctgccgcaacaacaactgatcatttgcatccgtaatcttaaggccgaaccggttgccatttaaatcattcagccacgccaaatagaccttcgtttgcggctcaaaatcagcatggttaacatcgtgctgcaagttagccatgccgcggtggagcaagacgcctttcgtggtggtgccgtttggtaagcgaatctccggttggcgctcagcagcagccggctgtgaatttgtatgattggtttccattatatgcctcacttctaatcgtaagcttacccggtgcaggcagtgactgcaaaccgccctcaaaaacggttgtgcctattgccaagaaggttgtcactcacggcttgtgaaaaacttatcgctttttaatttcaatctctatttaaaaacaatcaattgcagtaaatctgcttgtgcgccacctttaaaggacctaagataacgcgttaacatcaaacagctcggcttattatcagatagtctaagactttgttcggctagaccagaattgattagtattttcatataatcgcgccattgcctagtctaacaatgaaagtctcaaaatttgacagtttttttcctaaaactgagacaaaaagctctttttagatgagctggcaaattgttcgtaaagattaatttaccaaaaagcttcataaatcaaccttttctgctcgcttgtgaattcgtcaaatcaattttctttgtttcccggattatctggctacaattaaaagtgttccaaaattgtttcgtacttggcataaagcgcttgtcgacataagggcttttagctgcaagttttgccggctcacgcttatcataacgcgcttgccagcccagaagcctgcgtgtaaggaccttgccttggtcgcaatggccaaagcccggccatcacgcccaaggccacttacactccggtttctaaccgggctggctcacgctcaccataacgcgttcgccagcccagaagcctgcgtgtaaggaccttggtcgcaatggccaaagcccggccattacgcccaaggccacttacactccggtttctgatcgggctggctcacgctcactttaagtctggggggactttttatgtcaaagaaatactggatcggcagtgtggcttttgccggactgcttgttgggagtttttcagctggttcactggttttggcagctgatgcggatagtgggtcaaccaatacatctgtgactgtcacgccggtttccattggactttcggcgccgaataatttgacgtttccaagtctcagtgttgaatcgattgtgaaaggcggtctgaacgaaagcgtcaatgtttcggatagttccattttgaccgtcagcgattttcgtggtactggcagcggttatagcgtcactgccaaggcttcaccgattgcgaccagtagtggtgaggagttgaagggtgcagtcatcaaactcgtccctgacgcaaccaccaccatgaatagcgtatcaccggagtggacgaaaccagtcgcattaaccaccaccgaccaacaactctttgccactacaaccactttggatggcgctggtattagcagctatgacctcaacaagaccacattagcggtaccgcaagataataccgttaaagccggaagttacagcggcgttattacctttacgctcacaccgggtcagccggctcaagctgcgaccgccaacccaaatccgtcttagcacggaaaaataattaaccttagattgcgacaccacatcacccccgatgatcaaaccgggacagaaaggaggtgatcgccggcaatcgcagtaaacacaacaaactgtctcaagcattggcggattctgatcacatccgaccagctgcttgcaagaccaaaaccagccgatctgatagtacaagtatcgggtaaatttccaccacgttcctagtcaacaatatcagctttggggagctgcatgttggctaagaataaagttaatgatgtagcttaaaggcgacctatcgccatcatccgtggcagccaagttgcgacatgtctgatcgtactgtcgtcaacagagcttggtctgtgcacgcctgagacgcacatagtcgattaacgatcaaatcggaaacgatcataggctagtcgcgtcaagtatcaaagaaaccgccgataacaagtcggcggtttttttctaacctttttgacgctcacgcaattaacgctgcaccatggccaaacgatcccggcagctgaacttgcgccgaggcaaatttggcggcgtggcttaacgactcggaaactttcgcgtctagcgttggcttttgcgacgaataaagtgtggcagcaaagcacgtgatatacgcatcccctgcgcccaacgcatccaccgccttaacgcctagcgcctgctgccaagacatcatgtccgccaccaacgctgccgacccgcgaagcccgcgcgagcaaaccacccgctgacaaccagccgcggccacgcgccgacacaacgcctccacatcatcatccgacttggccttccctgacaaatacgccaaatcaatctgtggggcaatctttttgaaaatacgatcatcgtcaatcgttgaaaaatcgtaaatcgtcggtgccgtgattgcggataaaaaggcatccgcgccactttcattattaaggtaaacgagatcaaacgtattaatgtaagcaatatcgtcgcggctcagttgaagttcctgaaccggctcgccaacggtttgatgccgcttgcctgtggtgatcttcatcgtggtaaaagcgttaggaccgtcatactgtaacgaatggctaaggtcaacgccaagctcaatcaatgtccgccgcgcaaaatcaccgcgtgcgtcattgccaaacgtcccaagataagctgcatccaagcccatcatggtcgcaaaagccgcggtattcgcagcatggccgccaagaaacattttcttgtcagccggataaaggtcaacaacattgtctccgatcgcgatgattttcaagtgccgttccttctttccatcatgaagctttgtcaggagtgtcagtcataactataccgatgacagtaaccaatttaagtttaccacaggtgggcaatagagaacctagtactctttttgctgtaagtgtcaactttttctcggttctactctaattatgtgattcccgatactccgagctggctccgcggtggctgggctggaacgtggtgggcacgacttcgaacccgcaaagaccgcggtttcgaagctcgaccttggtctaaagcggacaagcccactccgcttaagaccaatttcaccactgagcccgccaccgctccgccagctcttgctttccatcttgatattcgaacaaggtgacccatcgcactgctgtaatcacctaaaccgatgcgctcgtgtttgacatccacatgctccgagagaaattttacaataacctttttgcttcagtcctattcgttcaagcttgtataaaaaaggaacgatacccccgctttcttggaaataccgttcctctttaattagcaacgatgatgattgcttggcctctgtctaactaacgcagtcgtccatttaccgtgttcgccgatagccacttaacagatagattgcggcactagcaaccacgagaagcagtcctaagatgccagttgcccagttattttcaccggtcgcagggagttgatcagaattctttttgctagctacagacgatgcactactactcgatgtctccccacttgtcgtagcgccaacgtttacattaaaatcagctttctgttcggtttcattgccaaatttatcctgcacgctgactttgacatgatgcgtaccgttttgccactggtagccggctaatgtgagggtatgatctttggtgttcaccgtcaagtgttccttcgcgttcgtgtactcattgccatcaacccaaatgcgtgttttggtccaatcaatgccactagcattaggatcacgagtatcatccgtggccgttgtcgtaatggcaacttgcggcgttgtataagtttgccccgcaacattgatgtggctaatgagcggtgcttttgaatcatctggattggttccatacatggcacgaatattgtcaatgtataggctgcctttggtcatcggtccgccatcactttgacccgccttcagtgagatcatgcaaagtgcttgctcaggtgaaatactgaacggtccttgatagtcagcaggaatcggtgcctccacatatttccacccggtccagtcaataccagtgtcttgtgtcgtcaagtcaatcggctttgcagcaccagtcgcatcagtaacatacattcgcagccaatagccttttgcctcaggggttgcataaatccacattcccacaccagtcggcattcctggcattttttggcttgtttgcggaccagcataaacaccgagcgtggcgctcttagtcccgctggaaaagtcatagtctaatcttaaggcgtgcttgccaaaacgcacttgcccatctgctgctgaactcaaaccgatattcgcctgctcaccacggctcgccgtcaacgaaccccagttactaattcaagattcaaaatcatcaagcacctcaggcaatctgccgacatcgaccttaatgcttgcatgcaagtcgctattctttaacttagcttcaattgtgtcacttgccacttgctggcccgcctgtaattgatcccccgtcgtcaaaataccgagcttagcaggaacctgccactgcaagtcgcaacttttcaaggtcaccgctcgtccctgataggtcgcttgcaaggtcaatgcctgcgttgcaccttttttaacgcttagctcaggttgtgaaaaggtaagcttatctggcatcgcaattgttatcgttgcggatcctaaaagtcggccgttaagggtcaattggattgttgcctttccctgcgtgccgttagaatgaaaaacgccggtcttagcatcaatcgttcccattttagtgttcgtcagccgccagtttaaaccttcagcaggtaatgaagctgaacttcctgatgcatcgacaccttttgccttgaatgtaacggtgctgttaggtgtgtacacagcatcatcgggcgtcaattgcgccgaagccagttgatgatccgatgtggtctttgaagcaatcaaccaagcatttgcaactgtccgctctttgccatcacatggttgattttgcagtgacaattgcgtttccccaggttcgcgcgctacataggttgaagacccgccgccatctaaattcaacgccgtcacggcacctcgttgaatcatcaagttagccaaatccaccattgaaagaccgttagaagttggggcttggcggccatcaaccaccacaaagaaaaccgttccatcggctttaattccaacagccgtccgcggttcgctatcagtgccaattgccttcgtctcattcaccttgccgtcagcaactaaaatatttctgccacccaatgcctgctgaagatcacctttcaccttctgataagtctgctcatcgccaataatcggggtcccatcctttttaataccgaaaaaagattccctagcgcttgttgcagcgtgcaactcaacgccatccttgataacattccccgtcggtacgccactggcaattttgaaaagatccccgttaaccgccgcgacgacttggtgaccattcttaattgctgcggatgcctgatcactcacagtttgaacaccggaagtcgcaccatctcctggtgttccggttaataattgggtattagggttcttcggattaagtgcgacggaataatatttattttgtgttccactttggctaatatatgtaaggcgttgttccgtcacgcctggtgttaaagttgcctcatgctgatcaatgatggacttgatcaccggattggcggcaggcacctgcgtactggtggtcggagaagtcgttttgctggcagtagcagtcgtgctgttaaaggcattcttcgctgtgttagcagacgcttgactggcgctcgttgagttgttagtccctgtcgaactcgccggactcaatgctaccgaactagatgccgccgttgacgaagcagaagcaggcttttgcgaaaccgtcgcggcagtgctcgaaaccaccggcgtatccgtcgccgtcaccgcaaccaccggcgccgcaacgtcgccacccatcaaagccgccatcaacagcaggctgccaatcaccgtccatcttttcctaaccatccgtcatcctcctacgcgtaaaatatgattgttattgttgtatatcaattcatttatacctaaaggatgtaaagaggttgtggtggttttgaaaaggttgggtattggttgtgtaaaggacgttttagtttaggctaattaaaaaagttctcccatcggtgcaacgatcacgcgcacaatgggggaacatctttaaggataggttttcaatcagtcgtcatttagccaagttacccacaaccttaatcttcacccgattggcattctccggatgataagccaacgggacctcatcaacttcaacgacttcaattgtattttcatcagcaccggattcaatcgccgcttcaatcgcttttttcttggcgtctgccattgcttggtcacgtgggatttggttgtaaggatagatgcggccatattcaccggaaacttgactaatggaggcaccgatcgcattggccacgccgccgaggggatcgcgtaccagtttgccaacgccttccagatgatgtggggcaatgatcgcgccgccgccgactagcacaacagtcgctggctcggggctcgttttcattttgtcaatggcaaccgcgatcatctggccgatggtggtcatcgcggcctgagcaaattttagcggaatttgtttgaccagttcgggattgccgacatcggacaggccgagccgcacagccacatctgtcgcggtcacgatattaccgccgaaagtcaatgctttttcggtaatctgatagccaactgaatccggaccgactgtgacgctaccatcgcgctgctgccggacaatcgaaccgccacctagccctatcgacatgatgtcaggcatccggaagttcgtcgccacaccacccacggtcacggcaatcgaagactcacgcggaaagccggcttgcaacaccccgagatccgttgttgttccgccgatatctaccacgatcgcgtttttaagatgcgagagataggcagcaccgcgaatactgttggttggacccgagccaatggttagaattggaaaatgccgcgcatagcttgctgtcatcaaggtcccgtcattttgggttaagtacagtgatgcatgtttaatgccggattcagccaacgcgcgctcgaagccatcaacggtatttttaatcacgcgaaacaagccggcatttaaaattgcggcattttcgcgttcgattaaaccgagggagccgacttcatgcgacatggtaaccggaaaagtatcgccataagccgcatgtaccaaatccgccgcttgttgttcctgatcaacccgcaacgccgcaaaaacaccgataaccgcaatagcgtcaacctcaccgcgccattttgccaatacggcgttgatttcgtcagggtcaagtgcgtttaagacctgcccatcatattcatagccacccttgacaatggcatattttccagacaacttggcaaccaagtcttccggccatgcagtgtacggcggaatggcttccgttgcgggatacgtcaaccgcaacaccccaacgcgcgcaatgtgcttgcgttccacgatggcgttggtgatttgagtcgtccccaacatggctttattaatttgatcaaagtctagctgctgatccgccaaaaccgcttggatcgcgttcgtaatgccagtttgaatatccttagttgtgtgccgtttaactgaattgatgacatgttgttgatcatccaaaatgatggcatcggtattggtgccgccaacgtcaattcctaatcgatacatggaaatccccctatgtgtgagtgttcaagtcagtgcgaaaaaaggtacttatccgccgctcattaaaacctcagtccgcctttgccaccaaatcttctactggctgatagtcataatcaaagccaaaataccgcggccctgctgtttgaataccggctttggttcgccaacgcgcatcggcgggggtggctaaaactttgacccgcttgccatacttaatcacttcagtcgtcaccggcaaaagcgtatcggcatccacaatttcaatcagatccggtgtcatcacaatcggctgatcattacgcaacgccagcaggttttcattttgaattaaaacgctgagatgttgatcctgaaagtcattgaagccatcaattttgatatcaccaacgttaaaacctcgctcagtccggcgaaccacatcaatgactttgccttcaaaaatcagatggccattcgtcacttcaagaatttccgccaaggcttttgcaggattcaagtgggcatcgcgaattcgcaagcctacctgttcgcacaaggtgacaatgccgcgaataccattttgcttaatctgcttgccgtttgaaggatacaacgctaccgttgcgctacctcccatttctacggtttgtacacgggccaatcgctcagcccacttggcactgatcgttttaatcacgccggcattacctttttcatccgtaatgaccatcggcgttgctgccacgccgcctaagtaaaacgtcaccatctgcaactccggaaacgcacggcccatcccgtcgcaatccactagtggaattcccaacgatgcggccagcgcaatcggtaccatcgaattcaccccgccggcctccatgggaaaagtccctacaaactcatgaccggtgtactggcttaacatcttaaaaacccgctcaaactcatcacccttaggaatcttctccatcatgaccgcgggcgcacccataatcgctgctgggcaaaaataatcgtcatcgttaatttctgaaacatcaagcaacttcaccggtccgtgctttttaattgcatcaagggccatcaatttacccaagaacggattaccgccaccaccagcgccgaaaaaagccgcgccggtcgctatattttcaatggattcctgatctaaaagtcgcatattattctccttttaaacttgttttcagtccgttaagtcatacgagtcgttcaccaacactgggcgaaacagccgaaagtgcattctcttgggatcaccttggtcactgtttgcccgctaattcaactctgatgccttgtcccattctggatgaatctttgcgcctgcataatacaggacaaacgcaagaataatcccgagtactggaatgtttgggatcgccggccacagtaccggcagcacgccaaccaccgcacccagcgcccacgcggtcaagccgagccagttcactccggcgaccggctgccagctatgcaactcgccacgatgaatcacccaataagacgctgccatcgctccggcaactggtggaatcatcgctgaaaagatcgtcatgaccggttcaaaataatttaaaattcccaaaatcgacaaaatcgtgccgccaacgcccaccaagaatagtgtcagcttgcgatatttctccgggatgttgaaaatgtttgccactgcaatcccgccagaataagcattcacaacgttcactttccatgtgccgagaataagcgccagaccaccaacaaccggcgaaccgattttcataaataaactactaatatccgtcgacttgaacgcaatcgtcaaaatcgccccaaccgcaatcatcaggacaccagcaggaatgacgccaaaaatagcagctttaaccacatcactgcgctttttggaaaactgcgcataatcaccgacaatgacgccggccatcgcaaacgagacgactgtagaagaaaagccattcacaaacgacaaactgccactgggatgataagccgcaattgttgccgccgcgtcctgcctggcaaatgcgaaccacaaaccatataaaatgacaatcaccagatacgggacagcaacatacgccaacagccgaatcaacttcacgccatacatagcagtcacgaccatcagcaaccccgtcagcaatgaagccaaccacgccggaatcggcaggcccacatacttcagcaaattcgccacagccaaaccgccaacgttcgcctgaatcccaaaccagcccaatgccgcaatcgcgataataatcgaaatcaccttcgacgatccaaccttaccaaatacctgctgggcaaccaccactgctggcttaccttgatccacactttgcatcccttgagaaatcatcatcaagacaataaagccgtatcccgccaatcccgtcaaaattgcaaccggaagcgacatcccggaaaccaaactcccgcctaaaattaagctaggaatggacaccaaggcaccacataaaatcattgctaagccgaaccatgtttgatcgcgtttgttttcttccatactgggcacctcacatatttttttaataattgcagacattttggccgaattcgatggttaaagatctaacacgaccggaatgtaatggtttgattataaaattatgagattaaaagtcaacagtttcatttattttttatgaaattccagtttgggaatattcgcgcatcatttatgacaagtagttaactggcaacgctattactaaatcaggtgtcttcggcttatgttcgccaaattggcagtaactcgtgccgaaaaattttcagatgttatctaccaaaaaagaaccgtccactcggcacacttgcaccagcagacggttctactccaactacaatatttattcgcgcatcctaaactttgaacggtccagtctttgaagtcagacaaccaaactattttacccatgcaaatgactgcacacatccgaggtctcaccccactatttgccgaatcgccaaaagcaccaaccccgccgccgtgacggtcatgacaacattaagcaccttagacgttatgcgccgctctcgttcatccatatcctcaatcatgctcaaactatagtcattataaggcccggcatcccaataacccacataataactcaacagccgtttctcacgattagtcagcggctcaccatcatcacgaagcaacaactgatcgtcaaataacgcgtacacatcatcgctcaacatcgccgccttccgatcccgccgcgcctgctccttgacccacgcgtacaaccgtcgaaaccgcgccaattcccgctcatcctcatcattcaccggcacccacgccaccagtttccggcgaaaaatcgccatcacatcgtcaaaatgcttacgctgataccgattgccaaggcttaaataacgattctgttcgttcagatattttgtctgccacgtctggtaaatgaaaaaggcaaacaaccacagcgtcatcaacgcattaataaaattgccaagattccaagccgtcaacaacttctcaaaactgccaatcacccaaaaagtaagaatcatcaagctgacaaacaatgataacaactgtttctgccgcagttggggattccgctgcatttcggcataaattgtctgccgatgcttcagatacatgacaaaatagtccagaaagtctaatgaacggacttggcgatagactttgacaatgtagataagcaggatgacaagcgaaaccatgttgatcacgcgattgatggtgtcgattgcggacattgaaagctcctttcaggttattggcgtagcgttgcattttaaggtgcttcaattttacctgaaattgggttaggcaaacatctttattttagtcatgattaacagttctaattttcacattaacatcagataaatcgtaatgattgcctaccaaaatccgtttaatgtgctgaacccgactccaggcactatccccgcctgcataaacggccacatcagcgtctcccaactgccgatacttctggtcagcctccacttcattcatatgcttaactaagctatcatcactattcgccaagacaaaaaagttcgatgggtccgcgtcccacaagagatcaattaattgattgtaaagatccgtccaacttttgactgccacaacttgataatcaccaaagctaaaggcgaccggctttgttccggtgggattggctgcaaagatcgcatccaacgaatcccacgtactcggatcatcgctcgtcacttccacatcaacttccggccgcggccaaaccttaagcgcccgcgccagcaagtccgcctggcgcttttgtaacgttgcttcatcccaatgatcaaactgtgcgacccactgattaagcttaatcccagacttgcggtagccgtcagccatatcgcgtttatcgataaatgtcctgttgctcatttgcccattgaatcccgtcagcgtaagatttgccaaccgatttagccagatattgtgcgtcagtcgccaatccggtcccaaagcattatgccaactggtattcagcacctgtggcatgatgtgctcgatcgaatattggccatctgccgcagcctcaaacagatgctgcttttcaccgtcagcattgttcaattcgtccaaaatgaaccaaagtgacgccgaactcatgtggtaataatccttttccgccaatgcttctctcaatgcctgatcagttgggaaacgcttattatctttaaccccttgtgtcagcatcaccttcaatgcatcgacatagcctatttgtgatttggccatcatatgttcaacctgccgatttaaagctgcaaaaagttgattcaaccccgttgtcgggatcccgatgaaaagccgccgcgccaaataagccaacaacacctttaacaccgcaactaaatcatctgtagacaattccccatcgcgcgctttagcaaaaacttgcaacaaatacggcgccaaaatgtcattattcaaatgtcccaaacgaatcagaaaccctcttacccgagcatcagctatctccgctgtttctggggatgtaatctcggcaaagagtcgagcagcagcacgctcctgtttcaactgcgcaatccgatcaaagccctgcgtcaaaccaacataacggcggtagtcactatagatttcgtcttctttaaccggtttggaactacgcgctaaagaagttaaatagtgccggtaaaatttagacagcccatcactacctaccaaatgttcattttgttgccaaatctgaaaggccgcagcttgctgatcaccttttaaccccatcaataaaaaatttcggattttatcggattccgtcaaattcatacccgtagaatttaggctttcaaatatcagctgagcatcatcatcctgatcgacaacaatgtccatcacttgaagtcgccgctcaagcaaatcaagccattcatgtgcgcttaaatcagcttgctgcaaaacattccaaaagtaggcataggtcgttttaaaaatcgtgtcggcagcattcattccgttctgcaaaacgtcaacatattgctcctcgtctcctggcaccggatgaagccgatttttggcaactgaatcatagtcatacttgttaatcagaaattcttcgttaattcgttcatagttaggatcgtccttacccagaaaatctcgcacagcaattaaaaacaaagaaatcgtcgtcagtcgctgttgtccgtcaatgaccgccacggtgctaatgccactcgttgcatctaatatcaagctacccagaaaatatctttgttgcccatttgaataagcggttttcaagtcactaataagccgctcaagctgttcccgccgccaactgtagcgccgttggtaaaccggtatgttaatggttttgttgtttgcgattgtttcgctgacgattagatctgcattacccttcatgaattgtcaccccaaagtgtttgattgcgccaactagagacattgacaacccttccggaatagttgacggttaatctcggcttaattcatcctcaataaataaagtcaaaccattctctgtatcaaagctgttcattaaaagaccatctgccccaaataaatttcactagattcagccaacccccagagctttaaacgctgcatccttcacagaattgtaaaagattaaattaaacgaactcatgagatcagtcggcacactgctgatgtcactagctgcagcagctggcaacaaaactcgcttagcaccactatctaaagctacttgcagggtgtctgccaagtcatcgattcgcgaaattgttccaccgatcgtgaaatcccctagaatgacaagcctatcaagtgttggttttcctaaagcgatggaaacaagtgcaatcagtgttgctagtgaaatgtgactagaaggtgctgaattgtttagattcgtcgcactgacgaagaaatcccgtgcatcggcattaattctttggtcaattgatttgtaattggcttcaagataattaaaggcggtattcatagcttcttttgcttttgtactagagccaacacctgagcgatttagccttccaagtcccggtactgcctgcgtttctaatttaattaagcttaatcgcttgctatcatcgtaggccactgtataaacatgccccggattctcttgcccttccggaataagtgaacttgagcctgactcaggaacggaaacatacttctcctcaaacgatactttatcaatatatgaaaagttaacatcgtagaattccatgccgccaactcgtttcagctgctctttaacgcgtcttcgcatctccatcgcaaattcaagaattttggcgacatcatcttttgtaaagacgccatcaggaaataaaagcttcactagtcccgaaaccgtctttctaacagcgataacatcacgctggttcaactgttttccaaatgaaaagtattcatcaatggcgtcagcatatgaaatcttccgtaactcacgcataacctctgcaaagtaatcggtgatgaaaccaaagccctttgtaaagaactccggacgatactttggaatctcccagccgggtaggtaattatgaattcgatcaagaaaggcagtatcgttacccatcatctctggaaatggttcaaacagatttgatgtccgcaacaaaacatcgacactttgattgatatttcccacaaagaccatacctgccgaagcttgaatttcgtttcttcctctggcaaatgatccagaagccatatagtccttcatgatctggacaccatctttatctttgaagtgaattcccgccacttcatcgaatgcaacaacatcccacatgccgaccaaaccaacctctcgccgcgacatattgtaaaacagatttgcaactgtcgtttgtccgcctgatacaagaatggaatccggagagagttctttgtaaacgtgtgacttaccagttccacgaggtcccagttcaacaaagttataattattttccacaaacgggattaagcgtgacaataacagccatttctcgcgttccgtgaactgagtcggctccataccagttgtccgcagcaaaacgtccaaccattcatcagtggtaaatgccttccgtcccgcataaacttccttcatgtccacgaagggtacttgaattggattcaatttctgaatggaaaaatgatcgagactttcatgatcatagctaacgcgcacaattgaccatataccgccgattaacagacgttcataatcttgtacatagcgttcatcaacaggcacaccggttaatcccagattactaaaactagcctcgtaacgatcttcaccttcattcaaatgaacagtgagtttatcaatgaccgtataggcgccatcttcgcgaatctttgacttaaccttttcggcttcatcagggcggacataattatgcgctaaggtcttcttaacattttcaacgccgcgctcgatcgtctcctcatctgaactattagcgaattgaccaagcaaaaactcgagaacgtaggttggcacattagccccttccttaattctctgagtcaagtcctttcgtacgaatcgtccgggaaagttttgttccaacttgaccaacacttcatcattttttacggaatcagcttgcgtgtcatcagatgtcaaagtcaaaccctccccctacagtgagatccatttgatagtcgattgaagttgttgtattcgcctcaacgttttgaatgattagctgatagtgaccagcgcgatcaaagtcttgatcaatgagcgggatatgtttacgaatcagccgatcattaacattgacggacgtactatctgcttggacaacttgttcaccggaaatgtgccgcccactcccatctacaaagtacagagcataagtagctggtcgatgtgtctcatcaacagggtcattttgcagcatgttaacgatcacctcatgactcgtgatacggcgggtggaatctgtaatcgataacgtaacataggttgcctgcgactttctgctttccgtcaaaacatgtagcactggaacgatcatttcttgcggagaacagccaccgtggacataattttgaccggctccagggaccgaaaagacattcgcgttgcttggatagaaaaccattcgctcatcgtcattgttcaagatgtcccctaacttgacacgaccaacaccgatttcgtcaaaatcctgtgaaccaatagcataacgcaggttcttctgctcgaaatccacctcagccggcaaactgatcttatccgttgaatcaagcaaatgccgccgataaataaacccgtgatcagccgttacataaatatttcgaatggaaatattacgtaaccggtcaattgcgcgcgtaagttcttcaatcgcatcatcaactgcacgaaaaacgttcgtttcagatgcgggcttatcaccagttgcatcaacagtatcgtgataaaaataaatcactttttggttaacaatatattttttctgatctgccaagctcattgagataaaatccttcaaatgcatggcccgactttgaggctctaaagattggagaatctctaagcgttgttctaggttgacagctttcttaccgtccaccaataattccttgtcgccttgatatgtcagtttctggttaggcaacagtgatggcatgccaaagtaagtgacagaaggcacccccgtgatcgcataatgcatgtcggttccgaaaacatcgcgcgaatcaaggcgttcttgaagttctttagccgcctcaaatcgaaaagcgtctgagatgattactacaacccgatctttattaggtgctacgacagaagaatagaagttccgctcaagggttcttggctcaactacatttggcacatactcttggcaccaatcatgaatcgttggagcaagatggtcattgttatacgcagcttcgaccttctgtgacaatttctcaaacacttcaacttgcgacgtaggcaattggtccgaagcattcgtatatttgcgatacgcggtgtcaatcaaataaccgtcagtgatataagcatgaataagatcatctaacttgccagtatcgtgaatttcgcgtttcgtcaaaatgctgtgggcctgaacgaccatactataagcaagttgattctcttcggcaaaatacatcctgcaccgttttccagcaatctcaggcaagctcatttggtcaatcacttcaccaagatggccttgcagaagctgttcaaccagccactgtacaacttgctgatcaaactgaataaaagtatccgtctttaagcgttcagagatcttcaagttcttgaacaattgatagccatcaagttgctgccaaacgtctgtggctatttttttgtaaaccgctcgagtatcccttcgattacgccaattaagcataaaggatacgacattattgatataactgacctcatagctttgaagacttgttggcaagtcgagctccatctgataataggcaaagttaatcatcattgtcgccaatagatcttgtaattcatgtttgccgtggtaaccatacgcccgatcgacaaaactccagaaagttggcaacaattgatatttgtcgaatccgtccaacaatgccggattcttgataacttcaatcaaaatgtttgaaagctgcagatcagacgtcttagcaattgcggctaattccacttgctcgggatttttgccatgctggtaacgttgcttaaatcgcgcaatccggggctttgcgccaaaaaacttacgctgatcttcaacaaaactaagctcagtctccggcaagccaagctcatgcagcaacataacattcatgtctgctgtaaacttcttcgaatataaaatcatatcagtcaagagattttggtgaatatcgggttcggcaaaattggcataaacaagcgccttttcaccagcttcttcaatctttataagtttgagtttcgtctttaattgcgtacgcaccgccatcactacgattggctcattcagttcttgagccaaatcatcaatgttttcagcaaactcaccatttttgtcataccaaaagacaaaatgtgtcccgcttttaaacaatttctcgatgccagtgacgacatccttcatctctacctctgccatactttatctactcctaattaacgcaccggctagtattctagcctctagtataactaacagttaaagccgtggctataatcctactttctttttgttcactccaagctattcggttggggtcattcgtgatcttgtggatgatattcgtgaagatgattttgatgtagacaagggtggtcaggttgagattattgggtggctgtatcagtattacaacattgaaccgcacgataaagtagtcaacatcaatggtggtcccatcaagacaaacgacatccctgccgccacccaactgtttacgacggactgggttgtccggtacatggttgacaattcactaggccgcttataccttgaatattttcctgactcgcccattaaggaagctttaacctatttactgccagggcctatcgaaaaacgaactgatgaatttgacatcaccaagttaaaaattttagatgacgcaatgggatctggtcatatcttggtctatgcttttgatttgctaatcaagatgtacatcgaacaaggctatggtcaacgtgaggccgcaagtgcgattttggcacataatttgtatggtctagagatcgacaagcgcgcttatcaattggcttactttgctttaatgatgaaagctcggcagtatagtcggcgcatcttaaacgagtcagtccaccataatctgcatgtgttcgaaacagtcgatgatgtgccaaacgaggctttcgaaaagatgaaagctcctaaagaggtcattgacgatttaaaactgcttgccgcgacttttaaacaagccaaactactcggttcaattatgcacttcgacaaacaatttgattttgataagcttgttagtgcagtaaattccttgccagagtccacacaactggatttatttgggcttcaatcagctaaagatagtcttcacaatatcctaaagatcgctcaaatcctgcagactaaatttgatgtggtggcaactaatccaccatacctaaatcgcatgaatggcgatctcaagaagtatgtgaagaaattctacaaaccttattcaggggatcttttctcagttttcatttggaagaatattgagatgaccgcaacaaacggatatgcagcttatatgacgccgtttgtttggatgttcattaaaacctatgaaggacttagaaaagccatcttgaacacgaagcagatttccactttgattcaaatggaatattcagcctttgaagaagcaacagttcctattaacacctttgttttgaagaataaatcagatagtgaggcagaaggcacatacctgaagctttcagacttcaaaggcggtatggatgtgcagaaaaagtacgttttaaaggctgtttctgatccatcggttggatatctatatcgtactaaacaaacgaactttgagaagatacctggaagtccgatagcttattgggcgagtaaaccccttatttccgattttgaaattggcataccactcaaagacttagttgatcctaaagtgggtctgcaaactggtgataacagtcgctttctacgtcaatggtttgaagtaaatgtgcataatattagttttaacacaaagagcaccgcagaatcgcttaggtcgatcaagaaatggtttccttacaacaagggtggatcatatcgcaaatggtatggcaattttgactacattgtaaattggcaacatgatggttttgaaataaagcattttacctttgcaaatggcaagcaacgttcagttattcggaactctaattattacttccgtgaagcgattacgtggtctgatgtaactagtggacacttcagcatgaggtatagagagtccggctcgatcttcgatgtggtaggaatgtcactcttctcattaaaaagagacattttagaaaaaatacttgcgttttccaatactaaagtgatgaactttattatgtctttgctaaatccgacgatacatgcgagcattggttatgtcagcttaatgccgataatctcttcccaagatcctagagtgaacagtctgtcaaaagaaagcgttgacgttacgagaaatgattgggatacattcgagaactcgtggaacttttcaaagtctccattggtcgaatatatcgctgagcatcagaaatcacctccagcaaaattcttgaccttatttgagttttgtggcaaatatgtgccaattcagtttaggaggttgatttttcatggtaagttatcaaaaacgaggtaaggtatggcaatatgaaatttcctacaaagatttagacggaaagttcaaaaaacttcgcaagtcagggttcccgcgtaagtcagacgctgagcttgcagccagtcaggtcaaatcgttttatcttgatataaagcaatatcaggccggagccattacactatctgaatactttgaccgctggattcatctctacaaaaagaattccgtcacggcagttacctttatcaaatatgaaaataccctgagccatattaagcagctgttcggaggcattctcctacgtgacctcacacgtaccctgtatcaggaacgactaaatatcttcgcacagaatcatgctcctaggacagtagcagctttccataaacaaatccgtgccgcgttgttagatgcagtggacgaacgaattattcatttagatccaacacgcaaggcaattatctcaggccgtccaatttcggcaacaaagcgtgcactagattatcaagaatggcgacagctcattcaaggactggacacttcaaacacagaacaaatgatcatctatatagcagcagtgaccggcatgaggtatgccgaggtcttgggattaaccaagtcagatattgatcttactagtggcgaaatttcgatcaataaaacttgggactacaagtatcatacggggtttaaaaaaacaaaaaatacatcgtcagttagatcagttgtactaaaccccgcgtcaattatgaaactggcacatttcttggagctacataatccagaatcgtcccaaaccccgatctttgcttccaacggtcattctctagtcagcgcagagataaacaaagtactgactcagaagttaaaatcactcggactaccgcggattactttccacggactgcggcacacacacgcatcaatccttctttaccaaggtgttagtgtcctatcggtatcgaaacgcttgggccatagtaacattacaacgacacaagcaacttatttgcatgtcatcaaggaattggaaacacaagataacgagaaaatcctatccattttgcaagcaatttaattggcacatttcttggcacacaaatgggcgatcaacacagatcgcccatttgtgtgctcatttaagtggcgtaaagatctttgtgtccgcctgtgcctttgcgtgatttaccaagaccccatcatctaagtcaagatctatatgcaaattcgcaacatgttgcaacttttcatcatacttaactagctcgtcaagttgcttggtgatcgttgtaatctgctttttgatagcattcttttgccgagtttgctgttcattcgcttcgaagctcttcaattgatcaagtcgacgctcgtaagcttcttgcaacgggtgaagatactttgttcgaatcatcgccatggtattcttgtcatatcgatgaaggtacattaaggctttaaaaccgccgttccggccagaattaagttcccaatagatcggccgcttctgatacgtcgacaaatgatctttcttaaagaaatcgtctcgaagataggcgcgtattatctcttcggaactgctccctcgcttgcctaatgcgtctgcaatgaactgcacgttttcatcgagatgttcggttccaaacgtggcagacaagaattctttgaaacgatttacaacgtctcgattatctccaaaataatcgtcatcagttaagacaattacgtcatcttcattcggaagaaaggtcttgtagttgctatcatcccagtcaccacctgcataggccagtccaggtgtatcaatcgagtatctaccaaaaacgcaaccaacaaagtacgacataaacgcttttatatcacgcgacagatcggcacgcctgacagacacatctttatcttcttcttcaggactaagttcatcctgtaacccgtaaagatcaatgaagattcggtttaattcttcttcatttgccttcagttggttaaaacgtttatcagcttcttccttccactgattaaacgcagcttcaattgtccaatttcgatgatgctcagcgatgtattcaacaaatgggaaataccaaaaatcccaagaaacttctgaaacattccagtcactcttagagatttgttcattatccctcgtcaaattacgaactagaaattctcttttgttgggaagcactggtaacgcggcaatttgtccaatctcatagttcagtgttggggatagaaaggccaatatatccattgcagtatttgagtttaagaaccctaacaatatctctaatttataaggttcattcgaaaataagcttgtccccgcaacatcaaacaatgagccgacaggaacatgtcgaaaggatatctttccgctagatatttttgaccacgtaatcgcttcacggaagtaataatttgtgttttgtggccgagatcgcagtttaccttttgcatcttttaagttccgtatttcgaagccatcatgttgccaatttacaatgtagtcaaaattgccataccatttgcgatatgatccacccttgttgtaaggaaaccatttcttgatcgacctaagcgattctgcggtgctctttgtgttaaaactaatattatgcacatttacttcaaaccattgacgtagaaagcgactgttatcaccagtttgcagacccactttaggatcaactaagtctttgagtggtatgccaatttcaaaatcggaaataaggggtttactcgcccaataagctatcggacttccaggtatcttctcaaagttcgcttgtttagtacgataaacatacttaagatttggatctttaacggcagcaagataagctttttccttatgtgcctgtgaatcaaaatcgaccagccgctcataagtgccgctaaagtttgaactcgcttgcttttgaataataaaggccgttgtttgaacaacctctccaccaatttcttcaaatgcacgtgtccctaagtgtgccatatttataatcggccagttaatcatccgttcacgtaaggatttaaagcttgaaagaaacatccattggtgctgggtaatcatggcaaaaaagccatcttgctttgtcatatgctggagccgctctatgaagactgcaaataaatcagacttacttgccggatatttttttccgacaaaatctgaaagaggttttggcatcttgccagaacccatgtagggaggattagtcacactgattgtatatttactgcttaaacccatccccacccgaaccaggctctttaactcatgtcgatgtgctagttggtttgacgtatcgaacgtgagctgtccagtaaactggttatgaatgatctcattaatcagggcatttttaaagatatcggcgttgaaatctatcagcgacccgagttctttacctttgttgaactttgttaaaaactctttcaactgttcgttgtccgttttacttgcatttatagtctcagaaaaatcatctggagttaaggccgtagttgggacctcaaaaatattgggttttaaatgaagatcaaaagtccgtctattttcacgacgcaatttcattatcatggcaaaataggctagttgaaatgcacgtcggtcaatatcaaacccaaaaagattgtctttaacaatcttttgagctgcctcacgacgcgaatagccttctgcttgataaatttgcaagaagacatcaaatgcatagatcagaatatgtcctgatcccattgctgggtcaacaaaagtaatgtcttcaattcgttttttggccatgttgggataaggcgttgaatcattctgcttaacatctggcataaaatagtgccatccaaatgattcagcaatctcagcagaagtacgcttatctcctcgttcaagaagaacgcgtatccagtatcgcccaagggagttctcaacaaggtacttgacgatccagtctggcgtaaaaagttgcgtcactgggggaatatcagaagtcaaatacttctttttcttaaaggcactgtctttgggctcggtattgtaatactgatacagccacccaataatctcaacctgaccgcccttgtccacgtcaaaatcatcttcacgaatatcatccacaagatcacgaatgaccccaaccgaatagcttggagtgaacaataattgcatgaaatcgtctgttttttcgaaaagttcagggagatattgatttagcgcgttcgcttgcttggtaaacagaatgacgtacgcagcatccatgtcggacggctcttcggtatcaagggctttctggatgattgcacgctcatccgagctataaccacctaactcatcttcaatattaaaagcttcgcgcaggatatcaggtactttaagttttgttcccgatgacagcactcgaacgccactcgggaggtaatcatttacttccataaatcgaatggcaataattcgattaaaccatgtatacgcaacttcttcgatgaggtctgaaaatgcgtcccgccattcttcctgcttggccattgttttaagccgagaaaccaaatcacggcgacgcttaatatcttggccactgataaatagccccttatcaccataatattcaatctcactggttgatgccgctgatttctcctcaacaccattttcattaataccaagattctccatctttaacctgatacttttaatcagatcacgtctagcttgaatcgcaaatgtcttgattgcctttttatccataccggttcctttccatgactgccaaactttatactagtcaatttgcaaggtcacaaccgtgttatctgacaattgtgcctcaagtgagcgcttaaactgagcagtcagcttatcaatatcagccgaggctgtgattttgtagtcacccttgtgaagaacctcttccagtttgacaatcttctcctgtggtgaaacgaccgtgggacccacaggcttatctggatccttatgcttatcgtcagttttgctttcacctgagtggtcacccgctggtattaattgcgcctttgcatggttaattcggtccgtcagttgatctaattgcgcactagcttgagctggttttgctacaacctcatttaaggttgtggcatccgtggctgcctcagaaatagctttaattctattttcaaaatcatgagctagtttatctttcacgttctgatcaggtatcgctgattcttcaatacgtgtcaagccacgttcacgaaaatcatcaatgtccgctaaataaccagctgccgtcttatcaaaagccgcactaaataattcatcaaactgcttatttaattcgctgattttaacggctgtatcgccctgaagtttttgcaagtgaagcaactttgccatcttgtcaactgtatcctgtagctgattgtcacttaagaaatcacttgactccccgtaaacgcgcaacgcatttaaacccttgtcccagatatcttgcattgactgcgagtaataaaagtcacgaatgccatcatcaagaaaatcatcgttccagtccagtaagtcgtctttgtgtttactgatataatcataaaacgcaccagaatcagacatttcagtcaatggacgtagtaactgaagtcctttttgtaacaacacgtgtcctgggtagtcttgagttttatcttcaaagcctttcagagtttgatacttagtcacgattagttttcttagttctgcggccctctgttcatcgttatcagcctcaaatgatttctttccaaacacttcagaagcaactgtctgcatcgctttgatctttgaaggcgcaacttcttctttaatctgaaaggccaaattacgaattgcttgcttcttagtaaagaaacctgcaatttcacgcggtgtccgttcaccacttagcggatctattactgtaccattgtaaaacatcttaagtttgccaatagcgaccaattttgcgacgagccattgaatatcttcatccgtgtagccatatggaatatcattaaacttcgacaagatgctttccatggtgatatgcgtattattctgtgactcgcgccgcatataatccagaacagcatcaaccgcagcttgattgtcttgctcgtcaagcgccaggctggagatactttcgaaaagttcgcgaatatccttctcagatttggcaacagtgatgtactgcaaactgcgatacgtattgtcaactaagagcttcattgcctgttctaatcgactatcgaaccctgcttcgccattaatcaattggccgttttcataaatagctgcattatcaagcgatgcgatcaactgttcatgagcgtgctggaactcttcattttgctgagattggcgagccaacaccattccctggtaacgtgaatcgcttgatgcactgctattaacaacaaacttctgaattcgtaatgcatttcgaatttcatcgacaaagtttgacgaacgtggtaaagcaatcaagacatcatgattccacgcaccagtcgaaacttgtaaataatcgttgtcactctgaaattcatcattcactggcgtaatgatgtgcactgaaagcttgtttcgctgtgcgccaaaaatattgtccgttttccgattaaaagcaaagacatagcgaccattcagtttgggataagttaaactcgttgcaatacctggcttggcattgaacaagtaatccccaatttccttggcaacctcattgtcaatcacttcttgtttcgaaatttcgcgtgtaatatcttgttcagcatcagtcaaaaagtcataacccttgactgttttttcaacgtaaccttgtccgactagaacctcaagtgcatcgctaacttttttcttaagtgcaattcgatctgcatcgaccgaactaatcatcagggtgatcaaattgttcaatgatgcgttaaagtcagtaacatacttgaccatgaacaatactttaagcagctgcagtgcaaacggattcttctcgtcgttcggattaacagcaggattgtcgtgggcacgcactagtacgatgtgatgggtatgatccaagaattgttccaaaccatcgaaaaagcgactaaatggtgcaagcgtctctgtgtccgcatccatcatagcttcagctgactcttggaagagggaaagcattgatcgctcgccttcagacaaatgtttaccatccgaaccgttttcacgaatcgcagtcagcacctgttgtaagagattaaactgatatggaataaacggatagttttgtgcaaaatcttttggcgacttatattttggccgctctacaccatcatcgaaatcaattgaattattaatagctgcagcgtttgcagaatactgatcttcaagcatctgctcggcaacatcagtcttttccaataaccgcttacgaataacttcatcaacattagccgagctcatcgacaaacgtgttttgaagcgaccttgaattttcgaaaagtcttgtccagatgcaatatccgtcactttgtcaattgcctgctgagaagtcacgactacccatgacttgccgcgtgtcatcgttcccagttgttcgacaatcgtctgcaaattaagcatccgctgtacactgtcacctatgaactggccaacctcatcggccaagaaaatgacccggcgtccagttttgtcgatataccgtttcaccaaagcagcaaaatcatcaatactgatctgatattcggtgctcagcgtttcaatgaaaccctgagcatttgcctcgtcagagaatccggatttcaccattgcttccttgatcgtacctttattcaggtaataggcgtcacgcaactctatccaagactgatgattggcattgatcgctttaatttgctccttaaaagcatccatctttccaacttcagtcaaacgccgctcaaggtcagcaatccaaaaatcggcgtcagtaaatccttgcatttcgttgaagacccgcatgaagactttcaaaatgctttgtttatctgacccaactgtgtctttcgccttagcatcgatattgaacagaatgacatcattgtttgccgccgcagcagcatgcatctcattaagaatcatctggtcgtctattttgtcgtcaaaataatcaacggctggttttccatcaacaattttgtttgccaaaatatatgacacgatttttaaaaaatgcgatttcccggatccaaagaagcccgaaatccagacacccatatcgtcagtcggagtctgtaaactattatcaaaagcactaaagaacgctgcaaaatggtcacgcaactcacgcgtaacaacatactcgtctaattcctgtttaacgtttgcttcgtcatcttgatcaactttaataaccccttgaatgttgcggtcaattgatcgtttaaaaagatccttaattttcattccccatgtcctcctattcgatccgaaatgcacggtagtagtttttgtcatcaagcttgccaaaagcacgtaagctcaaactgttgtagctccctgggtaaaacatgacaacaggcgttttatcaataacctgattcatggtgttcaagactcgatgagcacgaatcaatggaaacacctgcccgatcccggtaatgaagatgatgtttcgctcctcagggtgttcgagatgatccaagatatagcttacgatcagattacgctcgtctcccatttttagcacgttattgatctgacgaatgaccatatcgataccatcgtctttttcaatctcaataaattgctgcaagtatcccatctggtcaattaaatcaataacaacgtcaaaaaggttgaacatttggacatttgcgccaattgaagcagttgtcgaatcatgagcaatatcttctacctcatttcgaacatacagctcatcttcggggtcgtagtcaaagatataaaaaccaacctcatttgataacccgcgattctcttgaaatgcaggatcgcgaatttttttgcgaaaccggtcaaatcggtcacttaattgcgtcataactttctccctgtcagtgcctgaatgtaattagccttgccactttgtttcaacaatgctattagggaaggatccaataatgcacgtttcagagccatccctcccttaacatcctctgctaagccactgtacgttaagatctcgtgaaatttcgtttgaattttcttcaacgtttcatccgtccacttggctgtttctggatgctgtagtggtaagtcttgcaaataagcgctaatttcatatggctccagcctcatatcaccttttaaaaactctttttgaacgaccgttagaacaaaatcttctaccaatggcctttcaagcatgagtgcaataagattcaccgacttttggttactgagagataactgatcaaagatgtcaacgaatccgactggcaacgtactgattcgtaatttcatctcccgcgccagatcttgtgcacggttgcgtgacgacatttgaaaactgttctcctcaacaatagctttcgtgatatcgtcccaatccttaccctcatttagcagtgagatcaccgcagaaaattcagtaaaccagacgcttctggaaataaatcctgctgaaagtttcttcaagttgatctcctttctagaccatttttaagtcacactagactaactacatcatattgtatcaggatagtgccacaagcggcacacctttgctgcagaaataatgcacatgcttgcaatataaaaaggcgagcttgatatgcacggctttctaaagatcacatggtgctaagcattatcaaaagcctcagaaacagcaataataaaacttatccgatggctggcaggaacctaagtatcacctcaactctcaaatgtgctacagtaagtttctgaacaaaacatatcaaacaagttggagcgtgtagaagaaattgactaaagaagcacatcaagtcgtcattccggatgccattatggaggatcttgatattaaagatggcgagcaggttgaggtgacgttgaaggataaagaagcagtgattcggccgaaacggacggatacggggacgcagacgatttcgttgcggtttttcctgattccaacggttttggcggggctgttttttctggcttactttatttattttcagattttgcaggtgccgatgacggggaagaactcgattgcgcagatggtgattgtgctgggtgagttgagtggcatggggacgtttgcggtgacgtatgttcagaatcatcggcggattcatgggcgtgatcatcggcgccggtattggcggatttttccgacgttgttgctggcgtttgcgattattctagcgtttgtggcgtcggtgttcttttgggcgattggctacatgtttgaaggtgtcagttttgatatttacacggcgacagggttgtttttgctgtttatcagtattgtgaactacctgatgatttattcggcgctgtcgatttcaacgtctttcattacgactttgtttttgtcgacattcgttggtggcgttgtcggagcgattgtgacgaacagttcgcggcagtggtggcagcataatgtcagctttttgggaacgagcaaggcgctgaatgcgtggcagtttaacttgacgattgcggtgtcggcgttgctgtggattgcgctggtggactatttgttcgtgccgttgatggcgcatcggaaaacggattggcggctgattacgatgcggattatgttaaccgtggcggccgtagcgttactgggcgttgggctgtttccgaataaccgcggcatctggcatgtccttcacactcaaagcgcgtggtttctgaattatttcctcattggaatgatcatcgccgtgcgctggctgctgccgggggtctcgcgcgaatttctcagcaccagttacatcatcggcggcattatcgttttcgccgcgatcttgttccaatttgtccactacctttcgctgacggcatttgagatgatcgcctttgccctcgccatgtcgtggatcatgttgctgctgcaaaacattcatcgcctgtatcaaaaagatgagtctaccttcgttgtgacggtgaccgcgaagaaggaaagggccgaataatcagcgactgaatcgaaaagtggcgcgctcacaacgaagcgtcacttttcttttgcctaaaaatgtgtccgctgcgtgttgcgtgatccccttcatctgaaccacatcaaagcgtatagttcatggctacaacacgcgcaatttcgagccttaagccttcaatcgccagccctttcatttacctgactccacaccaattaatatcaaaggatagcattcttggctgccgtgcacgcgccttcagtctgtctattttcgaacattgagtccttcaatacccttttccccccacgcaaacaggcaatgccactggctgatcaccagcaacattgcctgtttaaattgaacaatctttacttttgccactcgcacgaactactcgatgattttcgattcgcgtgtcttctcattcatccgctcaatccacgggtgtattggcgcttttaagaacaggcctaataagaagaaagctgtaccgaatgcaagaagtgcagcaacatcgacccagagatttggccagtagataccgccgactgtttcgcgtaagaggttgacggcgtaggtgaatggcagccacgggttgatcatctggaagaatttgccggataagacgacagggaagttaccgcctgcgcccgatatagagaggactaagatgatgatcccgatgcctttgccgatgttgccaaatagcgagattaaggcgtagagaatggagacgaaggtcagactgagcatcatggcaaataacaggtaaagcggtttgttgacgacatacgtgccgatcaagaacagattgccaagtgcagcgatgaggccttgcagcatccccaggccggcaaaagtcagccagcgtgcggtgtacatctgcttaaccgtggcgtcgctgagcgttggcggcagtcgatactcggtaatcaggatcgcgcccagcagcagtgctccgacccagatacagagtgccagataaaatggcgcactttgcgaaccgtatgtcggaatatggtagaagctttgctgtttgagttcaaccggtttagctaaaaagccggcttctttggtggcatcgcggcgtaacagtttgattaactgggataaatcgacggacttttcgccttttttaatggccgcggcgcctttttgaatcgcttcttttagcgttggccagtcgtttttcacgaacttctgggcgtcatccaaaccgctttggagttgcggcattttttcgtttgccaaggccaaggtgttggtgaggtcggattcgacgccagggagatcttgattgatgaagtcggtggcttttgtcagcttggttttgaggctgggaaaatcattttggtacaagtccgcgacggttgtgatgccgctagtgatgagatccatgtgaccgttaagcagcgtgttggcatcggtaagttcctgcttgagtgccggcagctgctttttcgctttgaccaaaaagttgtgcgcttgcgtcaacagatccttcgtgccgctgagcagtgagggcatggatggcaggatctgctggttaatcgtatccagcgtggtgttggcatcgttgagtgccgctttgaaagcattcaaaacctgcttgacgctggtgccgagatcaagagctttgagcgtattggccgcgtcggcgaactgattggctgtattggctaaaacgccgagccgttgctgcaattcactcgtacttaagctaggcacatctttggccaaagcttcggcgtcgcgttgaaccgcagtggctgtcgcggcaacttctttgagcttagcaatggccccgtcaagcacatgatcatctttgccggttaactgattaagggttgtctgcacccgggttaacgtgtctgccaagctggtggcgttggcggcaaccttgccttgacgattggccagtgccgtcagcctttgcgccatcgcttgcttcagtgccgcggtgtccttgctgctgtctaattgttgtaattgctgctgcaacgtggttaagtcagcgctcaagctggtgttggcagccgcaatcaatgtcagcccggcgtcggttgcattttggaccacacccaaggccgtattgattttggggatcacgtcatctttggtcgttgccaccgctgcttgggcatttttaccaaaatcggttaaagccggcagcgtgccatcgacttggttaaccactgtgatgccttgatccgttacctgaaccgctttggtgacaccggattcgagctgatcgaaattggtcaccactgtgttcagctggtcccctgcctggcgaacttcgggtagtttgcctttaacattcgtggcgagctcaccggcatcttggaccattggcagatagccatttgcccccgtcagcttttgggccatttgattgatctcgggcagataccctgccatttcgttagcagtttgcaatttagcgcgaatcgccggcattttagcctgtagctggtcgacttccgccagatacttttcgatcgtcggtagctgatcgttggtattggtgaccaaactggtgaagcggcgaatcatcggcagattttgatccagcttgataccggctttgttgaaggctttcaccaaagttttggctgccgttgagataaattcatccgaaattttgttttgcagcgtggtcgcgccggtgctggtgattttgggggccaccgcgttgattttttcgttgacgtagtaatcgagtttcggtttgtgaattttgccatcaacgaagctcagcaggttcttggaaaaatgcttcggcaccaccaccccagcgtagtacttaccgcttctaacgcctttttggacggcttgtttggagtcgacaaagcgccagccaagttgtttattatcttttagttgatccatcagctcatcgccgactgccactttctggttgcgaaaagtggcgggttgatctgccgagtacacggctacttttaaatcctgcgtgttgctgtaaggatcccacagcgcccagacgttaaaccagcagtaaaggctgggaatgacgaccagcgctgtgatgagtaagaaggctaaaggacttttgaaaattcgtttccagtccagcgccactaatttgccaatgttacgcataacgtcctccgagtcctagattgagatattttctgattatatcacaggtgtttggtcacgcaattggacaaaaagcagaaagtgtcgagatgaagctttggatttgtacgtccttcatcctacacgctttcacgttttttcggtactcctaaactaacgggatcaaaaaagccttaatcccatccccagtcacaataactagggcgataggattaaggcttatttcagtagcttttacaaggacgccggtgaaaccgattcgactttaacgtcttcacgctgcactgccaacagatcggcgccggcttcaaccgtggtgtcggcaaccggttcgatccgggcgtaggctttgctattggtgattagcaccatcgttgtcggatcaaggccagccttttcaatggctgcgcgatccatggttcccagcaagtcgccttttttgacgtgttgaccggccttgacggcaaccgtgaacggcgcaccgtgtaaattaacggtatcaatccctaagtgcaccagaatttccataccgtcatcgctggtcaatccgtatgcatgacccgtgtcggcaacaaccgataaggtgccggattgtggggcatagattttgttgacgccggcattttctggcttaatcgctaagccgtcgcccatcatgccggaagcaaataccggatcgcttaccttattcaaagcaagcgtttcgccgctgaccggtgcatagaccttgttgtcactcacggttgacgaaatcactgcattcgctgtctccacatcacgatctggcgccaagacttctttaggaatggcaaaagcattggtggcaacaaacgcaacgacaatcgtccccagtgaaacgatggtgtaccacagcaaggcgtggccgttgtaaatatacatcaggtatgacggaaccacggcgagtccataagagttggcggaaacattgagaatgctcaagaccgccgcgccaagtccggaagttaacacggtgacaatcaatggccggaaattatagcgaatcaaaaccccgaataaagtcggctctgaaaccccgaagagttgtgaggtgaatgcccccattgacgttgccttggctttaccggaacgcgcgcggaggaaaattgccaacgccacgcctaagtttgcaaagccgtacatggcttctaacgtaatcaacggattcaagccggtggacgccaacagcgaggtttcgatggcaatcatggtttgatggatcccgatgagcaccatcagcggataagctgccccgatcaggaagccgccaatgccaaatggtaaatgaatcaccgcctgcacaccaaccagcatcccattttcaatcgcatggacaagcgggccgacgcctaaaatcataatggcaaacgtgactagcatcgttagaaatggcgtcaggatttgctccaaaacattcggcatgtgacggcggaagaacaactccagtttggcaccgatgaacccggcgaccaaagcggttaatactgaaccctgactgccaaccactggcaaccagccgaacagcatgattgccttcgcactgccgtctgcaaccgagtatgcgttaggcaaaatcggcgaaactaacatgaggccaatcacaatgccgataatcggcgtccctttaaagtagcgaaatgtcgaccacacaatcaacgccggcaaaaaggcaaacacggtatcggtcagcactgaaatgaccgaggttagactggcgggaatgtcactaggcacggcaccgaaaagctttaatacctgagcgttggtcgccgcactctttaatcctaagaacagtccggtagccgcaatgacggggatgatcggaatgaaaataccggacagcatggccattaggcgttgcacccaagtcttatgttcgtcgcttgccgctgcggtggtgtccgcatcgtccttgccataaatcgcattcacggtccccagcttggcaatcgccgcgtacacatcattgacgacgccggtaccaataatcacctgatactgaccggaaccatagaaaacacctttgacttctggcagctgctccaatgccttatcgtcaatagccttgcgatccttcacaacaaaacgcagccgggtttggcaatgggtcacggaatcaacattattgacgccaaccaacttcaaaattgcttttgcttcttgttcataattttttgccatcttaattcacctcaatgagaatcgcttggtagggtttcaacgttggtgctgcatccggataattgttcagccagattcggccggccggtaagtcgatggtcgccgatgcagcgctgagattgacatagatccgcaaatgtttcccgcgggcatacgcgatgacgtgttcgtctgccacagtaagcggcgtaaaatcaccgtcaatcagatccgaccgcaacggcgaatcattgcgcaactggcatagcttttggtaaaagtgccagaccgagtcgggatcagtctgttcatcctgccagttgacgccgggtgcttgttgggccaccggtagccacggctggtgatcgctgaacccgccgtttgcctcgtcgttccagggatacggtgtgcgggcattgtcacgcgagcggcgattgacacatgccaaggcgtccgcttccgaataaccttccgctaacgcccgccgataattatcatgcgccgacaaatcgttaaattgatcaatgctgctgcgaaccgcattcaccattcccaactcctgaccttgatagataaacgggcacccgcgcaagcagaaatacaataatgccaatgctttggcgccagtggtattgcggtacgccggttcgcgaatgtacttacttaaactccgcggctgatcgtgattttcaagaaaattagctccccagccgacgcgttgaatggccagctgactttttgcaatcgcatcacccagcattttcggcgtccactgcgtctgcttgaaccactccgaaccggaagccacatcaatgtcagcataatggaaatcaaagatcatggaaaagtagccgtttgggccgatgaaatcacctagttcatcataggcaaccccggaagcctcaccgattgtcacggcattggcaggcttaaaggtagcagcgttcagttctttaaggaagcgtgccaggccgggccgattctctgccttccgcttcacctttcccagaccatcgctgccatctggcgtaatcgctgcaaaatcctgatcctttttgatgaaagtgatcgcatcaacccggaatcccgccaagccttttgccagccaccagttaatcatctggtaaatcgcctgccgcaacttgggattctcccagttcaagtccggctgctgcggggaaaagacgtgcaggtaatacatgtcggcttcaccgggaaccgccgtccacgccgagccagcaccgaaattagagcgccagttattcggcggctgtccgtcatgacctttgcggaaaatataatactggcgataaggtgaagtcggatctttcaacgcggcttgaaaccacggatgctgatccgaagtgtggttcaccaccagatccatcaccactttaatccctagttctttagcagcggccaacaacgcgtcaaaatcagccatggtgccaaagcgcgggtcaattgcctgatagtcggagatatcatagccattatccaccattgggcttcgataaaccggtgacaaccaaattgccgttactcctagggccttgagcttcggcaactcactggtaatccctggcaagtcgccaatgccgtcattgttgctatctttaaaggatgccggataaatttgatagaaaatttcttgttgccaccatgtgcggctggtttcgttaagcatgcgtaactcccttttctgaaatatggtatcgattccatatttgccaaaaataaaactcaggcgctttgcctgatttttaacgtcaaggttaacggttctaaggtcgcagccggttcaccgcggccaagtccggctaatagtaagtccgttgccacctgcgccatttcggcaacaggctgatggacggtcgtcagtggcacgcgggcaaatggtgcaaacggctggtcgtcataacccatcaccgcaatgtcatccggaacagcaatgttggcggtgactaaactatctatgacgccaactgccacttcatctgagttcgtaaaaatagcatccggacgctttgccggtgccagcgcggcgatttggcgtccgagcgtttggccttctgttgcggtatgcacctgctcaaacagccaggcaggttcgactggcaacccgcgcgcttgcataaaatcaaagaaagcttgggttcgactttgaccgtggcgggcacttttaatcgcgccaccggtcatataagcaaaacgacgatgaccttgcgcaaataggtaatccaatgcatcgcgggttgcctgatagtgcggtaacaccaaagacttagcattgggaatctgcacatccgcattgaccacgaccactcgcccaggaaaggctttagctactgccgccacccgcgctggtgcttcaactgacgctaagatgacaccatcgagttcgcgacttttcagctggttcaaaaaccgttcctcggcatccggatcatcgtaagtttgcgaaatcatgacttggtaaccgtgggcgtgcagcgtccgctcaatggcatcaaacaaaccggcaaaaaacgggttcgtgacccgcgagaccaaaacgccaatgtttccggttgcctgagcgcgcaaggaggtagcggctgcgctaggcgtataacctagtgtcttgatcgcagcctcgatccgcgccttcttatcagcagaaatatacggatgatgattcaagtaccgcgataccgtcgtcacacccacaccggctgccgcagcaatttcgctaatcgttgccatgaatggggcacctcctgtttatggaatcgatttcatactgtgagtatacagcgctttcaaaaattgtcaaggcacaactaaaaaaattcgattacttctgaaaatgaaatgcctcggtgcacagatgactgcagttgattggcaaaaaagcatcagccaatgtctgcacgaatgacatttggctgatgcttttttatttattggcgcaaataagttgtttaaatggtggcgacatggttgatatcagatgtgctttctactgacatcgcttcattcagtttcaaaagccgcctatagcccgccattatccttccgcaaattccacgcctgcacgttgctaactgcagcaggtggattcacacgtgcggcagtggggcatgtgtccccaaagaagcgcccggaaacaacccgataaccatcatcaatgaacaactcgaaaacggagacgtccacaaacaaccgaatcgtgaccgttttgcctgctgggaaaccaaattgccgcaagctgccgccattattgcggttctcgcgttgaaccatcccttggccactatctgagtcaagattgatcaacagttgatcgtgatcaccatccggaacatggacggtggctttttggccggcagctaacgtcatgctcagttcgaacgcaccgctcaacgccgtgactgaccattgatccgtattgtggctgacaactggtaaggcatcagcagcagtttcccgaagctgttcaatgttgggatgtggctttaggcaaacatgaccatcgcgtaaatccagctggcgcacgtaactcaagacgccttcccacccgtctgcatccgttgggtaattcgtgtcgggtaagcctagccaggaaattgccaaagtgccatctttttcggtattggcaagccgggttgcgtaaaagtcaaaccctttatcgatattttgcaggcgctgatgggtcagtgtgccagtctccggatcaaagctgtcggccacaagtgcaatattaggataaacattttcgtattcgaaaaagtcttgatccaagccttgtggacaatacactaagacgactttgccattaatgaaggcaatgtttggacactccaccatgtaaccgcaaaattcatccggaatacttaatggagccacatagcgccaagttttatccggctgcttttcatatagtaggatggcgccggtgtgatcggcccgctgaccaccgatcaagacataggttttatcttgataattaaatagaaatggatcccggaactcttgggtgtagccagcaggcggattagcgatcaatggcttcggatctttatataaacgactatctgcgcccagaaccgcccctaattgcgtggactgtcgatgccactgctcatcccgcacattaccggtgtacatgattcgcagcgtaccatgcgtcactaatgctgaaccggtgtaagcaccttgcgcatcgagttcgttatccggcaataaatcacccgggacccgccgccagttaaataagtctttggatacgacatgtgcccacgactttaaaccatgaaccggaccaaatggaaactgctggtaatatagatgccatttgccattaaagaaatttagactgcagggatcattgattaagcccgtgtccggttgaatatgcgtcttagttcgccactgacttgcagcaacctcagctttcaagctcgccacatactctggtgtccacgtcgaataaggctgataccgcttagccatattctcaattgagtccgtcatgtacttaccaccttgtgtttgaaataatacccttatcttatctgagttcgcggcattgtcaatggaagcgcaaacaatccgatgatccgggctgcttaatcattgattacgcacgaacgacccattatgccacgggtacgattaaaaatcaccatgaaccgcaccgctttttaaattcgcccagtttaaaagcgagccgaccaactttattcagcttaaaattcaacacaaaacccgcggccatcagctgcgggtctcagttttaccaatcggagggtaccaattggcaatcattattttggaggagtagaaatgaaaaagttgggttggggtttaggaatgagtgggtggctcatttctatgttgttaatactaccgacgaactttgaacattctgtgacggcaaatcgctctttgtgttaacaaggttttctgccctacctcatgacattgcgttccaccgccaaagttacttttccggtaaaaagtcgcgccgataatcgcggacatattgtgcaaacgtgattgccggccgcccaagcactttcggcaacgttgtgttcacttctttggcattccccatttgcgtgatcagatacagcatgaccatcacatttacataattcttcggcaagccgcgcgcaatcatggtgtggcgaaaatgcaatagacttggccgactatacgttatcgggacgcctaactcagccgtcatggttttagcgacctcggcatacgttagcgcctgatcgccggtaatcgccagcttttggccaatatattgcggatcacacaggacagttgctgccacggcaccgatatcgcgcgtatcaatgaaactcgtccgagcgcgtccagctggcacaaatagatcatggtgggccacaatgtcatggcgatgcgtggtattgaggttttgcataaaaaagcttggccgaataaatgtgtgtggcaacccgagtgcttcaatgcgtttttcaatcttatgatgcggggtcattggattgtgttcaacgcccagtaacgagacgaaaaccacctgcttaatcccatggcgcaccaaggcatcaagaaacggatacatgtccgttttgggttttgctaattgcggcgggcgcacgaagaaaaccttgtcgatggctgctaatgccgggtcaaacgttgcggcgtcaagaaaatcaaatttacgtaattgaaccggcaagtcccgtaaagttgcacgcgcatgagccggcgaatgcacagcagcaaaaagttgtacgtctgcacgtttggttaaagcttggatcagcggcagtccaatattgccggtcgccccgatcaccaatatattcgtcaagttgaatactcctccataaaagaaaagcacccctgaaggtaccttttcaaagctgttgtgtccataaattgttaattaaatttccggcactattcatacatataatcacgagtagccggcaagtccttaccagacggacccttactaatcagatattgcatgacgtcaatgttaccagcctcaaaactcgcagcggcggcttgcaggtaaacatcccacatgcgcgtaaattcataaccgaacttttgctgaatcggattacggtgattattgaagttcgtatcccaaatttcaagcgtccgctgataatggcggcgtaatggctccaagtcgtccaactgcataccggcatcgacaatatgggtcaaattttccgtcatccccggcacatagccatccgggaaaatgtacttattaatccaggcattcacggccccgccttgttgccgtgtaatcccatgaatcaaagccacgccatcatcttttagcaacttggcaatatctttaaagtacccttccagattttccttaccaacatgttcaaacatgccgactgaggtaatgtagtcaaacggttcccgatccaattcgcggtagtccatatacagaatttccgccacatcgcttaggtgttccgcttcaatccggtcagaaaccagcttgaactgttccttacttaaagtgatgccaaccacatgcaaatggtaggtcttggccgcgcgtaacataagcgtcccccacccacagccgatatccaataacgtccgacccggctgcggattcagtttgcgtaaaatgtgatcgattttatttaattgtgccgtttccagatcgtcatcccagttctcaaaataagcacaggaatacgtcagcgttggatccagccacagcttgtaaaagtcattacccaagtcatagtgcgaatgaatatcctgcttggacttacgctcggtgtggctttgcttaggcaacacacgcatgagtttgctgttacgcataaaactgtccgcgttggcataggccgccgcaattaattgctgcaacggccgcttaccaccaagcacctcaatgtcaccacgcatgtaggcctcacctaatgcaagcgaagcattctttagcagcaaacgcactgggatcgcttttttcattttaatcgtgatcgtcggctcgcctgttccatatgtttcttccgtgtggtcccaatactcaacacggaccggaatattgaaagagtgactgaacatggtatgataaaactttttttcgagcatgatgacctccgttttgaaaagttacaatcgtaattataaagctttttgaccaaagaaaaaacaccgccaatgaaatggacggtgtgttgccgctttcattaaaattttcggaagcgggcttgacgctgggtaaccagtgtctgcggatccaatgccataagggtcgccaactttggcttaacctcggctttgagtgcgctggggaagtcggtaccggtatctgtaattatccgatcacagacttttttagccaacaaatcccgcggggtcagttgcatgacttcagctgcttctttggcgcggctggcatctttccacaaaatcgctgcaaagccttctggtgacaagatgctgtacatgcttttatctgtcatccagacttcatcaccaaacgcaagcgcaagtgccccgcctgatccgccttcgccaaccaatattgccagaatcggtgtcggtaaatcggcgcacgtgacgagcaagtctgcaatcgctgccccttgcccatttgcctctgcttctttacctggataggcaccaggggtattaatcagcgtgacaatcggacgatgaaacttcgccgcctgtttcataagccgcaacgccttgcgataaccccaaggctcaggactgccaaaatgggtctgtaaccgttctgtcaaatcattgcctttgtcggtcgcaatcacagttacagcttggtcatccaaccaaccgatgccgccaatgacagccggatcatcatgactggaccgatcaccatgtaattcatgaaaattggcgactaagccgttgatgagttcgcgggtggtatagggacgtggtgcgcgcgccgcttgaacggtggcgtaggcggatgtttcttttttgggcatgccagggtacctccttgcttcgtgttggtgctggtggggatgtttttcgatactacaatgcgttcgcagtcgcggaaacctgcgtgtatgggcctctagcctaaatggccaaagaccggctggatcggaaatagccacttttgttgcggttgggggatgttctccgatgctgaaacgcgttcgcagtcgcagaaatctgcgtgtaaggacctctagcctaaatggccaaagaccggccatttaggctagaggccgcttacactccgatttctaagcgctcctgttcacgctctgtgcatttgtagcatatccccaatgtaactaacctgctcacttcttggaacaatggcgtcgatgaagccgctttggaggacggtttcggcgcgttggaagttttgcgggagtttttggttgatggtttgttcgatgacgcggcggccggcgaatccgatgaggctgtggggttcagctagtgtaatgtcgccttgcatggcaaagctggcagtgacgccgcccatggttggatcggtgagcacgctgatgaacaataagccggcattgctgtgattcttcacagccgcactgacttttgccatttgcatcagcgaatgaatgccttcttgcatccgcgcaccgccacttgcacagtatagaacgactggcaagtttgcttcagtggctttttcaaacaaacgtgtgatccgttcaccagtcacggttccgagtgaacccatcataaacttaggatccataataccgagaccgcatacctgtccgccgattttcgcctgaccggtccaaacgctgtcttctaaaccagacgcctgacgtcccgcggctagtttcttctcgtaacccggaaaatccagcgggtcggtcgtggttaaatccgcatcccattccgttgcatctgtcgctaccagggctaaccgttttttggccgtgatgcggaatccataatggcaatgcggacaaacctgagcatcgccgagactttcacgataactgccttgcttgcagtatggacattgaatccataagttttcaggcaaagccgcctcacgagcaagtgcttcttgggttagttgtggttggaacatgcagcatccttcctttcatcctgccattgtggcaaaaagtcacggttgagataagccgtatcagcttctccagccaataccttgggtgcctggaaaagtgccagtgcaaagtcgcggttggttttaaccccttgaacgtctaattccgttaacgcccggtgcattttagccaaggccgcttgtcgggtttggccatgaacgataatcttggcaatcatcgcatcatagtacgggctgattttatcgcctggcgccacgccggtatcgacgcgcaaacccagtccgccagtcggaaagcgtaattgttccagcgtcccgacatcgggcataaactgatgatctggatcttcggcattgagtcggcattcaattgcaacgcctgaaggttccggcgtggtcaactccacgtcttcgcctgccgcaatgcgcaattgtgcctgaaccaaatccacgccggtcaccatttccgtgatcggatgttcaacctgaatccgcgtattcatctccatgaaataaaaatgatgctgctgatccattaagaattcgatcgttccggcattaaggtaatcaacgccgtcagcaattgtttcggctaaatgcaacagcttagcccgttccggtgacgttaacaccgggcagggactttcttcgatcattttctgactgtgacgttgcaggctgcaatcacgctccggaaaaacgctcacgtgcccttgctgatcgcgcaatacctgaacctcaacgtgtttagccgggacaatcaccttttccaagtacatggtgggatcaccgaatgcggcttgggcttctgcctgcgccccggcaaattcggctgtcaggtcatcggcactcgccaatttacgaatacctttaccgccaccgccagcactggctttaagcatcagcggatagccaatcgcctgtgcagccgccaatgctgtatcgacatcctgaagcggccggctgccagggatcaccggcacaccaatatcaatcatcgtttgacgggcaacggctttatcacccatttgctcaatggcagtcggcttgggcccgatgaaggctaacccggcatcagtcaccaacttggcaaattcggcattttcggataagaaaccaaaacccgggtgcaccgcctccgcaccgcttaaaatggcggcactcacgacattgcgcatattcagataagaatcagttgcccgcggaccaccgatacaaatcgcttcatccgccagcaagacatgtaggctgtggcgatcggcgttcgaaaacaccgccaccgaggtgatgcccatttcccgcaacgtttgaatgatgcggaccgcaatctcgccacggttggcaacgagtacttttttgaacacagttccacttccttacacgagtctgaatcgggtcgatttaaccaattgcaaagacaagttcggcactgcaagccatatcttcgccgacgtaaaccttgccttttcctaagccggcattgtcgatcaatttctctaaagtgacctcgatgcgcaaaacatcgccggggcgtaccatgtgacggaacttagctttcttaatgccgccgagataagctgttttacctttaaagtctggcatcgaaagcaaagcaattgcccctgcttgcgccattgcttcaatctgcaagacgcccgggaaaatcgggttaccgggaaaatgcccctgaaaaatctgttcgttgatagaaacgttcttttgtgcaaccacagattcgccgggtttgagatccagtacccggtcaatcatcaacatgggatatcgatgtggcaaaatcgcctgaatttcttgtgcttcaagtgtctttttggtttcgagcatgaatgctatcctcctaaaacgtgtttatggagccggaatgcgactcggtttacgctttgtcttcttgtacgatgagcaacggctggtcgtattcaactaagctttcgttatcgactttaaccgctttaaccgtgccgctaacggtacttttaatctcattcatcattttcatagattcgatgatgcagacaacgtcaccttttttagcgtgatcgccgacttgaaagtacggatcagcgcctggtttaggagccagataaacgattccgaccagtggcgctttgaccgctgtgccttcatccgcttgcggcttgtccggtaccggcgtgacgggtgtcgctgccgtattttccggagccggggtcgcaggtgcaggcgcggcagcagggcttgctttgaccaaatgtagcgagtcgttaccaagcgtcagttccagctcgtgcagcgaactttgctccaactgtttgatcaaaacttcgatcattttggtgtccatgacactcaccaccttttgaaggccaaaacggcattatgaccgccaaagccaaaggagttgctcaatgcatagtcgactgatgtatcacgattgtcgcgattaaccagcgtgaccgggcaatcctcgtcttgagccgcatccaccacattcattggcaaccggccgctttgtaaggcacttagcgtcatgatcgcttcgatggcaccagcagcacccagcagatgccctgtcagtgccttggttgagctaaccaacacatcgtcaccgaaaagatcatggatggctttactttccatcgcgtcattggctttggttgctgtcccatgggcattaatgtagccgacttcacttggcttaattccggcttcttcaacggccaattgcatcgcacgtgccgcctgagagccacttggatcgggcgccgtcatatgataggcatcactggtggcaccatagccaaccacttcacctaaaatcttggcgccgcgtttttgtgcatgctctaggctttcgagaatcaatgcaccgccgccttcgcccaaaacgaaaccattccggtcagccgcaaatggcaggctggccttggttggatcggtatttttggacaatgcggaaagcgcagcaaaaccggcaattccgatttcgttaactgaagcttcggcgccgcctgtaatcacaacatcggctttacaggtttgaatccgcatcgctgcttcaccaatcgcattcgtagctgaagcacatgccgttacgacaacatagctggggccatgcgtaccaaagtaatgggaaattgtccctgcgaccatgttactgatggcttccggcacgaacagcggactcacgcgatccgggccttttacatacatcttcgtcacttgttcctgaatggttgtcaaaccaccaatcccggaaccgaaaataacgcccactcgatctgaatcgaccgcatcttcagttagaccggattgttcatatgcttcaatggcactatagagaccatattgggtaaacagatccatccgtttacttaggcgtttgctcatccgttcttcgggtttgaaatctttgacttcaccagcgactgtgattccggttttttcagcatcaaacttggtgattggctggatgccgaccttgccagcgtccattgtcgccacagtttcggcgactgaatggcccagcggattcacagtacccattccggttacgactactcgttgcaatgtcattcctccgttcatgtacttaacctaatccgccggcgacagtcactgtctgaccggttatgtaggcattttcgaccagaaaacgggccgtgtgggcaatttcttcaggttgaccgaaccgcttcaacggaatctccgctagaatctggtcctgactggattggctcaaggcagcggtcatatcggtggcgatcatccctggggcaatggcattaacgcgcacgccacgcatagccccttcacgagctagcgtcttagtcagcccgatgatgcctgctttacttgccgcataattggcttgaccgatattaccggtcaaaccgaccacactggccagattgatgatgacgccagcgcgcgcctttagcattttcttaaaggccggttgggtaacataaaaggtgccatccaagttaacctgaacgaccttggcaaaagaagcgggtttcatgcgcatcgccaacatatcgtcggtaatgccggcattattgaccaacacatccacgctgccaaactggtccaaggcagcggcgaccaattgatcaccggttgtgggatcatccacactgcccagcacggtcacaacaccgtggccatagtcttctaattctttgatcaaagtttccggaaattcatgccgcgcattcaagaccaagttggcccctgcttgcgcaaaatttctggcaatcgcttcaccgatacctcgtgaggcacctgtgatgatcgcggttttatcagttagtttcaatctgccttcactccgttattcaaatcggctacctcattgagacttgctgcatcacgaatcaggtaggttgtcatcttgcggtcaatgcgtttaatcattttactaagtaccggtttcgggcctaattcaacaatcgtatcaacgccttgtgctttcagttgtgcgatcacggcagcaaacttcgtcggttcggctacttgtgccgccaataccggccggatgttgctagctgaaaacggcttaagtgccgtcgtactaatgaccggaatcactggttcaaagacatgagccgctgccagtgccgcttgtaatgacggttgtgcacttgccattaacggactatgaaagcccccggcaacctgcaaaggaatggcgcggacaccttggtctgtcaaccacttttcaaccgttgccaagtcatcatgtgtccctgccaaaaccgtttgcttcgggccattgtaattagccggccaaacatgttctgcctgctgacaagctgttttgatgatggtctcatcgccgctcatcaccgccagcataccgcctggttgttcttgacacgcggcggccatcgctttaccacgggctgcaacgagctcaagtcctgattctaagctcaacccgccacctgcgattaatgcgctatattcgcccagactcaagccggctaaagcagcttccggcggcaactctgctgaggcaacctcatgcatggccacactataagcaactaaggccggctgtaggtaatccggatgggccgcaaaatcaccgttagccaaaaactctggcaagtcaaagtccaaaacggcatcggcacgatcaataatctctttgaatatcaaagtattctggtaaaaatcaatccccattccggggacctcggcaccttggccgttaaacacataagcaaattgcaaaaagtggtacctccttgcctgcgtttgggttacgcttgcacgtcaacctgactagtgagcaaagccgccattttcgagccggcgacaatttcttttgcctgctgcatgacttcttcaacaatgtccttgctgctttcttcgcgttttactaatccggcaatttcgcctgccataaacgatccatggtcgcgatcgccttctagaacggctttacgcaaactgccattacctaattcttccaccgctgtaaaatcagtggtgccagaaagcgcaatttctttttccagtttgagataattgcggctcatcgggttcttcaagacgcgggctgcatgaccgacatacataccggtaacaagggtatcaacgtcttttgctttaatcacagcgtctttgtaattttgatgaatgcggcttgaggttgaggttaaaaagcgggtccccatttggacaccaactgcacctaaactaagcgcagccgcaacgccgcgaccatcgccaataccgccagctgcaacgaccggaatatcaacggcatcaactacttgcggcactagggccatcgtggtgatactgccgatatgaccaccggattccatgccttcagcgatcacaccatcaacgccgtcacgagccatgcgcttagccatcgcaactgacggcacaaccggcatgaccacggtgccgttttgttggagtcgttcaagataacggctaggatcgccggcgccggttgttaccaaggcaactttggcatcaacaatcacatcaatcacctgttcgacaaacggtgacagtaacatcacgttcacgccgaatgctttatcggtcattgattttgcaacttcgatctgttctttaacccatgaagcaggtgcatgaccggagccaatgataccaagaccgccagcttcagaaaccgacgcagctaatttgccgtcagcgacccacgccatgccgccttgaaaaagcggatatttaacgcctaaacgttccattaatggactcattggcccactcctctccagtgtcttaagcttcagccttttcagtgatgaacgtaaccaaatctgaaaccgtttcgatgctttcgtcagtatcgatcttaacgtcgaattcgtcttcgatttcgttgatgatttcgaaaatgtccaaactatctgcatccagatcgttcttgaagttcgtggtcaaggttacttcttcaggcttcttgtccaactggtcagcaataatactttgtaccttaggcaatacttcttcgttagtcatgtttatatgttctcctttgagtgttaagttttgaccgtttcattggtctgtcaattgtaaccgttaattagtaagtcatgataagtgagccaacagacaagccgccgccaaaaccgctaagcactattttctggccgcgttttaactgcccgctttctgccaactgtgccaacagaatcggaacgctggctgcgctggtgttaccatactcatcaatattgatcgggaattttgcttccgcgacttttagctttttattcactgattgaacaatgcgcgcattcgcttgatgaagcaaaaaccagtcaatgtcatctgttgtcaggttagcttgttccaaagcccgattgatcgagcgtggtacttcgctaatggcaaactggtaaaccgcgcgcccattcattttgaaatatggcgacggttgcgcttgtgcatcggcaaaggggctttgatttgcttgctccccagccaacaacaccatctcagtatcaccgaaactctttaaatcaactgcttgaaccggggcgccttgatcactaaccaaaacgccgccagctccatcagcgaacaaaactgctgtgcgccgatcatgccaatcaactaaccgggaaaggacttcactcccgatcaccagtccttgatgaacggtgggactggtcatcagccgatcagcgacatgcagcgcatattcaaaaccggcgcaagcaacattgagattaaacgcaaatgcgtgattcgcatttaaagctgcttgcaggcgattagcctcggccggggtggcatagtccgggctcatggtcgccacgatgatgaaatcgagctgatcggcggtgaccgtcgatttttctaacaattgttgggcgacatcataggctaaatcaaaattacgctggtcagtgaccacatgccgggttttaatccccgtgcgttctctgatccattcatccgatgtgtccataaattctcgtaactgctcgttttcaatgcgcgtggctggcaccgagtaagcactggccagaatctccaagacggggccttctttctaatgacgatattcgtcaataaattcattgagattatctagcgcgcgttcgattagctcgatttgcggttcggtaaatcccttaacaaaactggcaaccattttttggtgaaaagcaagatgcgcccgatacatgagtcgtcctttgcggctgagtcgtaggttcacaacccgtttatccgactctagatgcaaccgttcaacataacctttgcgcgccagattgttaatggcgacgcttaaagtgccttgggtcacatgcagcttcttggcaacatcactggagctaggggtcgcatgaataccaatcgcatcaatggtatgcatttctttaatgtctaaatcccggaactgacttttacgtagttcctcttcttccattcgtaaaatatccgaataaacgcgaatgagcttatcgtttatccgcttgacgcttggcttttgggacattggtgtgcctccgtgtacaactgatttgatactcaaagtatcagttgaaaaaaaaagcctgtcaagtggactaagcatttgcttctaccacaaaatgcaattctgcgtggcagacgagctcttcaccgatactggcggtcgttgtgaccacccccatattcgcccgaaccttacccatcttgactgccagtgtcaggacactgccggttggaacgggtttaaggaattctgttttgccgatacttgccagataagcagttttgccagcaaacttcggtgacttcagaatcaaaatcgatgctgcctgcgctagcgtttcaatgatcagcgttggcggcatggttaactcaccgggtagatacgcaaccagatgatcttctgccacgctcacgtatttctctgcgacaatcgattcatccggtactaattcggtcacccgatcaatgtaaaagagcgggtaacgatttggaattagcgtttggatggttgaggtatccaaagttgtcatagcctcgcctcctctttgaccacggcttcagatggtgacagtcacgaaaatgtctacaaacagttgtatgatattttcgcgttaaatcgtcatcactggctgccggtttttgtccaaccagattaattggatgttcaaagcatatgcagaactgctttgattgtcaaacctttttcaggactattcattcgtgagaatattgacattcctgaatgaatgcggtctcagataatattgttaagggatttaagggttaccaaaaactgataaaatatgcagaaaatttatttattaaattttttctgtggccgacaaattgatgaatcaccgtggacctatttgacgaaaggcagttggattatcatggcgataaatggattcactttgaagctattaatatttgacgatgcgttttcggaccgatgttggcaatcttaaaaactcaatcaggcatactggcgtctaaccgcaccaactcttgcacatattaaaagcggccacccacttggggcagtcgctttttcgatttcgttcagttaaggcttttgttgttaatggcgactaacggcagcgcgtagttcactgtcttttagtttcagccgcacaatggttccgactttttccgggtcatctatccacggttcatggcccgcaccgttgatcgttgttaattcaccatgctggacaacagcggcgatctcctgacctaattcagggttggcaaatgggtcgttggttccccagattaaactcatgggtaccgttagctgccgtaagtaccgttccggcaagacgttggattcttttgaccgatacatgctgcgtaataacgacaaggtggttaattgataatgcggtaaatgtgtaaacgcataaacacaatctgcaaagctttgcggcagtgcgctcacggcggccggatctgtccccatgcgatgaagcggtccccaggcgcgcttggctgatttcgggatctggcgtttcataaaccagcgactcaagaccggatttaaggccgccttcaatggtgctggcgtactggttatcagcatccggcccggattgcctagcataatgagctgatccactcgttccggataaggcagtgcaaaccaggttgcccagtgtgcggccagcgagtgggcaataatcggcactgttttcaaatcaagctgatccatgacttggccgatcaattcaaccgcaaagtcatgcaccttgacctgttcataatcaaagccgtcacttaacccactgcctggtagtgcgagcacaaataaatgataaccggctaattgcggcaacaatggcgccaattcatacggatcgccggtattgccagggatcatgagtaccggatccccgtgaccaaattctaagacgcggacacgcaaatttgcttctgctgactccgtgggtgcgattttaagccaccgcgttttcggttttaagtgaaaatcaagccaaagttgattctccgcattacgcgccgcctgaaaagcaaccgaatcatgttcaagaatgggttgcgtcaccaatcaattcctccttttttaatcctgtcctccagttagcgactaatctaagctgtcaaaccattcgtcatggaagcttgataaatcgctttgacgtcttcttcagataatggcacatacgcgcgggtttccagactggcattggccacagccgctgttgccatcgcgtcaaaatgcgcttcatcggcaattccgacttccggtaaggtcatcgggaagcctaaatgctgaatccagtcaaacgttgcgtcaattgctgcttgggcaaccgcgtatgtttcgtctccttcaaggtcccaaacatgccgtccgaatcgcgcaaatatttccgcggtggtcggatctttggtcaaaataaactccatccagcgcggtgtcaaaatgccgagaccaacgccgtgcgtaatgtcatagtaggctgataactcatgctccaaactgtgaaccgtccaaccattttcgttggccacgctcacaagaccattcaatgccatggtcgcactccacatcaagttggcgcgggcatccgagttatgcggctctttaacggcgatcggtgcccacttaataacagtacgcattaggccttccatcattcctttgctggcgtcattatttttcgaacggtcaaaatattgctcgatcaaatgactaaggatgtccattgaaccagccgccgtttgccgtactgggacagtataggtcaagctcgggtcaagaaacgaaatggcgggggtattcgggccagtggtacccaacttttcatgggttgccggattagaaatcacggagccgctgttcatttcactacctgttgccgccaacgttaaaatatcaacaaccggtacctgctgcaacttgtgccgcattatcccgcgatccttcaccaagtcccacgggtcaccgtcatagaatttggcactggcaatgactttagcagcgtcaatcaccgaaccgccgccaactgcaagcaccacgtcaatatcgtgttgctttgccaactgttgaccttcacgaatcgaggcaatttttgggttgggctcaataccagccagttcggtaacgtctaagtctgctaaaagccccttaacggtatcatacaagccggactttttgatggaatgaccgccataaacgaaaagaacacgtgaaccaaagcgactcacggcatcatgtaactcagtatcaagccggccggtaccaaagcgaatatcggtggcgttttgaaatcgaaaatttttcacagtgccatctcctatcatataatgtcaacttaattgtaccgttgttggcattaaaaaagaaaccggattcgtgccgaacacgggcatactgtcctcggcttaatttcaagatagccaatacaccaagccaaatttatgcgaaccatgctgcaaagaaacaatgaccctgatttgtaagcgaaatgccgatttttgcattcttatgttgttcgaaagccaaaaatacggcaaaaggaatgagtgacacctccccttgccgtacttgattcaatggtgcaacaaagtccaatgactgttacacccctaatattgccactgagtcattcttaatgtgctggttcaactggtaggttcatcccttgccatccttccaacgcacctgccaactcgaaagccttaaacccatgcgaaagcaaaatcaacaaggcttgtttgcccaaagtagtaccgccagtccagtcatacaccacataggttttttgctggtcgagttggtccaatttagtgacaagatcttttgccggcatggcgcgggcacctttgatttgtacctttttggcttgcgtcggtgcattacgaacatccagaacttcatatgtttggtcaccagcctgtaacgcatgaagaactgtgaagtgatcaatgtaaagacttaagtaggtttttaaaaaatcaattttagcttgttccatcatgatgtgcccctttctgagggtatatgggttacttggtcccgagcagtaatttatcgagtaatcggttgagttgtatttgttcatcgtgggttaggttggcaaagagccggttaaccgtttgataattcaccggtaaaaaccgatcaagtaacgttgccccttctgtggtcatctgaattaaagaagcgcgtttatcagctgcggtcgtcgtcttctcaaccaaaccacttgcgaccatgcctcgaactaatttactcgtggttgctttagttgccccgagcttttcagctaagaccgtaatacttaaagcttgcggttgttgatggtacaggaacattaggatcaaaaagcgtgattccgacaacccaaactgatccagaacctgttgatagtcattggcaaccgctctgaagcaagtgcgaaaattcagaaaagtcaagactgattgggtatcaacatcgggataaactttgcgcattaggtcaagccgatgttcatccgggcgatcagtaaagtcaaaattcaaaagtcatcctcctcatgttgttagccggctaataacatgagtatgtaactcattctcacgcgtgtcaagcaatgttttatcgaaaaatgggtttatacaattgttattcgatgatgactttgaaaatgcttagtcgtgatgcgaagacagggtatttatatcagctatcggttgtgagcacagagcacgactttctactctggaggatttgcaagtttgatcttactctctataacgtgttcgtcagtccagcattctgcgcttaaaggccttaagcgcagtgaccaaaccccggcaggccgcttacactccaattgctaaccgcgccggctcgcgctcacaccaaaaaagcccgatcatcatcgggcttaggatgctgctctgaaactaatgactaactttgacggcataaacaacgcgaatcggggttgagcggactcgcagtagacgtgctgcctcttggttgccatggctggcgcggatacatagcatgcgtcgggcctgtttagcgactaacagggttggaaaatcttttggaaatagtaaagcgaacaacgcttcgttcgttgcgccaatcaatgataagggacacctttctgcttgctgtaatttgtgcatagtgtagcatgtttcttctcaggcgccaagagaatcttgaatgttttcgttattttaatctaaatgttactttagccatccgccaatcatgaaattgggttgaacacagaatttttcagaacccttacctctgtatgtaaagacgaataagctggggttcgcacggaccatcaagttcattgcaaagcggttaacaatcgttccaaggtgacggtaagcgcttcaggatctttaacattggtggcgaaagctttttccagcacctgaaacagctcatggacttccgcagccgccgcttgtccatcagccgtcaaaaaaagttgccgctcgcggtcactgtgcggcgccatccgtttttctagcagaccttgttgaattagccgcttgatcaggttagaaacactcgccgggccacgacttagatccacgctgatctggcgctgattcgtaccgggatgtgcagcgacaaaagtcaacaccttagcctgatcgctatttaagttgagtgtgccgagatgttgattaagaaaatatttttgtaatttagccagctgataaatcaagccggaaatgtttgtttcggtttgcatgtcgaacctccatacccattagcatacacgtttgacttgcaaacacaacagtttcgttagcgtcttttctctgaatcccaatagcaaaccgcgtcacaattgaaggacatccaaaaagacgcctgccacaatctcattgtatacagacgcccttgtcttcttggcgcgattaatcatcgctgtctttaataagctcccatttgcctgaatcatcatcgtatttgctcatttggtcatgaatctcatcgtagcggtatttattgtacagttcgccactatctttgtcgtaaacatcgacttctttcatgttaaccgctggcgatgtgacttccacgcggtaatcgtcaagatcaaaatcatccagatcggcggccattttggcaacatcgcggttacttagatcgccgctgctgctgttgtcggtctcatctgagttatcgcgactttctgcacgtgacgcgctggcattagcgagtgattcactggcggcttcttgagacgctgccagtgagctaaatgctgctgcctgcgatgcggacgccgaggctgaagcaattgaggctgaggaggcacttgctgctaaagcactggccgaactcgaggcggcttcttgcgtctgctgactgcgattttgaaaatataagacaccgcccacaatgacaaccgcagcgagtaatgctagcgtcacaattagccatggtcgtttcgggtggttgggggatccgccactggtttgtcggcgacgggtcaccggtggcacgctgcctgattgtggtcctgacgccgatgctgagctcgtctgaccgccaacattttcctgctgattagctagcgcagcattctgattttctaatcgataggccttaagattgaaaccgcaattgtgacaatatgcttcgtcagcgctaacctgaacgccgcaatgtggacaaaattccatttctacttcctccgtttttgatatttggtatcttactaccctgtcatatcaacgattgaacgccaagctagcactgacgatcgcaagctgtatgcgctactcacttatttttttaggaaccggcagctgtcgcaacagccattgataagcttcaggtaggatctgttgccaataagtaaaaccgtgcgccccagcagcgctccagtgcgtagtcggatttaccccggcagccgtgagttgatcggaaaactggctaacatcctgaaatgataccgttgtatctgcctgaccggaagcgaggaaaacgtgcaacccggcagtgcgatcacctgtcaacattttagccggcgcttctgcttcccactgtgcctgattccattgtccggcacgcaaaaatgctggcatccgtggccgcgcagcttcaggaacttgttgccagacagccggtgacagtgctgcaaccgtgcgaaatgctgtcggaaccgctaacgccagatgcagtgcgccataaccgcccatcgacatgccgccgaccgcatgggcatccgcctggggcaatatggcaacttgctgctgcaaatgcggcaataaatcctgcacgatcgctgtctgcattttttctgctggcgaatcaacgtaaaaactattgccgccatcaatgaaaaccacgactgcgggatgcttagtggctgtcaccgcttgatctaacatggtttttgaatcaaccaacttcaccagattggttgcatcaccatccatcccgtgcagcatcaagataagcggatactggcgtgatgaggtatagccagccggaagatacgtgaaatagcgccaggaacgattcagcgtcggcgaaaagaaacttgactcattgagactgctagccgcttgtggtgacgtgacactcgactcagatgaagttgatgcgctgatagtgctgcggttaacgattttggaagcagacgccgatgtcatctgccgtggcgttgacgttgaagattgacccgattttgaaggtgcccaagatggacccccccagatcaaaaatacgaccgcgatcatcaaagcagtgattaaaataccaaagattcgcttacgccgttgcatggttgtgcaccttaacccaagccaatacgttcctttgtttcggtttcaaacccttaccccataactgcctcttgtgaaggacttctttatcgtacaacactcaacaccaatacagaacatattttattttatcgcaacaaacgttcagttgcgaaacgcgtcaatcacgtcgcaaaagccgtgccgtgacgaccatcactaatgcagcaactatcccgacaacataaccaataccaggattgagcaacccttgaatttgattcgttccgctgctcattaacggtgcataggcaacatataaagccgcataccctaataatcctaacatcccgccaagtcgcatcatgccgcgcgcccggaaaagcccaaacactaatcctaaagctggccccacacctgccaacgctagcgctacataaggcagattaacctttgccgcacccactgtcccagtggtagcagccgtcgtttcggccaatgtactggcactgcgaaccaagtcatacaaactgccgcccaccgttgtcgtaccaaccccgctcgctccaaaaggccaagcataagcggcaattagggcaagaaacgcggccgctaaataaaccagccagatcaagctgccgcgccgatgtgattttccggcaaattgcagccaccaacgcgacgaaccgccactttgggaattaggtgaaaaatttggctgacgattaggcgtcgaatacggaggcacctgactagcttgtccagatgaaggcatcgtccaaatatcatcatcatcggactgatcgctacgattccgcggctggtaaggtgccaccggtcgccggttcgccacgacataaaccgccaccgcactggcaactgcaagcacccaaccgatcaagaccgaaaagctaaagacacaaaataacaccatgacgccaattaacgtatacacaatgtgaacagccagccaatcaagaaaatgctgaaagctgtcgtcagttaagtctaggcttttcttaccggccggcgtctgactttgacgtcgccgagagcgctcaccaactgttggctccttgtcagcaatcgaatcttgcggctccgcttgtttagtcggtcggctttgcgtggattgtgccgctgtttgtgccgcaatttgggcatcaaaacgcaccaaatccatgccgcaatttggacagaacttaacgcctgccggtattttaaaaccgcaatttggacagtaccgcatctttccagccaaatcggtttccctcccatttttgttgtttaaatccatcttgcctgcttccgccaaaatagtaaagtttctgccaactttttaacgaaaagcaagcgattttgcaaaccatgaatggcatagtcagcagtcatcttgccgctgaatttttgtgaaaatgaacattggctgcttccaccctcacttacttatgatcgttccgaaacaaaaggaactgggacacaattctatctcaggatgtgatgcttactaaagtccgaatactttaatagaatgggtcattaaaacagttccgggccgtgccaaactccgcaatctccggccagatggggtggcgacgcgaagctagagcggagacggcgcttggagcctgcaagcccggcagtctccaagtcgcctaacaacatacccccgcgacaaaaaccggtcgctgtgttgtttccacggctgagccccatctggcctacgattgctccgccttggcactaaagtccttaaagtctatttacactaatgtaaggaatctaaaaagcaaaccatttctcgattttagcgagaaacgattcgcttttattttgaagctgtgaattgttgctcagcctctttaagttactagcttattctagattaagtcagtgcatccgctacttttaagcttttcaagcggaagcgccatcttcacgacaaccgcttaaaaatggcggtcgaagccatggggaccacctgccccaaagctgccagggtagccgcggcggggaccatgatgcccgtgatgaaagcgctccgcccacgcccgcatatcgtcaaactgttttccttctggccagctgagatcatcgcgattagccaaatccgccgttaatttttcaattaatttcaacaactcagcttgttcatcgtcagtcaaaccgctaaaaatttgatccggtaaatcggttttcagctttccggtggtttcaatgaatttgcggccatcgtcagtcaaagcaatgagttgaacccgtttatcggtttccgattcatggcggttaatcaggcccagttcttccagtttctgcaccaaagccgaaaccgagctagggcgaatgtctaaagcttcgactaaatccgagttcgtcagttcaccgtgctgatcgagtaagcgcaacaaacgcaattgattaggttgccgctgctgatcaccaaaacgcaggctgctggcgatggcccccataaatggccgcttttggagtaattgcccgaatgcttttaataatgcttctgaagtttgtgtcatcacacttctccttttgaatacgaggtttttaaaagttagttttgtttatatcagactaactgacattagtatagccatctatttagttagtgtcaattaagactaacataaaatcatcaagaaatttgagtgaccgcctcaaaacaacccctgagactgtcgaccacaagttccagcccaatgttgtaatgctcttcattgccactctggttccaaatgctagcaaaaagcccgcccctatcattcccgggcggactttactttattgaattgctaactttttaatgttgccgttccccatccagataagcgcgaacgcacgcaatcatgtcgcgtgattgcgtattgaataatggtggcaactgatcgaagttaaaatacttcaaggcaagcgtctcattcggatcagcttgctccaaaccgccacccactggctttaccagatatagtcggcagataatctgggcctgatcgccatttggatacgtggtaaaaccctgctcaaaagtgtgtaacggcttgacaggttcaaccagcaagccggcatcttccttcatttcccgtttcagcgtctcaacaaacgtctcgccatactccatcatgccaccgggtaaactccaatttcccgcgtctgtacgctgttgcagtaatatttgtccttggtcattgacgacagcacccgcaactgcatttagaaaaatcggcatatgcccgaccttgctgcggatgtcttttatataatttgccacttggttgcctcttttcttgatttcattacattgattattcaatagatgcttggcaagtgcaagcgactcatcacccggatcaagatttcgcacacagttgctggagccaaaaactgacccgattttctataaaaaattctaagcaacaccatacaaaaacgaccatcaccctcaagcgtcttatcaacgctcaagggatggtcgtcttttcaattatgcaaatgagttagcggatcattagtccaacttggtcttgctgttaacgttcaacttttcatcaaagtcataaacaaccggttcgccagttgccatttccaagttcatgatgtcagcatcggaaatgttttcgatgtacttggtcaaggcacgcagagagttaccatgtgcggcaataacaacattcttgccgtccaacagatctggtgcgatgtggtcttcccagaatgggataacccgttccagcgtcactttcaggttttcgccgccaggaatgatccgcggatcaaggtcggcataacgacgatccttagcagcagagccttcgtcagttgccttcaacaatggtggcaaaacgtcgtacgaacggcgccagatgtgaacttgatcggcaccgtatttgtcagccgtttccttcttgttcaaaccttgcaatgcgccatagtgacgttcgtttaggcgccaggttttcatttctggaatccacaattggccggattcttccaagacgtagtgcagggtcttgatcgcacgggtcaaaactgaggtgtaagcttggtcgaattcaagaccagcctgcttaattaattcaccggcatgctttgcttcttcgacacccttttcactcagatcaacatctacccagccagtgaactggttggacaggttccattcactttgtccgtgacggatcaatactaatttcgccatatcagagaatacctcgcttttatgatttgacagtcttctgcctgtttacagaatctcatgttacaccattttcagtaagttcgcacccgctttctctggtatattggaaacatagcaaaaagaaaaggtttaacaacgtttgtaattggtgcatcagttacgacacacggtgcgatgtcatcggtagcaaccttgtcagtacagggtgccgctgcgcatcggattaatgtcccttatgacttatgtgctcagtaatttggaggttctcgtgaaaaaaatttggctcacaattggtggtatatggttgatcagtgtcatttattttttgatttatatcaacttaccggcgatgcaactggcagtgaatgaaaacggctttttatcgttggttcatggcatcatggatctgatcttacttggcggtacgtttgccttagttgcaggaggcctttatcgtttatttcatcggcggtaagaaatttcccgtcattttagtcagtattgtgtctgtcttttgttatgattaagtgacgattgtttttgaaaatggaactgggtttaactttggagggaatatcatgtttaaattatgtccaaattgtggggcacataacgcacccactgctaacttctgtacaaaatgcggtgcaaatctggcgggggtggccgccactcaaccgcaagctccggcaacccctgacacaaccaacggagaagccgataccgttagtgcgactagccaatcacctgtagcaaccgcaccaacggcagacgcaaaatctggagcagcaccggaaaccacgaaaccgatttccactcaaaccacccaagctgatacggccgccgattcacaagctgcccaaagctcggaaagctcagcggccgcaacgcaaactgcgccgactaccgacaatactgctaccgatgctccaaccagtcaggcccctcagccaacgccacagcctaatccaaccgttgaggctaccaagcagtatgcgggcagttactggcggtatttagtcgatagtattaagcatccggccagcattgagcgcacttatcatagttattttggactgaccagtctggcgattaccatcgttagtctggccttgacgattgctttgcgcgccggctcggctttttcatccttgcccggcagccttgccagttctgtcatgagtacatttttgaagttgctggtcttagttgcgattctggcgattggcgtgattgccatttattatctgggcgttcgcggcatattaggtgatcggcggcgacgttttctcgactttacgacagattatgcgttccactgtaattggatggtgttcttctccgtctttaccctgttaatgcagatattgggtctcatcaacgttggttcggcaatgttaatttcgttattattgaccatcagtcttagcctctttttcttagccggtccttatatgctatttacggctcagtcaactaatcatttcgacaagatttacgcccttctcatcgtcagtgtgctactagccattgtcttcatggtgattaccatgtttggtcttgccagcatcatgggtagcctttatcaaggactcaacgattttggccgctcgtttaattactaatacagctggctcaatcgcgtattaaccacctggaatgcttgtgccatcagtcagacgcataaggcactcgcgctaaaaaaacaagcaattgccgttcaacccaaaactggtcctaatgacatctatcttctgtcattaagaccggttttcatgttcccgcctgtttattccactaacgcttctaagttctgcgccagcgtcaccgtgtcggttgtcatcgtatgattaccaaacaacacaacgccgctggtcgcattagcacgaaaataagcaagggtactgaaactttccggattgtcgttgtacatgccttgcaataaacgctgatcgtccaaccacgctaccccgctggcatactgattactgtctgcataatgtgccgcgattaactgatgatagacttttttaggaataatcttcccggtttctgctgcaatgatcaccttggccaagtcggtcacgctcatgtagacactcccactgccaagtaaactcgacaaaagcgcctggcttaaatcatccggctggtacgattgatcatcttcgctcagataaccttgcgccactggcattttcgccgataacgcatcgaagttacgggtatgtgtgagttttaacggtgccagaatcgtttggtctaatgccgcagcgaaaggcttctttgtgactttgcgaataatccccgctaataacgcataattggcattagtataaataaagctatggtcgccggtggatcctagttgattcaaattccagtcgagcgcgtttttttctgatgtcagtatttgctccggtgtaagttcatccatttgaatgcccgagcgatgatccagcagctgccgaatggtaatgtcgcgactatgatcaatgtcgggataaaacttggctagcttagtggtgaatgacagccggtgatcggcaatcagtcgcccaatgacaagcgccgttaaatacttctctaccgaggccagcggaaacatcgtcgccccattattcgccaatttgcgcgtatgatctgcttcaccgacaccgcctgtataaacaatccggccttttttgatcaaggcaacactgcctctaaagtcggtcgcatcaatcagtttgcgaacatgccgccgcaactgtgcttggggaaccggtcgcgccgtaatcttactggcttgacgctgatgctggatccagcccatcgtcacgccgccagcgacgaccaaaacacctaacaccgccaaaatgatcagccaccggcgtttacgcgtcattttcatgatgctcctttggctgtgggacagtctcataagtcgaatgatgtgctttggttccggcaatctttttgacccctaagacatccaggaaaaaggtgaagatcggaatacctacgatcaagccccaggtcccaaagagtcgttctgccaccagcaacacgacaaaggtgaagaagacaggcaattgcgtgcggctactcataaacttaggattcaagacatatgcttctaacacatgaatcgccgcaatcatgatcaaaatggtgatgacatcttgccagccgccaactgtatagccgatgatcgtcaacggaatgagcgaaataatcgccccggcaaccggaataagcgataacaggaaaaccataatcgccagactcggaatattcggcattttcataaacaacagcgtaatcgtcgtaatcaccgtgttaaccaccgcgataaagatctgggcttccatgacaaccccgaacgtattgatgaatttcaaggcaaaataacgcagatctttaaagtaccaaccaaacggtgaatccaaaaacagttgcccaaatgccggtaagctatccaactcgatggtaaagaagaaacttaaaataaacgacaacaccaacgtcaagcccatcgcaccaatgttaccggcatattcaagaaccgttgacaggccagtcttaagttgttcggtgaggttcaggctcttggtactctgcaaaacccactgcattacctggttgttggcaaaggcatcgctgttataaaaatcctgtaccgaattaaacagcgtgatcgtttggtgaataatggctggaacataatggaccgctgcatagatcaaccctaaaatcaccaatatgtaaacaggtacaacgatcacaaacggccgaacatgaacatggcgttgaaccgcgtgcactaagcgactgactagaaacgcaaaaataaaggtcaacaaaatgtcgctcataatgctacgggcaaaccacaaaaccaaaaaaaccgagaataaaaccactgtacgtcggactggcacattgttgataaacttttcgtacgctgacatcgtcttccccaccatccatttttcgctagttaaatcttagcgtgccgcaaaaataaaaaaagtgcaagcattcgccagcacttgttcaaattataagaaaattttcagattcttttgatttgctttcttgaccgactgaagttctccttgcacaatgatccgatccacttcgccttctgtcggtgacgcacatgtgactaaggtgatcagtttcttccctgccacatcatcgatccattgcacctgggtttcgttaacaatctgtttcgtggtcactttgtaagtgtaaactttcttcatattcgtaatcgcgactgtatcgccagtttggacatttttcaaaggtgaaaaaagaatcccttggttggtcatatagtggccggctaacgcataattgccttcacccatcttctgatcagccttcatcgtcccggcgccggcactcaggttatcatttgacagccccttgagaatcggcaacttcagatgaacgctggtaatggcaatcttaccaatcggatgcaggttacgggtcaacgcggcattcccgaccgtgttgatatcaagcgctttaacacctttaaaatcaaacgtggcacttcttttttcgttcttatcaactgtattgcgatcaatctgccccatcgtccattggcttaaatgatcaacgacaaacagcttaatcggttcgttgaaaaccagcgctaagcccagaaggacaccgagcgcaaaaatcgtccgccatagccagcgatgcttacgtggggactgttgtttacctgatttcgtcatcgttatcctccttgcaaagagcataccttgaaacccactgagattcaagcaggcccatgacacccaagtctcagcctttcgctaacaaattgtaagtcaattaggcggataaacgcaagtcaacagctcagtcgtttttttagctgcgcactgacaaggggttatcgttaatgtcagtctcgcatgaaccttataaaaagcatctcactaccactcagcttgcatggtatactgacaccattcgtgcgcagccaaacactgcattgcatcaaactcaaagctaggagagatttaacctttgaaaacgctgattcatctatataaacgctacgaaatgatcatcaactacttatttatcggtggactcaccaccttgatcaatttcgtcaccttttttgtgatgcgctattttgatattggcttggtcttaaccaacacgaccgctaacattgtcagtgtcatttttgcattcttcgccaacaaaagtgtcgtcttccacagtgactattcaagcaaaaagaaattctggttcgagctaaccagttttctaatcctccgtggcgtttcactgttgctggataacttcattatgattgtcggcgtggactggcttcacggcaacgagatcctggtcaaaattctggatcaaatcatcattgtcgtcgctaactacctgttctcaaaactgatctttgtccgcaaacggtagctatgcttatcgagttctagattgttaactaaaacgtgccccaaaagtaaaaaccgcttttggggcacgtttgcgttttcatcaatcaaattcaacccaccgaaacatgatgcgccgctagaaacgaactaaacggcaccaaattatcagcataataacgtttcttgaaggcagcaattgtagcggcatcgaaacgatccggatctaactgcagatgctcgaccgggattggccgctcattcgtaattttggcatcaataagtgttggcttgccagcgatgcgattggcctcggcttcatcaaacgcagccgcgagttccgaaaccttggtgacggtcaaaccggtcatgcccattcccttggcaaccgttgcaaaatcaattgctggcatatcaacgccaaaccattcgtgtccgtcatcttcttgctcatcttcaatataacctaatgcattatttgaaaaaacaacattgataatcggcaggtgataccgcacttctgtatccagatcctgcatgaccatcgccgcggcaccatcaccagcaagattgaacacttggcgctgaggaaaactcaactgtccggctaaggctgccggcaatcctgcacccatcgtggcgaacagtccgctggttgtccacgcttgccgaccattcactttcaacaagcgcacagcattttgggtgacatccccgacatcaatcgcaaaaattgcatcatcggtcgcaatgcggttgatctggccaaataccggctcaaagcgcatatcgccagtggtccgttgcatcatgtcatcattgtactgatgccaatttttgacgttatcgacattggcctgataccagccgctgctaggagcctcatcactgtgggcaatcattttcttcaaagttgcgggtgcatccgctaagattgccacatctgtgtgatgccgcttgcctaaggttttgggatcagcttcgatttgaataaacttggctttaggcgaaaacataacttccgcaaatggataattcgagccgacaaacatgatcaaatcggccacccgcaatgcttcattggccggtttcgatgcgacccgtgcagccgaacccaagagtgcttcaaaggcgtacggaataatcggcttgcccagcgctgtcgttatcactggcatctgtaactttttggctagcgtcatcaccgtatcagctgccccgcgaacgccttgaccgacatacatcaccggccgagacgcggtacgaatcaatcttagtgcctgatccacctgttcatcagtgccggccgctaaaatcggggtggcatgggtcgccgcggcactgtaatacccattcgccggaatcaactcggcggccaagtcgttaggaatcaccacaatcgccgcaccatgagcagcatatgcccgccgaatcgcctcatcaatgacatgcggtaaactctgcgctgtggtgacggtacgtgcatagacagccgcatcctgaaacattggatcttcatctaattcctgaaagaaatcagcattcataaaccgttgttccacttggcccactaagaacaaagtaggcactttatccattttggcatcgtaagcgccttggaaaagatgcgttgctccggggccagctgacccgaacgccaccccaatatgacccgtcagctttccatcggcgaccgctgccaaggccccgacttcttcatggcgcacatgaatatacttgatgcgcgacttttcctcatgcaacgcgtacatcatgttattaaatgtgccaccggggatgccgtaaatgtgcgtgacgccccaactctccaaagtttgtagcgctgcaaccccagctttaatcgtctcaaccatcataagtcccccttttatttaaaaaccggcaatctgaacctgccagttttggcgtgttattaaagctgcttccgcggttatactaggcacgaaaagatgagaaagcaaatcatctgcctatgtaaaaacgccaaggatatgatccgtcttcatgacgaaccgtaccctcagcgttttaatgatggttacttcaaatcttcaatgctattgatattcttcatatactttggaacggccaaaccgacccgagcgccatccatattcacgccaagatcaacaacctggttcttataatcggcgtataacttggcggcagtgtttggcaaccacgccgatacctgtgcatctgctgctttagtcgcaactgatgcccaaaccggctgcggctccatcgcgcgaatcgtcactttataacccatttgccgcaaaacggtcgccacaacgtttgtggaggcaatttccgaatcccaggcaatataggtcagggttaatttaggactaccgctaacatgactaacacccttagtccattgagcaatttgctccggatgtttcttcacgtatgcttttgcagctgcagcaggatcctggccattgttcaccgccaacatcacactagaaatttctttgggcgtccagtgaaattgatcaagcacctggtaggcttgcggagcatcttgcttaagccctttacgcacaatcgtatgaatctgttcggctttaccatagacattcttaggatccttcaaaaatttcaacggaaacttggtgaacatccagtgcggcgtccagccggtcaccacaatgggccgcttatcggcaatcgccttttgcagtgtactggtcatcgccgcggtcgagcttggttgcaactgccaattcttttcttccagtccgtatgccttcaaggccttatcggtactgctcatgatgccggcacctgcatcgattccggtaatcgtatagttaatttgcggccctagaggctttttggcatcgtacttaggttgggtactgctgcatgcggtcaaaaagccaaccgtggctaccatcgccagtgccgcaatgatttttttataaaaagtcaaacagccacctcctagcgcgtgcgattgagactttgggtaatccgatccagaatgattgccagaataacaatcgccaaaccggcaacaaacccgccgccagcgtcgttacgacccacagcaaagtaaaccttggtacctaggcccattgccccgatcatggatgcaattacgaccatggataaagccaacatcatactttgattaatgccggccataatggtgccgcgggcaaagggcagctgcactttgatcagctgctgccaactcgtagcaccaaatgcaacggctgcttcattcaagtcagctggtacctgttcaattcccaattgcgtcatccgaactgtcggcggcatcgcgaaaatgactgacgcaacaacgccgggaaccatcccgataccaaagaatgccacggcgggaatcaaataaacaaaggctggcatggtctgcataaagtccatcaacggcttgacaatcgccgaaacggttttactttcagcagcccagatacccagtggaatgccgatgacaattgccaacaagcttgcggtcagaaccaaggtcagcgtctgcgtcatatcgcgccaaaatcccagattccagattaacaacagccccactaattcgaaaatcagcaaactgcgatacttctgccctcgcttaaggtaccaagtcagcgccataattaagatgataaacagccaaatcggaatgaaatcaaagaccgcttgaaaggcattgacaatcgttccgataaagttcgtcagcacaccgaagaacccggcaaattgagtgagccagtccacgaaggaatcaatccaatgtgctaatggtaacgttgggatggtaactaaaagattaaacattgacattgacctcctgtcctgagagtgcgccaagaacggcaccgcgaatgataatcccgcgaagtcgtttctgatcatcgatgacagcatacggaactgaagtagtcgacacagcatccagcaggtcagctaacggcgtatccatttttgttgtcggtacgtcggtcttaacaatcgtggttaagtcctttttcccgctatcaatggccgcacgaacatcatcggcatccaagattcctactaattgtcgcttggtgttgacaacatacaagctggaaatctcgttgtcacgcatccgccgtgctgccaaacgcggaccatccttgtcgatattcacggtgttagcgcgaatcataacattagctgcggtataaacctgactccgatccacaccttcaatgaacttctcaacgtaatcatcagcaggttgactcagaatctcttctggcgtcccgatttgaacgatctcgccgtctttcataatcatgatgtgatcgccaatccgcaacgcttcattcagatcatgggatatgaaaacaatcgtcttgtgcatttcttcttgcagatccaacaattcgtcttgcatatcccgccgatttaacggatcaagcgcagaaaaggcctcgtccattaagagaatctcggcatcactggccaacgcgcgcgccaagccgacacgttgttgcatcccgccagataattgatcaggaaattgatcggcaaacccgtctaatcccactaaatcaagcgctttgttggctttagcttcacgttcggatttatccatcccctgaatttccaagccaaacgccgcgttttgtaaaacagttcggttaggcaatagcgcgaagccttgaaataccatgctcagcttttgccgccgcacttcacgcaggtgttgcttgtccaacttggcaatatcatcaccatcaatcagaacttgtccggcagtcggttcaattaaccgattcagcattcgcagtgtggttgatttacccgaaccagaaagccccatgataacgaagatttcaccttttttaatggtgaaatcagcttgatcaacacccacggttgcgcccgtagcctttagaatctcagccttggttttcccttgctttaacatttctttggcacgattgattcgtttgccaaaaatcttggttaaaccactcacttcgattttggtttcagcatcattttcaatcttgtgttgcatttgctcactcctctcaggccccttaacgaattaagatatcgccttggtgcccggtactttttaaaatcgctacttacctgatgttgcgattttgttctgtttcagaaacagttgtcatcgaattgaaacaatgctaaccattgtacgagtcatttgtgtgtgattcaaatcacggaatctcattttcattttcaagacacgctggcgttttcacttgctgaaaattttagccacaacaaaaaagccctcatcggcataggattgagggctagggacgattgatgacccgctaatcgtgcatcgtaatcgttgtcaagttaatatgaaaatatcatgaccgaattctcatatttcacaaactcgtcaggttcatttccgtaaatggcagatgctcgtcaaacaggatcggctggcccaaagtaataaaatccggacccgtcatcgtgtcataagccaagacgcgcacaccgttttgcttggcagttgtgattgcggtgacaagctctggaaaccgttcacgataaatcgtcatttgctgaatattgggtaactgcacaataaaaaccaaaaatgcctgatagcctgccgcttgggccattgtcagcgtgtgcacatgcttcagcgctcgcgtggtgggagcatcgggaaacgccgccaatgtttggttggctaatgtgacgcctttagtttcaacaaaccatgattggccatcagccgcagttcccgcaaaatcaagccgggaatcgcgccaggtggtctcgggacgaaccgcataaggcaaggataatccgggcaatttcatggtgccagcctccaagcattctctggcaacgtggttgggggctaagctgtctatattaatccaacgattctgccggtttaccgcaagcagatcatagtgcgtcttccggttgggatgattcacataacggacactggccagcgaacccggcactagaatttccttattccggccagtgttgttcatatgtaccgatgtcgtcacgccatcaatcgcaagttcaaccgtaaaccgactcacgcgccggatcagttgcccgacactgacattttgatactgcataaacgctcctcatttcgattttgcctgacaggtagcatagtgcttattaaccgcgctgccttatgctcataacgtgtttgctggcgcagggatttgcgtgtaaggaccttggttgcagtggccacttatgttctggtttacgcccataacgcgctccccggcgcagaagtctgcgtgtaaggacctcaggcgcaatggccaaagaccggccatcacgcctgaggccacttacactccgatccctaaacgcgccggctcgcgctcacacaaaaatagcagccgcggactttaatcaaatctcacggctgcttatttgaatcatagcactgacaattaacggacaataataacggataccgctgcatcgcgggctacttcgcttgcaacgtggcccagtcgcagacggccacgacgtacgtgtgaacccatgataaccaagtccggcttgaacgctggaataacctcgtcaagcagtgccgctgccggtcgaccttcagcgataatcggctgggccttctgcacgccaaactcacgggctttttcaacataagtattcaggttcttcgccattttttcccgtgctgcttcaacatcctcaggcgtcaatgactgaaaaatattcagatcgccggtttcaagcaccgatacaatccccagcggaatatcatagatcttggcaaccgtgcaggcgtagttcaatgccttgcgcgaggagtcgtcatcatcatcatcaatcgccaataacagccgattataatgtacggattcaatcgttaaatcattttcagtaaccaaaagaaatgcccccttgcaagtttaggtgtccctaacatgtttattttatcacacatcgcctttgttttccgcaaaatactgcttaaagcgaccaacataattatgaaacatatatttcagtaatagccagcgtttaagcgtcatatcgggtttgtaaaagaccgtcgtcccgtagcgcttttctttgatcaacttcaacgcttcccgcttggcctcgttgtcggcggagtattgcttgaagacccgttcaggcaccccaagccataatttgtacttgctgcgatcggaattgccataaacagtcggcgcatttttgagatcgccggtgatataatcgcgcaccggccagctggcaagattatagccattcagggtcacgaaaaagctgctacgaccctgccgaatattaatttcaaataacttaaacgtgttgtcgcggtgatcatacttcatatcaaagttagcaaaaccggtaaacttgatggcttcgagaaattctttgatttgatcatacaatgtctgatcaaaagccggcataatcgccacataattcccgatggacgctggtgtgggatcttcaagtagcggatgacccagacacatcattttgacatgatgatattggtccacataacaattcaacgtccgcatattgctgtcatcacccggtacaaagtcttgaagaattaagtcagatgtatacccattgtcataaatcttggcgatggtgttggtcaattcgacttgggaatgaatcgtgaatgcctttttacgcccttcaaagtggatattcaaccattccaccgaatcggtcggtttcagcgccactggaaattcaaatggcgccgtaattgtggcgttgctttcatacattgacttggtcacgatcttagtggctgggtaaggaagatggtattcttcacaaacctggtaaaagctttccttactgttaaggcgttttaaaagatcatagtcaacatatggacagataaaccactgacttaattcatctttatgtttggataccaattgtgcatatgtgtcaccgcacgcaattagcagcagacggccagccgaagccgcgtgcagatgcgcaacttcacgcattttttcgataaaagtcgggtcagaatcaaattgcttaatcagatggacatttacgattcgtgaaaagcgtgttggggccagctgttcacgcgcatagacatcaatcgccccgccgatcatctcgtggaacgaacgcgccataccatacacgttcatatcactgccaagcaggatgggggtaaaactaggtgtatctttcatctgaatgataatctcctcgttcgattaggtgcgggcaaaagaatgccgggtaccatgaaattttcattgaaagtgcagtggcaagttgtctcagcgggtccaaactgcactaataattttccctgagcggttggtcaaaatgaatattgccttcagctcgtcgccccagaattataccatactggcaatctgcattcatgaagatactaataggataacagtttttcaagatttagacgcaaaaacgccaagtgtcagggcttggcgttttttgatattgttcagctttctgaaacccgcaccccttctgtactcggctggacgatctgcacgcgccatgctggccattgttggctggcggctgcttgcaactggcgagcagccgctgctccctcaacgattgcaagcatggtcgatcctgaacccgagatcaacaaaacgccattggctgcggtaaccaattgacggacagcctgatagtccggaatcaatgtggcgcgataaggctcctgcatccgatcatgggccacttgatgtaaaagcggtaaatcaccatctgccaacgcccgcgtcattagaacacatcgtcccatctgataagcagcatctgcgtaagtcatcgttgtaggaaggatttttcgtgcttctgcagtgctcacagcataatcagggatgaatgtcactaactgcaactgtgagctgaccggatactggcgcacaatgggctctgcatctgccaaaatagtcgcacacagctgaccaaaaattgcaggggcagcattgtccggatgcccttccattttcgctgcaagcttcaaaagctgagtccgatcccagccggcatgaaaccacgcattcgccgcggcaattccgccaacaacacacgtggccgaacttcccaagccgcgcgaactaggaatgttcgaatcgaccgtaatccttaaatttggcactggttgatcaaccgctttggcaaatgtcacaaatgcctgataaatcaagttatgctcattggcaaagtcgggatcatccccaaaaatctcaagcttttgggtgctcgcttcgaaggtgaaccgagctttgagatcaagggctaatcctaaaacgtcataaccaacgcctaaattagcgcttgttgccggaacggacacgctgatcattgttaaaaacctcctttgcggctgcaatgatcgcctggcccatttcttccggcgccaccacgtgtttaggttgggcagtcaaagttgccaagcgcgctagattagcaggaatcggaacaccactcatttgatgcaactgggtcatcacagcaaagtcgtcacctgtcaccggcaagtcaagggcttgagcaaccgcgcgtggaaatttgtatggactagccgttgcgagtagcacattaggggtcgaatcaccggttgtctcccgatattgctgcatcacatggtagccgacagccgtgtgaggatccaacaaatagtcgttttgcttccaaaccgcagcaattgaagctgcaatctgtgcatctgcggcaaaaccgccagcaaaatcagcctgaatcgctgccaaaacatcgggccgtacctgatagcggccggttgtggccaattcttccattaatttagccacataactgctatcttcaccactcttatagtagagtagccgttccaagttactggaaatctgaatatccatacttggcgccaccgtctttaggaacggacgattgcgatcataaataccggtttcaagaaagtccgccagttcatggttggcgttggccgcggcaattagttgatgaatcggcaaccccattaacttcgcatagaaaccagctaggacatccccaaagttgccagttggaacagtgaaattaaccttttgacccagctcaatggcacctgattcaaccagttgcaagtaggcggaaaaataataaaccacctgaggaatcaaacgcccgatattaatcgaattggcggccgaaagcgttacttgttccgcctgcaaacgcgccgcaaaaccggtgtcggtaaagagatctttaacggcactctgcgcttgatcaaagttaccgccaattgggaaaacccgtgtgttattgccggttgtcgttaacatttgccgctcctgaatcggactaaccccatgatcaggataaaagacggtaatcccggtttgggcgacatttttgaacccttgcaacgccgcagtcccggtatcgccactggttgcggctaagatcatgatgcgatcttccggatccagtgccaggcgcatcagttgcggtagtagttgcaaccccaagtctttaaaggcgctggttgggccatgaaatagctctaaaacatgaaaatcacccacagaccgaacaggcgtcagccggcgatcagaaaaatttttatgatatgcaaattggatcgcctttttcagcgcagcagtgttaaaatcaggcaacagggtcgtgagaacattctgagcaatcgtttcataatctttacctaataaattttgaagattcaagcggtaatccgtcaaatgcggtaaaacaaataacccgccttcttcggagatgccttgcttgatcgcttgttgtccagtcttgctaacgcgctgatcccgtgtacttgtgtatcgcatgtgaacgactcctatctgatccgacttgtttttgcaataaggatatgataatctgttcgcattagaaaaacaagtgtctatattttatatacaaggagctgaagaaaatgaatattgccatcttaggttttggtactgtcggtagcggcgtttatgacatcgttgaaaatggtgatcgccgaatgcgggtcactgctattttcattcgcccaacccacccagctacgatgcctgagatgacaacaaatttcgatgctatccttgccgacccgactatcgatgttgtcgttgaggctattggcggcttgcatcctgcttatgattatatcctacgtgcactgcagcacggcaaacatgtggtgaccgccaataaagctgtcgttgcgcaacacctgcctgaattcatcacaacggcggctcagcatcacgttcgcttttattttgaagccactactggtggtggcattccctggattcgcaatttggaacgcgctgctcgcattgaccaaatcgataccatcgaaggcatctttaatggtacgagtaattatattttggatcaaatgcaacgggcgcatctcgattttgacccggttttgttggcagctaaagacatgggctatgccgaagccgatcccagtgcggatattgatggtgacgatgtggttaacaagctgaaaatttccgccgcactggcttacgatatggttccgccgcgtgatgttcctaaatttggcattcgtaatgtcaccaaagccgatattgactttttcgccagtcgtcaccaggttttacgcctaattggcaagagcagacgagttggtaaccattatagtatggtcgttgaaccgcgtctttatccggcgactgctttggcggccaacacgtttgaaaacttcaacctgatccgactgcacggccagaccattggcgatttgcagttttatggtcaaggcgccggtaaatatccgactgctaatgccattgttcaggatctattcgacattctggaaaatgccccgcatctgacgcggcactttaatcagaacttacaattcgatgcagatctgaatactgctgattacttgctgcgcgccgatccgctcacgtttgccatgtttaacgataaggacaccgaagtcgttcaggatcatcttttaatcaaacaaatcccgactggtgaaatgcatcggctcatgcgtggcgttttggcaattgatgctcatgccttcatggcagccattggcgatagtgaactgaccacccgtaacgtcaaagaacaagttgatcagggggtaatcgaatgaaagtcgttaaattcggcggcagttcggttgccgacgccgggcagtttcaaaaagtcaaagccattatcaaccaagacccgcagcgccaaatcgttgtcatcagtgcagccggtaaatatggcgatgcaacccgcaagttgaccgataccctttatctgattgcggatggactcgaagccggtcgtgatgtcaccccgctttttgctcaagtgacagcccgactggaagctatcaatcaggctctacatttgcatgtgccactcataaaactcatgaatacgattcgtcatcacatcgccactcattactcgcgcgattatctggtttcgcgtggtgagtttttaaccgcccacctgatggctgcctatttgggctataccttcgttgatgctgctgatctcctcttttttgatcaaaatggggcaatcgatgaagccaaaacattagcggcttatcggcggctaccgcgtcatcatgggatagttgttcccggattctacgggcaaaatgctgccggtcacgtacaactcatggcgcgcggcgggtctgacatttccggtgcgtggttggcgcggctggctcaagccgatctttacgaaaattggaccgatgtttccggaatcaaaatggccgatccgcgaattattcaagatgccgatagtattgatgtgatgagttatgatgaattgcgcgaattgacctatatgggcttcagtgtttttcaggaagaggctgtccagccagtgcgagaaagtggcattccaactcgcattcttaatacgaatgccccggaagatccgggcacattgattatccaagatgatgacccggcaaatgatatgcggatcattaccgggattgccggtcgcaagcattatctggtggtgacgattcggcaatatcaactggcattacatctcgatatcattcagcatgcactggacgtcattgctgatcatcatttggtcgttgattatctccccactggcattgacagttttagtctgttaattcgcgaaccacgccatcaggtttccgttcacgaactcacggcagcaattaaagcagcgtgtcagcctgataaacttgaggtcaccgagaatgttgcactcattgcgatggtttcccgaaagttacggcaacgaccggcaattgccggcaaggtcctcgcctatctagacgacaacctgctcaatgtccagcttgtcagccagaccaatgacgatatcaatttgttaattggcgtaaatgataaagactacgacaaagccatccgcgtgatttatagtagtattcatcaaaattttcaccgcccggcgccatacattgaaggcattgcttagtgtatcccgccgtgtattaatttctttagacatcaaccaaaaagtggctccgttgcgattttagaacaatcgcaaacggagccacttttttaattaaaagcaatcattctgaatttcactcatgactacttttgcttctcggccatgcgcgatggtgtacttgatgccgcttgctcggtagtggccggttgatcactatttggcgccggtgctggttgcttggtgtcaggtgccttggctgatggttgctcgtggtgcttgatcgcatcgacaaccggttgattgccagcctgatgcatcagtgcgccatttaacatcccgcgaatgtcgatgccggcaacttcttgcaacatgtctagttgcttgaccaaactgccgctggtttgattcgtcaggtcgccatcgccataaagcttgatcgaatcaacatttgcatacggactcatagcagcctcaataatcttcggcattgcttcaatcgtcatcttgaagcggccggattcatcaagttgccgtgctgcttccgcttgtttagcaatcgcttccgcttgtgcaagcccgatcgccttggtcttgccagcttctgcttccccaatcgccttggttgcatttgctttggcttcggcatccaattcaacctcttttgccgacgcttcagcggccgcaatctgggttgctttttgggcttcggcggcacgctgggctttatacaagtccgcatccgcttgtttacgcacggttgcattcagttcctgttcctgcaattcggcgttcttttgggctaattcaatgtctttttctttttgaacctgcttggccttcatctgttcaacaatcgcggcctgatcagcttgcgcctgagcaatttcttgctgctttttgaagtcagccatcttgacctgctgttcccgttcggcgtcagcaatttgggtctgacgttcgatttcctgctgctttgcttcctgatctgcttgcgcctgttgaattcgggtgtcacgattggcggctgcttcggctacagcggcgttcttcttaacttccgcaatctgcttcttacccagtgagtccagatagccgttcttgtcggcaatatctttgatcgtgaacgaaataatctgtaaacccattttggctaaatcggaactcgccacatcctggaccttttcggcaaaggcatcacgattctgataggtatcctcaaccgttaatgtgcccaaaattgcccgtaaatggccttccagaatttcggtggcttccgaattaatctgctcgtcatttttgcctaaaaattgttccgcagcggttgcgacttcttcctgactggagcctatttttaaaataaccgtcccgttgacgataatcggaaccccttgttgcgtgtagacttcaggcgttgcgacttcaatggtccgcgtatttagacttaaaacgtcccagcgctgcaaaatcggtaaaataaaagacccgccgttggtaatcaatttgacacgattgccattgacatcgcgaaaactgtgcttgccggaaatcaaggcaccggaaataatcagcacttcgttaggcaaagcggtcttacgatgggtggccagaaaaataaagagcaagatcaataaaacggccgcaataatccacggcatataatcagttaaaatttccatcagttccctccttagggttgtgagtagccaaggcatcaacataggcaataccttgtttgagttcaatgatcacgacttttgtgccctgatctagcggctggcttttatccgaccacaacttggccggatatgtctggcgggcgcgtccaccaccggttaccatgacttcgccagtgtgatgatgcgccacatctaacgtcagcgtaccgagtaagtaatcccgatcgctcattgatgtggtgttctcaaccggcgacagtagccgttgcaataacgccaataatggtaacaataccagtgataacaacatccataaaagaccgccaatgaccaatagcgccaccactccgacgatcacctgtaaccacagttcttgctgtgcccaccatgccaacacgacactcgcctcgctttcaaagggactaaaatcttcctcattttatcatgtaaacggttatacgcctataccaataagaaaaatatttagtggtgctttgcatgttgactgcggggccaacaccccgtctctatgtagtcccggtggcatgaagaagttactctttgtttgccaccgactaaagcttcaaaaatcacgtatattgcgtgaatgcttttcgacctgccattagtcgtaatgcaaggcatagtcttccgacacctgatagtgcagtgttttggtaaatagcaaattgctaagataagccagtccaatcggcaagatgaagaaaatgatcgtcaattcaagcacatttcccaccgtcaccgccttcattgcatcgagtgcagcgagtggcccgactaaaccagaaaagccaaatccggcactggcaggcgttccttgaatgtgcaatgcagcaccgataccaccaagaatgccggcattaagcgccatgggtaagaagagtttcggtttagacaaaatgttggccatttgcatcttcggcgagcccagaaaatgtgccagcgaggtcccaagcggattcgctttccagccataagccgccagcgcaaaacttgccccgacaatgccaaggttagcagatccggcaccgatgccgttcaacataatagccgtcgcaatccccactgtactgatcggcgtcacaatcaaaatggcaaagatgatccccatcaaaacgcccatcgcaatcggctgcaattcggtaatatcatggacaacaacgccaatatacttcgtgattccggaaaccggcttgagagtgagcatccccaccccacctgcaatcagcaatactaacgatggaatcagaagaatcgtgtacgccttgagcgcattgcccaacaatagaatgactaaatagccaatggcgagggtgatcgccaaattaatcacatccccggttccggcaacactcaagccggttttggtcagatgataattaccggcaccaataatggcagccagtgccagcgaacttgtttgaatcggcgtaaacttcgccagcatccccacgcacacagccgataacgccggtaacaaggtcatcgcggcggtcgtcatatacgtgacaacggccaactgtggaaagctaggtaaaagcaacttgacgagcgcatttaagatcgctccaggaaccaaggcaacaataatccccactgataaaccgtttaaaatgttcatcgtcacggtttttacatcttgtttcatcgtcttcctccgtttaattaacttggtgcggtgaatgcccaccggctaaaatagttttgacgtcatccaatgaaatatcgatcatgtttttcacggctgcatccgtataaaaaccgatatgcggagaaatctcaacgttcggcaaagcctttaaagtttcaagattggtattgtccacgccggattggctgcgatcaaccccaaaaataccggcttcaccttcaattgtgtccaaagcagcgccggcaatctcaccacgttgcagcgcctcaatcaaagcagccgtatcgacaatcggtccgcgggctgcattgatcaagtaagccgtctttttcatctttttgaaggcggcagcatcaagcatatgggtggtgatgtcgtccagcggtgtgtgcacggtgacgatatcggcagtggccagcaaggtgtcaagatcgacataacgaaccgtatccgccaattcaggtcgcgttaccggatcagccacgatgacggtagatcctaaggcgcgaaaaatgcgggcgacggtactgccgattttgccagcgccaatgatgccaatcgttaattgatgaacttcctgcgcttccagaccaccccagctataatcatctttggcttcgcgcgccgtagcctcacccaaatggcgaatcaatcgcatggcatgagccaaaaccagttccgcaaccgatcgcggcgagtatgcgggcacattggtcacggccaatccattggcagccgcagcatcgagattaacaatgtcatagccggtaatccgcaaagtcaactgcttcatcccgaatgacttcaacttctgataaacaagcggttctggaatggcgccatgctgttgaatgacaaccccatcgtagcccttagccagatcaaccgtatcagcattgaaggcaacggtattggtatcaacttgaatatcattagcagcaacccagtcatcaatcgctggttgttcgtctggtcgaacactatacattaaaattttcttcatcatcattctcctttgagcgcgttatcgtccaactgcaaacctgcctacctaatgcgttgccataaactgcttaatgcgctcagccgccagtttcaaatccgccatcgaggccgcatacgaaatccgcacataaccttcaccgcctggcccaaaactggcaccgggaatcacggcaacctttgcttcacgtgccaacgcataaacaaacttccagctgtcatggaaccggtctggcaacttagcaaaaatataaaatgcgccatccggatgaggaacttccaagccggcttccggtaaggccttcatcagaaaatcacgccgttttcgataggcttgcttcatcggctgactatcttccataccattttttaacgcctcttcagccgcgcgctgggcattggtggtgacgctggtaatcgtaaactcgctaaccttgccgatttgttgaataatcgcagccggacctgctgtgatcccaacgcgccagccggtcattgcgtgggattttgaaaccccgttaaggacaattgcttgatcagggagtatctcgcccatcgaaacatgcgtcccactgtaggtcaattctgagtaaatctcatcgcttaagacaaaaatttcatactgcttgatgacgttggctaatgcgctcagatccgcgcgattataagtcaccccagttggattagtcgggtagttaagaatcaccgctttaaccgtgtcccgattggcttcaatcgcctgttgtaatttctctggcttaagaatgaacccatccgccgaagtgtcgataaatattggttttgctccgtttaataacacgattgggatgtataaaggaaaaatcggagttgggataatcacggtatcgcctttgttcaacatagccgttaaactcgaataaataccgccagtggccccagctgtgatcaaaatctgcgtctccggatcataggaggttttatatttcgttgccagataatggcttgccgcagctcgtaatcccggcaagcctttgctctgggtataatggctctcatcattttcgattgattggatgcccgccgccttgacatgctccggcgtcggaaaatccggttcacctaatgtcagcttaacaatcccttcaataccgctaatttctgcattgaattgtaaaatatcgctcggtttgagttgccgaacctcgtgattcatacgatcgactaatgccatgtaaatccctccatctttttacatccagtaagttgaaactaaaataaaagccccgcagtcatcgattgaccgcggggcacgaaatgggaatgattctcctgattccagccacacagtcaattgcttgatctgtgtgaccgctcactcaaaggtaactggtctcacagatcgcgtctgaaaaaccagaaataaaatgattggctaccttgagtcagctttgtcatcatgatgagaacctcctaagaaatagattagttaaagactactggttaacggacggtttgtcaaccggaactgaactgatttttttgcgggacgaatttgccatttaggttcactacaatgggtcgccatcacgtcaccggcaagttactaactcactttttcagaggaaaatgaacgcattttggcaatggaatacgctacaatgaagacaatcaagaaaggggctttaatgatgaactataccatctcggccaacaatacgtttccggttgtgcagattgcgctacaacaagatgaaacgatccagatcgaatctggctccatgatctatcacaatggcttggttgaactaagcggccacatgaatagcaatggcaaacgcggactcggcggcctaatgagtgcgattggacgctccataaccagtggcgagagcttttttatcacaacggcaactggtaaggcggctaacgctgaattggcgattgcgcccggcaaccccggcgttatcaaagaattgacgctcgatgccaatcatcaatatcgcctgaataccggtgcgtttttggcaatggacacttccgttagttatcacatggccagtcaaaaagtcggtggtgctttatttggcggcactggcggattcttcatcatggaaacagcgggcactggcaccatgctggtttcggcttatggtgacatcattccgatcgaacttgatggcagccatgaatatgtcgtggataacagtcatgttgtcgcttgggacagccagctggattacagcatccagccggctagtggtgtcatcggttttactaccggtgaaggtttagtcaatcggttcactggttccgggaccgtctatatccagactcggaacatcgaggcactggctaatttgattcaaccattcatccccagcaatgataactgatcactaaggagctctatacgatgccaactaaaataggccttcactacaacaaaattggggttgggaaaaccatctactttttacatggcatggggttagacggacacagcatggcagctttttatgagccacgttttaccagcgaagagcggcattttgcccgcctctatccggatttaccgggaatgggaaattcaccggccacgtcagcattgcaatctgctgatgatgtgttggcacaggttcatgctttcattcaggcgaccagcgaagggccatgttatcttgtcggccattcttacggtggctatctagcattaggcctgcttgcgcgatttcctaacgagttttccggtgcttttttaaccgctccggttgtactcgcggagaaaacagcacgtacggttgcgccactaaagcatcttattagtgcgtcagtaaccagtcagtcaccggattttaccgactatctacacatgaatgttgttatcaatccttcaacctggcgacaatatcaggaacttatcctgctagggcttaaaacttttaaccgcgatttctgggttgccatgaagaaccgccatgcttatcgtctgtcgattgaatcacgcttaagcagcctgattaagtcaccagttacgcttgtgttaggtgaaaatgacaatgaagttggctatcaggatcaagtggtctttgcccataaaggcgcacacatgaccacaaccgtaatcccaaacgccggtcataatctgatgatcgatgcgcctgaggctgtcatgaccgcgtttcatcagtttctacacaaatagtgccaaaccgctacgcttgattaaccgtcgctattttgcggcggttttttgcgtcctctttatatccgagctgttaactgttcaggcgttaggtggcgtgtggtgcgaaagatgctgtaaaccgattccggtgagcgaaccggcgtttgattgagccagtaaacaattaaatccacaaccccttgactgacaatctcctgagcataatcgctgggcacatcacgatcatcagcaactaactcactaccgccttgccgcaacaactcaacaaccaattgcttcactttcgcggttagttgcgtttgattttcattcaacagtaaaacggccagatcccgttggcgatacaaatacttgaacaactgaaagaaagcatcacgctcgggtaacgggtttgctgcgcgtttagcttgaagcggtttgggaaaatgggcaaaaatgcttttcacatgtccgatcatttcatcttcataatgcgccaataaatcatacttatcgaaatagtgcagataaaaggtgccacgactgatgccggccaacttggctaattgttgcacgcttaacttgccaaacccttcctgatgcatcagcgtcataaacgcctgctgaattttcatttctgtttcaagcattttcgtactactagccatcgcgtcaacctccatgaacatactgttaattaccattctcattgaacaacaaattttaccccgaagcaattgacaaatcgtgccaaactgttcacccgtttaagcggcgatcatcagcacttttcccgcatgctgccggttaaaagtgcgttcagagactgaacagatggctcagattgtttcttgtctgaccgccttaaggccactatgatcgtgaatgaacagagtgtcaatttgaaaggcggtcttaccatgctaagaagtgaatggcgttatctcatgcagcacaaaatgatggtcgttgtcctggtggcaattgcgctcatcccagccatctattgttttatctatctttcgtccatgtgggatacctatggcaagatggatcagttaccggtcgccatcgttgatcatgatcggcctgttacttaccacggaaaaaagattgcgattggccagcagttaaccgccaatttgaccaaatcaaccgcgctggattttcatcatgtttctgcttccactgcgaccaaccggctgcaccggggcacctattacatggtgttgaccatcccgcgtaacttttccaaaaaggcaaccaccctactaacgaccaccccagaaaccatgccgctttactttcggttcaattccggtcagaacttcattgtctctaaaatgaccacaggcgctgcgactgccatcaaatcaaaagtggcgagtcaagttaccaaattatatgctggcattgtgctaacggcactacatcaggccgataccggcatgaccaaggcggctaccggcggccaaacgttgaccaccggcgctcaacaactcacaaccggcaccgcacaacttagcactggactaaaccgcctcgcaaccgggcttcagcaagcaaccaaaagtcagggacagacgaatcaagcagtggcttccctcaataccggcgtcacccaattaacaactgccgccaccgcactcgcagctggctcgcaacagttacaaaacggcagccaaactttagccaaccaattgacaatcggcagtcagaagctggcaagtatccaaactggggcgaataacgctgctgctttagccgcgcctgtgcgtgaagtcacgtcggatgtcgccaagatccccaacaacggaaccggcatggcgccttttgccatcgctatcggcctctatgtcggcggaatcgcgctgggcaccatgtacgaaggcttcctaccgcatcgtaaaccacggtacgcactaagttggtgggccagcaaagcttcggtgattggcacagttggcttattacaggcaggattgcttgatatttccttattagctggtaatcatttgcacgtcagcgatcatggtctgttcttcattgccattcttctcggatcttggttgttcctgtccttgattttctgtctccgcctgctgcttggcggtttcggaacatggctggtttcaatcgtcttggtccttcagctagctggctcaggtgggttataccctacttatttggtcaatggctttgcaaaagcgatcaatgaatggctgccgatgacctatctcattgacgctttaagaagcttaattgcaactcatcaagcgattggcaccgacatggcgatcatgatcggcttaatcggtctattcaatcttcttatgctcttccgttttcagatcggcttgcatcaaagcttcatcgaaattgatgctactgaagatgcttaacgcgctccccggcgcaaaggcctgcgtgtaaggacctcgaacgcaatggccaaaaccgggccatcacgcccaaggccacttacactccggtctctaaccgcgctggctcgcgcttaccataacgcgttcgccagcccagaaatctgcgtgtaagggccttgggcgcaatggccaaagcccggccatcacgcccaaggccacttacactccgatttctaaccgggctggctcacgctcactaaagaaggtgtttgcgatgttaaaaagcaacaattcgctcagtatctcagccttaattgaacaacacggtcatgagaagattcgtcaggcccggcgtatgctggttgtgaatctcatcgtctacactgtgattgccgccattgagctatggttcggcgcgaaggatcatgccgttgctttaaccgccgatggtcaaaataatttgactggcattgtcaccgtctctgctttgattgtcggactatcgtttgccacccgcccttctgatacatttcatcttgaaggtcactggcaatttgagaatcttgccgtttttcttgccggcttgggtatgtttcttatcggcctgatcaccatctgggaaggactgggcgcaactttggccttactatccggacacgccgctgcgccactcaaaggccaagccgctattatggctgccatttcagcggtgtcaatgttaatcctttgttggttcaaccacctcattggccaacatacacaaagcagttcactcgcggcatcggccaaagattttctcggcgacgctttgacttcaactggcaccatgatcgccattctcggtgcttcctattggcacatccactggattgatccactggcagctgttttgatcgggctattcttgatctggaacggcagccgaattctcagcaccagcgctgaaaagctctccaacgggttcaatcctgccctccgcacccaacttgtggacaagctgcaaactgttagtgggatactcgcggtcagcttcgttgatggtcggtatgctggcagcaatattattgtcgaagccgaaatcgtgctcccagccggtgatagcctcgccaaatcctaccgcatctgcaaaagtgccgagcaagtcctccaaagtgactttccagtgctgtactgttgcattcaggtcaaacccaacttacccaaaaatatgtctagatgatgagctcccaccacacttgccagcgcagagaagtgactaacacttaaaaagcacaagccacagacagaatgagttctggctgcagcttgtgcttgtttaggttcaaaatcgattaggcttcgagcttttctttgtttgaatccgccacataatgcggaatctcatcatcaatgaaataaaccttataccaaactaagaaggtataaatcgtccaaactttgcggcgatcattgcgctctttgcggtaagtcttatcgagaatatccaaaatcgcgtcttgatcaaagaactctttaacccagtcttgctcaaatgtttcgcgaacctttttataaaaaggctcatcttcaagccactgtttgaccggaaccgggaagccgagtttttcgcgactcgcccattcttctggcaggtgacggttggcagcttcacgcaaggcgtacttagaattgtgtgagttgatcagatatttggttggaataccagccgccactttggcaacttccttatccaaaaacggcacccgcagctccatggagttggccatcgacagcttgtcggccttcagcaaaatatccttaggcatgaactggtgaatatcaaggtactgcatcttcttgacttcatcatcgtaatggcgcacctttttgtacgattccgttacgatatcacgaacactcttactctggcggaattccggctgcaaaatctcatcggcctggccttcatggaaaactaaggcctcaccaatgaagaactcttccgccggggccgtggattcatacagatgcagccgtccgtggaagttcggcatcttcttcaacccatgggcaatgcggtacttcacgccgcgcggtaacttgcgcaagccgtccgcgaagacccgaatcgcatggctgcgggtgtgaaaaccatagttagcatacccggcaaaaagttcgtcggccccttcaccagacaaaataaccgtcacatctttgtgagccagtcttgtcaggaagtataacggcacgcaggaagggttggaatccggttcgtccaaatgatattgaatcaacgggaagttatccaacgcctctttttccgtcacgatatcactggtgttatctaagcccaatttatcgctgagttccttcgcggcgaccccttcatgatacttcttgttgtcaaaaccgatggagaaggtgtgctctggccgcaacagcgcggtaatgtaagatgaatccacccctgaagaaagcagcgatccgacttcaacatcggaaattcggtgggcatcaactgattcggacacactcttgtcaatggcagcaaccgtatcttcaaaactcagattattagccttgaaatccatatcccaatacttcttaatcgtgagttcattatccttcaacgtgaagtaatgaccttccggaatgcgataaacgcctttgaagaaagtttcgtccaacgcggagtactggaaagtcaaatacggtttgagcgcttctttattcagttgtttcttaaacttaggatgcttcaaaaaggccttgatttcactaccaacgatgaacgtatcgccatcgtggtaataatacatcggcttaatcccaaagaagtcgcgggcaccaaacatttctttcttgttgtcatcccaaatcaggaaagcaaacatgccgcgaatctttttcaacagttcttcaatgccatactcttcgtaaccatgaagcagcacctcggtgtcggaatgggtcttaaacacatgtccggcagcaatcaaatctttgcgaatactttgaaaattatagatttccccattaaagataatcgcaacagtaccgtcttcgttcagaatcggctgcgaaccaccctttaaatcaatgatcgacaaccgacgaaatccaagcgcaacatcatcattgatatattcgccactcgaattcggcccccggtgtttaatcatatccatcatgttattaataactggtttcttgttcaaaattgtcttgtccgcaaacgcgatgattccgcacatacagttaaccccttttcgcgtgaatgacgatcattacttgtttcagtataaagatttgacaacgcaagtcaatcaaagagcgtgaactggcgcggttagcgatcggagtgtaagtggcctcaaccctaaatggctgggctttggccatttagggttgaggcccttacacgcagatcgctgcgccagtgaacgcgtttcagaacagagcgtgagccagcccggttagaaaccggagcataagtgtccttgagcgtgatggcccgggcttggccattgcgctcaaggtccttatgtgcaggtttctgggctggcgaacgcgtttcagaacagagcgtgaaccgactcctgcgccagtgaacgcgtttcagccgcagcccgaccacactcacactgccgccctcaaagtcggcaccatcaccgaatcccaccactaaaatcccccaaaaacggcaaaaaaatagagatccaagttcctacagtcgaacttggatctcctaagttaaggatttgaccgatgcagtcatattgttacattgactggtactaattgtaaaaccctcttcaataaacctaatactgcgacacctctacaaaaatcttattcacttgtacggaacgacgagtgttgaaatgatgttgccagataacttggcgttgtttggtggttctatgacacacccgattgaacatctatgggaagctcattgtcccgcttggattactgagtcttgttattagcctcatacctccatgtgtgttcatctttagatctcatggaacatgaatctgacgataggtggcgcagatacttactgcaccaacgctctattcgttttactcgtgctttgcgacacacactttcgagccagttcgtttgcttgttactgaacgaaggatcgtgattcttggttcctgcatcgaccttgatgttcttccttaacttcaaataaagtgtatcatgtaagcgctatcttggcaagccctatgacctgcttttttacaaaaaaatttttaaaccgtcaaaaagcaaaccgtcgaacccgacttgctgcgccatagccatagagacttaaacgccgacgatcaatgtcaacactgacaacatatccggcatattcgctaggagtaccaaaatgtcgatcaaaccggcgattaaatttagtcgtcaatccgtgatggcgacccatcagtgcactggtattttgtaggctgtaatgaataccattcacctgatagtccgcttccaagtgatagtgtccggcgagatacgcaatgatccggcccgtgttttgggtgaaatcaaaccttaactgtccgccaaattcaggcgttttacctgtattcaacaccccactggcatgcaaattaaaagcccgcaacaactcatggacggcccgaccgttaaaccttaaggctggttggcctttttgattcattgccggcgcgtgactcatgattaacacatcacgattcaacgcgccttttaacgctaaagcaaagtcgcgtaactgcgcaaacgaaaccgctaaagtcttcttgacatcgtaaattttatgtccggcatgtaacggtacatcagccgtatttaatacgatcacgcgtaatcccggatagtcccgtaccaataagccttcatgcgaaaccgcaatatcaggctgcgcggcatctgtcgcaaatatcagctgacgattaacatccggcaagaagctgcctttgtgaccgggccgcttttcggcgaatttatcattgtcatcgtgattgcctttagtaaccagaaatggcaccgcaccccgccgataatcaaccatgatattgcgcaagcgcattttggttagccatggcaattccgagccatcaaccaagtcgccaagatgaacccgcaagtcaagtggcatccgggtactcaaccactgctgctcacggacatgccaaaatccagtcgggccataataagtcgatgagaatttggctttgtcatgagtatcggtaatcaaggcgaaattcaaggctgaaggcgacaataatggtgtcaccgcatcaataaaatggcccaaatcttttttaacaaaaggccgaattgtcatggcctgcttaacctcctcacacgtacgctttaccgcttagaaattgagccacaccccaagcgccaaaaagactacctgcgctaaagtggtgacgaatagatttttgatggcgttcggaaacgtcagctttttaaccggattagcagcaaacccacgcgcatttttgacgaccagcggcacggtgatcaatgtcagcagcgtcaattttggcaacaggccgagtaataccgaaacaatcagcatcaagaatcctgccgtatacagactataaaagaaaacaatgctgcgctgacgtccgagataatggacaatcgtgcgccgtttaagcgtctcatcttcatcctgatcagcaatgttgttggccagtaacaacgccgaaattgcgcattgtgccaacccacttgccagataaaccgacgcaattaatgaccacgaaaagtcgaccacgttaaagacgttgacataaaccgcgatcagaaaaatgacaaaccccatcgtaaatcccgagaagaattctccatacggtgtggcagaaatcggccgcggaccacctgcatagccatagcctaccgcaaagctaaacagtcccatgaccaacaatggccatccggtacggcttaccatccacaagccaagcactgcgctggtgaccatcattgccaccaccatccagccaatcatacttggattcagatgattgacgccgatgatattggtcttttcgcgaaaatgtagagcttctgtcttttccgaacggcgataatcttgatagttgtcattcgcatcaaccgccatgttaaacaaaagcatggcaacaaagaaaaccaacaattccagaatatgtaacgtatgataatggtaccaggcaaacaacgtccccaacaaaaaggggaaaaccgatgctgttttcgccttaacctcaactaattcaagaaatacagatattgacataacaacctccaacaattgacttttaagaatcaggtacagtagagtaaatatgtctttaggaaagagagaaaatgcatgattcatcccctgtggcaccgattccccatggtctatcaccaactcgaacagattcagcagcggctggaacaggtcgcgactttacgcgaaccacaagtgcatacgttgattcagcaacaaatcaatgcaggcggcaagatgttacgaagcgggcttatgcttatgctagcgcgttttggcgaacctgacaacgctgagcttgtgacggctggtgctgcgattgaagcactacacctagccacactggttcacgatgatgtgctggatcatgccgatattcgtcgcggcatgaccacggtttctgccgagtccggaaatcgtgaagccatctatgccggtgatttcctgtttgccatctattttcagttgcttagcgaacaggatcccgaaaccgttgatttaagaaccaacgcccgcatcatgaagcgcatctttatgggtgaagtggatcaaaacggccccagcgcaccgctcattccaaccgtcaatgcttatttaagtgccatcagcggtaaaacagccgctttgtttgcgctggcgacttatacaggcgcaacgatcggtcacctttctgccacccagaaaaaggccgcttaccgatttggccggcagctcggcatggcctttcaaatgattgatgatttacttgattatacccaaactgccaaaacattgaataaaccggcgcttgaggatttaaataatggcattgtcaccttgccgctcatctacgcctatcaaactgtgcctgaccagttgacgcctttaacgaaaacagccgaacaaatcgccgccaatgctgatgaaatcgctgcgattgttcgtaaacacggtcttccacaggcacatcagcttgctttcacctatacacaccgagcaattgcagctttgaacccactgccttcatcgcctaccaaagcagccttgaccaagctcacgcagcagctcttgcagcgaacgcattaactaatttgtgatttctttagcgatcccagcttcaattttggttgtctgtcagtgcaaaaattgttaaagaatcgccgccaacattgcatatttcaagaaatcatgccaaaataataattcatttaatttttaaaaattaacaattagcacaatgtttcacaaacattgtgctttttaagtggtatgatacagatatagcaatagtgaaagagtgatcaaacatggtaaaaatcctctctatcaatgccggcagctcctcacttaaatggaagttgtttgacatgcccagcgaaagacaagtagcagaaggcgcaactgatatcctgcgtcagtcgacggttaaaatcaagtatggtactgatcaggtttatgaaagtaccactccgattcgcaattatcgggaagctgtcagcaatttgctcagtcacttgcaatctttaggtctggtgaaccgcctcgatgaaattaccggcatcggtcatcgcgttgttgcaggtggagaactattttccgcacctatcgtcattgacaatcgggtgttggcacaaattcgagcgctgcgggattacgcgccactgcacaatcccgtcgaagccgattgcatcgacattttccgtaagatgatgccttgggcgcttgaagtggcggtttttgatactgcctttcatcagactatgaaaccggtcaattatctttacagcattccttatgaatattatcaaaaatatggcgttcgtaaatatggcgcacatggcaccagcgttcggtatgtcagtgctcacgcagccaaaatgctaggcaaaccgcttgaatccatgcgtatgattgtcatgcatcttggcgccggctccagcatcacggcgatccaaaatggtaaatccgtggatacgtcaatggggttcacccctgtatccggcgtgacaatgggaacccgcgccggtgatgtggacgtttcattgattgcctacctcatgaagaagttagacataaccgatgttgatcaaatgattgacattttaaacaccgaatccggattgcgcgggatctccggcatcagccacgatgttcgtgatcttgaagccgccgccccgacgcatccgcgcgcaaaactagcgctggatattttcgtcaaccgaatcatcaaatatatcggtgcttacgcggccttaatgaatggcgttgacgtgcttgtcttcacagccggcatcggcgagcacagtagtaatattcgcgcccgcatcatgcaatcgcttggctatctgggcgcccggattgatcctgagcgcaatttacagattcacgataacgccggcgatattacggcagccgatgcacgtgtcaagaccctcgttatcccgacaaacgaggaattaatgattgtccgggatgttatgtcattaagccaagttgcccaacaagcggaatgaatccgattttgatcttcaacctgccttaacatttgaatcactgctttttgaatgcgccagaagtcattacagcaaatgctgcctgacttctggcgtttttgggttcaaaaaagttgccttatattcacacaaatgatagccgctcaacccacgtaaatcgccgcagctgacaaatcgtcatcaaatttccaaaatgctgcttgcaattccaatagtcgctgtttatactgtgcatatattacatatacagtataaacacacaaaggagatgttcgctatgctcaacgtcaccaaccttaccaagcgttttggaaataccaccgccgttcacgatgtttcttttgcggttcgacccggagaaattctcggacttatcggtcaaaatggtgccggaaagaccacgaccttccgcatgttactgaacttgctgcaaccggatcaaggcacggttacttggaaccagcaaccattggccaaactgagtcgcgagacaatcgggtatttacctgaagaacgcggtttgtatcctaaaatgaccatcgcggatcaaatttgtttcttcgctgaacttcacggtatgaaacgtccagcggtcatggcagtccttgatcaatggcttgaccaatttcaagtcaaaggcaagcccactgatctcgtcaaagatctgtcaaaaggtaatcagcaaaaagttcaactgattgccgcgatgattcatacaccccaatttattattttggatgaacccttttccggtctggatccggttaatgcccatctgctagaagtcgggattcgccggttgcgtgatcaaggcagcgcaattatctattcgagccacgacatgcgcaacgttgaagccatttccgatcggttggtcatgctaaaaaacggtgccgttgtcttatccggcaagcttgacgaaattcgcgaacagtttggtcaaacccgactctacgttcaatcccccttaacccaacaggagctacaggctttccccggcgtgatcacggtgacgccacgttcccgcggcttcttagtcaaactgaccgatccgcaagttggccatgatattttcgccgctgccacacaccaaggctacattcccgagtttagtcaacaagcaccatccttagacgaaatcttccgcatgaaagtagaggcctaatcatggaaaaaatggatgtcatttttcgccaagtcttcatcaagaatcttaaaagtaaaacctggttatggattgtcctgggtccgttagtattagccgctatttttggcgcggttttctggttgatgaatcaaaccaaccaaacaacccgaatcggcgtggtttcggacagcccggcattggttcaaacgtttaaaagcagcagcgacaacgatcagcattatacgcattacgccaccacggctgcagctaaacgagcattggcggccgaaaaacttgatgcagttttgacagtcaccggtcagccgacccaacaggcaagtctcattcagcgaacagatgggcaaagcatcaatcgcacccaactacaaggtgtgctggctcaagcccacaccaaaaaagttgccagtcaactacagctatcgaccacccaactgcagcaactttttgcgactcccgccttggccactaccagtgtcaaagtagatgatggcaagcttgtcacccgttctgccaaatcccaagcgtccggatcggttgcgggtttcatcgtcgatattttgatttacacctttgtcatcggttatgcttcaatgatggcgcaggaaattgggacagaaaaagggtcacggatagaagaatcgattttaactgcgattacgccgcaagctcagttctttggcaaactgcttggcattctggcgttgatggcaacacaaatcattatttatggcgtggtcggattagccagtctcgtcgccttacgccagctaccgcaaaatcccctgtcaacgcttatcggccatcttgacctgagtagtgtgagtccaaacatgattctgtttagtattgcgttcttctttgtcggcaccttgacctataccgttttggccgccttaactggttcgctggttgcgaatcaggaacagatcggccaggctaccacaccgattgtgatgctgggaatggttggctactttggcgctatcattgttgccaatggcgcctcgcctattcttaatatcgccagttatgtgccatttttatcaaccatgatgatgcccgtacgactgggagcaggccaagtcagtgctgcggccggctggtcagcattcggcattaatgtgatctttttaatcgcgttcacctggctaacggtcaagctttatcagacgaatgtgttaagctattctgatggcggtattttcaaagcgttcaagcgttcgttacaattacaacgtaccgcccgcaagcgtcatccggtcaaatcatgacacgaaatgaggttaaccatgcggatcgtcatctcaaatcaatcgggcaaaccgatttatgaacaaatcgaagaccaggtgaaaaccgcgatcctcgccggtcagttaaaggcgaatgaacaactgccgtctatccgcagtcttgctaaagatttacgtatcagcgtgatcacaacgacccgcgcctatcacgaacttgaagcagccggattcattaccaacgttcagggtaaaggcgcctatgttctcggccaagatagctctttggtccgggaaaacgcactgcgcgacattgaagcgtccctgaatcaagcaatcgacacggctaaaatggccaaaatcacccccgccgagttgcacactatgttagatacattactgcaagcagaaggagaagccgatcatgacaactgatttactcacagtttcgcacctcaacaaacactatgaggattttcacttggctgacgtcagttttcacctgcctgccggttatattatgggtttcatcggtccaaatggcgcaggcaaaacaacaacgatcaaagcgattctcgacatgcttcaacctgacagtggtgatatcagtttactgggtcaaaccaccgttgcagctcgaaaacaggttcgggatcagcttggtgttgttctggatggaatggtttatccagactcatggcaatcaaccgcggtgaatcggtttgtcggtccttttttccctagttgggatgcggtttattttaaacagttatgtcacgattttgcgattcctgaaaaaaccaaatatcgtgatttatcaatgggtaccaaaatcaagttgcaactggccgcggctttagcccatcatccgcagctcttaatcttagatgaacccacgtctggcttggatccgattgcccgtgacgaactcattgccattttgcaggattttatcagcgacgatcaacatagcgttttgatttcaacccacagtattatcgaattggctaaagtggccgattatgtcacttacttgctaacagggaaagtaaccttcactgggccattaagtgacctgcttgatcggtatattatgattaaaggtggcccaaatgagttaaccccgggcattcaagcaacgattatcggattgcaacaaagccgcgtcggattctccggtatttggcctgccgatcaagccgatcaactgcctgacagtattgttcaggaaacagttgatttggaaaccttgatgattgcttttggcaaggggaggcgtgcacatgcgtgatttggtcaaacttgttggcttggacctggctgtatttcatactaatagtaagaagtatttttggtttggtactttgatcagtatcgttttgttgcttctccctttcttgaacggtgacttagcaaccccgcttgcaggcggcattacgggtcttagcattggcttattgatgatgccttttgtcggtgttgatcgccaaggaatggagaatctttacaccatgttaccggtccgccgtactaccattgtcgccggccattatctgttcggtttgatgacagtgggcttaattgacgcgtgcagcatgcttatcattggtctgggttggatggctcgcgttaatccaatccgtgattcacaagctttcgggtggatgctttgttttggtactgcgctcatgctctttcaaattatcttatcgtttccactcatgattggcttggggtttaagcgcgcgcctcttgctgcttattttccacttgccattctcttaattgccgtctttcttgaaagaagcttccaagtagacttagatgccctcaagccttggttcggagtaattgtggcaatctttatttcagctttcatcttctcttggtggttaagcaccgtgctgtataaaaaacgcgaattctaacccgtaaacaaaaagtcgccatttcataatcgagatggcgacttttttgcatcttcgcaacattgatcagccctgtccgtctttaaacgcaggatataatgtcatcccaccgtcaataaatagggtcgtgccagtgacgtaacttgactctgtcgatgccagccaggctgctccggcggcaacatcttccggtttacctagtcgtccttggggaatcatagcgactgtttggtcatactgcgccttatcagcaaacttttccgcattaatcggcgtctcaatggcaccgggaccgatagcgttgacccgaattccgcggttagcgtattccatcgcaatcgtctccgtgaaaagcttaaccgcccctttagctgcagtatagctggcaaacgttggccagggaatctgttcatggaccgatgagatgttaataatattgcctggctggtgatggtcgagaaaataattcaaagcagcccgggcgcctaaaaagaccccggtttgattaatcgcaataactttattccagtcatccagggacacttcatgcgtcggtgctttaatttccatacctgcattattgacccagacatcaaggcggccaaattcagactcggcagttttaaccaaactcgctatccccgcttctgtcgaaacatccgcatgaatactgactgcctgaccgccatttttgatcactgtatcggctgtttttcgcgcgccttcgtgatcacctaaataattaatcacaacggccatatgctctttgccaaaccgttctgcaatgcccgcgccaatacctttggagccaccggtcacgactgcaaccttaccattcagatctcgatacatatccgtcttcctttcatcaatccaggaattcagcttgctggattcacacttcacacaaccgctttgctctaaccttaccgaatcttataccacggcgccgctgcttcaaccggaaaaatgtgcaccatttgccacatttaatcacgacttattaggaaccagtttatcgcgacacgttaatggcattgatcctgactcatcaagcataacaaattcttcctaaattcgtcacaaaccaagcggcttcgatcacttactttttaaaattttgcgccagaaacaaaaagtagatgtgaatggcgattttgcatcacccaaatgacacaaccaacgtcaagctcagtcgccaccaccttcatgcatccaaaaacaccacttgattccaccgaatattcggatggattcgagtggtgtcctttttcgtgtgaatttcaactagctaatccatgcgcgccaagatttaagccagatccgcgccatttgaagcaatgacgcgccgataccaatcaaatgactttttcttactgcgcgccaacgtcccttccccatcatcatcaagatcaacgtaaatgaagccatagcgttttgacatctgtcccgacgaggcactcaccaagtcgatgcagccccatggtgtgtaacccatcaaatcaacgccatcatgaatcgccgcacccatttgctcgatgtgctgccgcaagtaatcaatccggtaatcatcctgaacttcacccttttcatcaggccgatcaatggcgcctaaaccattttcaacaatgaacagtggcttgcgataacgatcgtaaagttggtttaaggcaatacgcagaccgattggatcaatttgccagccccattcactcgccttcaggaacggatttttcagaccactcagcaaattaccgccaacttctgcatgatgctcctgcgtagtttcaatcaccgctgacatgtagtagctaaacccgatataatcaaccgggtaatgcttcaacagcgccaattcagctgcggaaaattcaagatcctggaacttaacgccgtactcatccatcatggcatcagtgtatgccggatattcaccgcgcacttgcacatcgccgcagaaaaagttaaacgcctgattctgttgcaaagttgcaagttggttgacaggattggcatcatagctatacgtggtcgcatacagcaacatgcacccgatttgcagctgcggatccaattcatgaccaattttaactgtccaagcactggcgacaaactgattatgccacgcttggaaaatgttgcgtttatcatcagccccgttactggcgaccaagccttgactcatgacaggaaaagaaaacgcactattaatttcgttaaaggtcatccaatacttaacctgtttaaaatatcgcgtcaacacagtctccgcaaaccgcttgtagaaagtgatcaacgctttatttttccacccgccatacttggttaccaagtgaagcggcatctcataatgagaaatcgtcacgatcggttcgatgccatactttaagcactccgcaatcaacgcatcgtaaaaagctaagccggcttggtttggttgctgctcatcaccttctggaaaaatccgcgaccaggcaatggaaaagcggtaacatttgaagcccatctcactaaatagcttaatatcttctttaaaatggtggtaatgatcaatgcccaaatgattcggatagcgatacttgctttcatcaatcgtccagtcaaagtccggttggttcacaatcgcaaaccggtcttttccttgaggcaacacgtcggcaattgataaacccttgccatcctcgtgataagcaccttctagctgattggccgcggttgccccaccccacataaactgttttggaaatttcaagttattcatcgtcaaataccaccttttctatgccagtgtcattaatgcatcgtcgtcggtcgcaccatctgatcgggtctcaacttgatactgatcagaattcgtcacaatcatcatcacagtcggcgcatatccggccgcttgaatcgcttggtagtcaaattcaaccagtggcgtcccaacggtaactttttggccttgttcaattaaagctttgaagtgcttgccttttaagttcaccgtgtcaatcccaatatggatcagaatctcggcccctttgtcagatgtgatgccgattgcgtgccctgttggataaactaggctcacggtaccggcaaccggggacttgacgacattttcttctggttcaatcgcaatcccttgacccatggtacccgaagcaaacacttcatcaggaacgtcactgagggtgaccaatgttccttttaccggcgcggccaaagtttcggcgtgatcagcaaccacctcagccgcagcttgatttttagccggtgcattaatgccgccaaatgcgagcgtcaagccaacgcccagcacaaaggcaactacatcgccaatcaccgaaacgccaaaccctttgcctaaataagtcggtaatgacaaaatgcttgccagtgaggccacattagcgccagcaccggacatggcgacgataatgccgccaactgcaccagcaacacaggcacagtagaatggctttttcagttttaacgtgatcccataaatcgtcggctccgtgatcccgaaaagtgcggtgatcgtactggagcccgccagacttttcatcttggcatcccgcgccttgaggaacacggcaaacgctgctcccgcttgtgccaacacagcaggtagaagaatcggcatcatcggatcggtgccatacagcgcaatgttgttcatcatcaccggaaccaaagcccaatgaacgccgaaaatcacaaacacctgccagaatccgccaagaatcatccctgccaagaccggcacactcttattcagtgacacaatcgcagttgccaagccattactgagaatcgaactaaccggaccgaccaccagcatggttaacggaacaatcacgactaacagacacagcggcgccaaaatgttccgcacagattcatgccagatcctgttgaaaaatggctccaaaaacttctgcaccacgaccaccagcaaaattggcagcacggttgccgtatagttggcagccaccaccggaatgccgaaaaagtcgatactcggcttgccaaccaacgccacgatgttgggataaaccatcgccgccgcaatcgccatcgcaacaaattgattgactttcaactgtttggcagccgtaaatgccaaggctaacggcagaaaatagaaaatgccatccgccgcggcccaccaaatctgataggccccgcttttcgtcgtcagccaaccaagcaccaccgctagcgataacaggcccttcaggatcccagcaccggccattgcacccaagaatggggtaaaaacgccggaaataaaggttagcaagccgttgaaagcgcgcttaaaggtcattttttcatgggtcacggttgctggtccttctgtgccatcactcaacgatggttccagttttacaacttcctgataaacatcactgacattgttgccaatgaccacctgaaactgtccactagcctccacgacggtgataacgccgtctaaggcttcaactttttctttgggtaccttgtcttgatcctttaacgtaaaacgcaaacgggtggcacaatgccagacctgattgatattttgcttaccgccaaccagtttcaacaactgtttggctaatgctgtttcgcccatttcaaactgcctcctttagtttacgctcagcacctgcagttgcacccgctgctgacgccggctttaacgcgctccccggcgcagaagtctgcgtgtaaggacctcagtcgcaatggccaaagaccgaccatcacgtctgaggccgcttacactccggcccctaaccgcgctggctcgcgctcacataaaaaaaagccagaaagacatgacttgtggtgcacacaagtcgtatctttctggttttgcctaattcaatagttacaagcccaattaaaatgtattcgctttcaacatcatcatcttatctgatggattagcgttcgtcaactactttttaaactttgcccctgactcttggctaaacgggcgatgtggagggttagataaatttgttcgttttttgaaatcggtccgggtaatttttgctgcataaacttaaccacatcttccatgcaccggtatgcctgcgtatagtcttgttgcagatgtgccagcaaggcctgatcatatggttcgggtgataccggtgttttcgccgttgaagttgcataaacgcgttgaagaaagaactttagatgaatgaccaagcgttgatactctggcgtcttagcgttcatgttcagtccgagttgatagaaaataattttggtaatgttagccagcatttgcgtgaacgccaccgagttaacgggatgttgctggctcaaatcgttgctgacaaatttcaacgcaataaaacccgcctcatcttcaggaagctgttccccgatctgattagcaatttccgtcaacgcccattcacccatgcgaaaagccggctcataggcaatctggatctcccacagtaatttgttatgcagaataagctgttcatgcaagcgcgtcacggcaaaatgtatatgatcggctaactcgattaacaaataactgttgaattttgtgtgtaactgaacttcagcttcctgaataatccgcgcggcaatcgttaaatattcatcgggcaagctggcaatcgtcgccatcgcaatctttagtttggcgtgatcttcaggcacataaattttcatcgaatcctgcagcgttaactggtcaccttttttagcatgaaacccaataccgcgttcgacgacaatgatatcgcgcttatcacgccgcacgacaacggcattgttattaagaatcgcatcaatgatcatagctagccctcccccaaggcggtcagatcacggttcaatccgcatccagattcaggctaacaatttttcgagaaaatgacaacgtaaacgacttggcttcaattttcaccgcactttttttcagaaggctaactattcagttactaagaccacctgatgctcggaaaaccgataaacccgatccgcaaacgctgctgattcaggccggtgcgagattagaatcacaatgccatgatagtaagttttaatcgtctctaaaatcaaccgttcattttcggtgtccaagttgcttgtcggctcatcgagaaccaacacactgcttgggtgcaacaacgcccgcgccaactcgagtcgttgctgctcgccgcttgaaaatggcacgtgactagccgcaaccacggtatccaagccgtgactcatttgctccagtcgcgcccggagcttaacctgatcgagaactgtccaaatctgctgatccgtgatggctgggtcatgcagtgtgagattatcccgcaccgactcggaaaagaataccggcgtctgcggcagataattcatttgattgcgtaatgcagtcggcttgatggtcgccaaatcgttaccgtcaatcaaaatctgcccgtgactaaccggataccaacccatgatcagcttggccaaggtacttttacctgatccgctcgcgccaacaaaaccaacgatttcaccggcattcaaagtcaccgtgacgtcttttaataccgcttccggccgagttggataactaaagctgacctgatccacttgaattcgattaatggcagtcacaacgcggtttgcgtttggcgatgcagcatttagcggttgttcctgtaataagttaaataaattccgcgcagccgcaagaccatttagcaacgagcccggcagattgtttaacgccagcagcggcccaaaagtaagtggaaagattgctagcaaggcttgctgaatggcagtaggttgctgccagccactgagccaaatcatcagtagccaaccaccaacaatgacgaccgttgccgccacatttttcaacaattggctaaactgcgcctgctgaaaagccgctgcttcctgatcaaaaccttcattgccttttgtcatgcgttgcttggcgatccctaattgccgcactaccgccatgccgcgcactgattccagtaaatattgctgattggcagctttcaaacgatcggctgcctgggttttggctgtcagttgccgatgacgcgcatatggcaccaccatcccgacagcaacataactaatcagtgcgatgattgcagccagccaatttagctgactataaatgccaactaccaagagcccgtataccaacccgatcgcaaccggaaccaaggtatgcgcgtaaaaaatttccatggcttcaatatcactgccaattagcttaagcaacttaccactagcttgcgtatctagtttagccggtgccagtttgaccaattggcgataaaccgctccacgtaagtctgccaacacgtgaaacgcaacataatgtccggaatactgctcgccaaagctgcctaagcctaataaaataatggcgatcaatccaggtaacagcaattgtccagcgttttgcggatcaaaaagcatcatagcagctaaaaccaacaccacgactttagctaattcagccaccataccaattagaaaactaataaaaatagcgccggtcagatgatgcgtatagcgtaacaggcctctaatcattggaattcacctcgttttccatcatctccgggttgtctaccagttgccgatatgcaggctgtttttgatacagcctctgatgattggcaaccgtcagctgatggtcatgaatgaaccagacttcatcagcctgcgtcattgccttgagatcatgggaaatgaacaaaacaatcttatggcgactcaacttcttaaccgcctgaaggataatcgccgcattggcttcatcaatactcgatgttatttcgtctaataagtaaaccgtcttgtccgccagcaacatccgggcaaacgccaactgttgtcgctgcccaggtgaaagcagccgtccgttttcgcctacttgggtcgcgtaacctttttccagcgatggcacaaactgcatcaatcccaacgatgcgagtctggcttgccattgatcaccgaagcgattgcctaacaataagttctcctgaatcgtgccggaaaaaagatattcgttggcagtgacatagccgaacacggccgcttgttgcacattgcttagagccgaaaccgcagtctggtcagccataatggcgccggataaaggtttcaatcgtcccaaaatcgcttggattaacgtacttttgccggttccattttcgccagccaaaccgtaaagcttacccggaaccagggtggcattaatccccgttaccagcggcgcatctgcggcatatccaatgctaacctgatccaaagtaatttggctaagcgggcgattatccgtgattttgacggtgtccggcgccgctttagccttggcgatcgtggccaaaatggctgccaatgatgggccatttgatttcaccacatggacaaaataaccgagttgccgagcatttaccatcatcatcgccaatgtaaaccaagtggcaaacgcgcctgccaccggtaattgaccggccaccagctgaactgccgtgatgaagccgccagcaaaaaccgtcaaataaacaaagccgttaatcacaaacaaggtctgcaattgcgttttcaaaagattcattgttgcctgccgaaaaaactcgctatcatcggcaaacttctgggcataacgatctgcggcatcatacatcactaaggtggtcatcccgcgtaaatcatccatgaaccggccgcccattttcaaaaacccactgagatgagccttgttctgcgccgacatccgcttgcctaaaaacatcatggccagcccaattaaaaacacacagccaaatggtaaaagtgccaaccacgagcggtaccaaaacgaaagcccaattaaaaccaaaaacgtcatgcccgcctgcaaaatggttggaaatagcgtgctgtaaaacatatctaaattattgagaccacccaagtcgcgctgaatcaccgcatgatccgcagcagtggttgcaacggcatcattgcgtcggtaaagcgcagtaaaatagcgatcccgcagctcccgtttcgcactcatggcccatgcgtggcggtggtgccgttcataacccaccacgtaacccaaccacaccgccattaacaccagtgttgtcacgagcgccgtaacctgatgcccagtacccaaattaagcgcaatcaagatcggtagtaaggttggcaaccaatcaaaaagcgcttcaatcaccccagcccaacgctgatcacgtccgtatttcagtaatccaaacaaaggcttgcctcttttctcactttgaatatgcagcgtttcaacctaccgctggccctcagcacaatgacagattgttgttacagtttaccacgggaagtcatcagtactgcagcaatttttagtgcaagccgtcaaaactgatctgtcagtagtctatccattttcaaaaaagccgattcagcgcacactgatcggccgccaccagtttgtattatggatgaaccagtccgcctgcatcgccattggaaccatgatttccctgagccggcttaatctctatgagcaacttatgcggcaagcaaatactctgctggccaatgcgactaatccagccagtatgcaccgcaatctggtcaggcgaattatcttctttgtcccgaatacgttcaccatcaacttcaatgatattgtactgaccttttgccggataaagcgtgaactgctgatggcgggtgtgcgctcccagcttaattcgccgtttgacctgaccattaactgaaattaccgccaccttttgactcgtattcacattggcttcggtcagcgaaaaaatccccgccggaataaaacaggcgataaatagcaagacaacaatgacataatccagcggtcgtacatagcgtttaagccagcgcattcttttcacctcggtttaaagccttcaacatttatcttacacgttatcaagtcctaagtacgacccactgcctgtcagcgccgcccatcaggattagccaagttattcaggccaactaaaaagccacgaacttccattcgcagctttcttcgttattctcacggcacaatcattttcagaacacgactattttgcagcctttgccgccttgataattgccgctaagtaacctgccgtgtcggtgaaagtagcgccagacacaacgtcactggctttcttcttaccttttaagtcactaactgctgtttcaagttcggcaacggtcttccctttagcaaattcatcaatagccgttgaattttcctgccaggtctttgtcgctttgccttttgacttcataatggccgaataagcatcagagtttgcccgcttcgaagccaaaaccgtgccggccttaatgcccttaccaaaatcggtattcgaattaggaaccgcaccgaagtccttggctggcatatattggaactcatccaagaaaacgttagcaattttatcgccttgcatggcaactgtcacgatgccaaacgactgagtcccatgcggcgccgccagaacctgaccttccgtgagattcggatcagtcgtttgaattccttccgcaaccattccggtcgttgccgcatcgtaaatcgcttgcagataaccggctgtgtcagcaaaagtcgcaccggaaacaacatcgctaaccttcttagtacccttcacttcagccacagccgcttttagatcactaatcttcttacccttaacaaaattcgtaatcgccgtttcgttttcttcccacgtgtgagttgcctttgcttcctttttcatcaacgctgagtatggtttgctattttccgccttagcaatcaaaatctgaccggacggataattttttccaaagtctttattggaatttggcaccccagtccaatccgaactctttttgacatactggaactcattgattctagcggacacgatggtatcaccattcagcgtgacattcaccgccgcaaaagactgcttaccatgcggtgccgcatacaattgccgcatcaccaaagtaccagcagctggaactttggcattcgcatccgcacccgttttaatcttgactttggcgttgctggtttggctagtggtactgctgctcttacttgaactggacccagacccaccgccacacgctactaacccaatactaagtaaaagcgttgccccgatgatcgcaactttttccatgttgtacctccttgtatgaaatcgcttacatttatatgatgaattttagcacaaggcggctgtgttagtacacacatttcgaagcaaaagtcttttaggctactgtacttatacaccgtgtgctatttttaaaattaaacatgcggagaggttctgcatcgtcttcaacaagccaataaaaaacaacttagccactatcctaaaaatagtgtctaagctgcttttcaaatgcacaaaccgtggcatgccacaactccagcactacctcaaccctgcatccaacgcataaagattttgataccgtttattctgttcagccaaatgttgtggcgagtcattcatcgtcaatcgaccatcttccaggaaaatgacacgatcagtttggctaactccctgcagatgatgggttacccatagaatcgttttaccttttaaaaccgtgaacatagtattcaacaaggcttgttctgtgatcggatctaatccgacagtcggctcgtctagcaaaacaatcggggcatcctgcaataatatccgtgctagtgacagacgctgccgctccccaccggaaaagccaaagcctgcttcttcaacactgctgttcataccgttgggcaactgagcaaccagttgatccaatttgaccgcttttaacgccgccgcaacggtttcatcgctggcatcttcatttcccaaacgcacgttattcacaatcgatgtattgaaaagaaaggggctttgatcaaggaccgcaaacaaattcgtgcggtgattctggtagtcgagtacatcttgtccgtcaatgagtacgtggccatttgtcggggttaaatcacctagcaccaattgcaagagcgtggttttccccatcccgctggggccaagaatggcaattttttctcctgcctggatcgtcaaatcaatgtttgtgatcaattcaggatcagacggtgtataccgaaagctgacatcatttaattcgattttattaaaggtagtcggtactggctgttgttgtggcaactcgcgcgtaaccgggtgtaaatcattgaggtgacggatggcatcccgataagtcggccattcaccaaccccttgggcgattccggaaaacgcctggtctagcgggaagacaaccaagacaaacgcgccaacccaattagccattgactgattgccggtccattccaaattggtccaaatcaacatactaacggcgattaaagcaaacaaaagctggccgataaaatcacgcccccactgaaatcgcttggacttagcggtagagacagcaagttttttgggtgctgccagactttgcttcatgaaatcttgatcgcggtgggtaatcacccaatcagacaagcccagcaccgaatcggttaacgacacataggcatcatgattcaactgtttctgctccgctttacgaaaacgttcaacgaccaaaccccaccatggaagaatcaaaatctggaagagcaacagcagcaatatccacaaggcaaagccccagttaaaccagcccaataatagcgttgcaatgaccgttagaccggctccgacaactgtgggaaaaatcattcgcagatagaggttttggatatgtccgatatcgtccgccaataagccgagaatatcgcccgtctgatgatgttcggagacaaatgccgcatcggtttccaggactttatataattttcgccgcatgtgactggtgatccgcaacacccaattatgactggtcaggcgttcagcatattgaaagactggccggccaaccccgaatgcccgggtcagcaccactgtgacgtaaatcgcagcaaacagtggcttggtcgcacttttatcaattagaaatccggaggtgaacatcagcgcaccggcaaagacaaaggtcataatgcccagaatcaatgaccaaaacaacagccaccgatagcgcttgagatcaggccggacccaatgttcatttttcaaccaatgcattgaattcacctcgcatttcatggaccaacgcctgatacggcttagagtgggcggctaattcagtcggggttccttccgcaacaatcttgcccccgtcaaccacgataacccggtccatttggttcaaccagtgcaaccggtgcgtggcaaagataaccagtcgattagcaaaaagtggaactaaggtttcttttaacgccgcttcggtttcaatatccagatgtgcggtcggttcatcgaaaagccaaatagaacgatttgtgtcgattaaagtccgggcaagggcaattcgctgcgcctgaccaccggaaatgccgcggccgccttcaccgattcgcgttgcataaccatctggcaacgaattgatccaagtcgtcaaaccagccgattctgcggcatcccgcactgcctgatcagaagcatccggccgataaaaccgaatattagccgcaatcgtatccgcaaacagataaggatcttgcggaatataactcaggtgatcctgccaggccgtttgcgtcatatggggaattttggtcccgcgcaacgtgatatcggcagcttgcggctgtaaaaatccgtcaattaaattcagtaacgttgattttcctgatccactcgcgccaataatggcaactttttccggtccagtaaaggttaaattagcatcctgaatgcccgctcgcttgtcagcataagtaaaatcaagatgctgcatgctgagtgtatcttgcggctgccatcccttaaacgctggtagcacatgcgtatccgttggcagcggctggtcaatcaccttccagatcgccgtcatggcattcttaccgttcaaagtggcatggtaatccgttccgaaatcacgaatcggcataaaatattcaggtgccaaaatcaatgctaccatcgcggggtacaacggaatcgtgccatccattagcttaatgcccagaaaaaccgccacgactgcgattgataaagtggtaaaaaaatctaacgcaaaggtggaaagcatggcgattcgcaaaacgcccatcgtctgcttgcgataatcttcagagacttcatagacgttgttggcatactcgcgactgatacccatcagttgcagtgtttttaacccccgcagtgaatcaataaaatgattgctcatcttttgaaatccggcgtactgactttccgacttatcacgcgccgccaagccaaggatgaccatgaacaagataatgattggaaacataatcagcaacgtgaatccggtcaaccagttttcataccaaatataagccaccaaaatccacggaataatgctcatattcaagatcttatttaaaataagttcgatataattttcagcttcgggaatgccgtcaagtgccatcgtgactaaattaccagtaccttctttagcaaccgctgccggaccaagcgcaaaaagatgtcgcaacaactgcgcttgcagccaggcagcacttttcatcgcaaacttggcggcgatacggtttcgtacccacacgatcaactggcggaccgtaaaagccgcggcaaaaaagccaagcggcagccataaaccagctaaactttgacgattccaagaatgaacaatcccttcagcgagatattttccttggagtaaaataacaaaagcttgcacgagtgcaaacccggcaagcattgtcattgtttttcgcattcccgaaaggcgcaacagcgtcttatcgatcattcgctaaccgcccctttggcttgaatgcgtttgtggaagacaacatagctccaaatgaagtaggccaaggcaattggcaaaagaataactgccacaatggtcataatggtcagcgtcaatgggctggcactggcatccttagcgagaatcgacatggccgcattttgaccaatcatcacccgcgggaataaaccgttgaagatgacgccgacaacgccgaccaaaccaagggcgctgccaatgaatgacaagacttcattatcttttaaaaccccgatatgggctgcgaccgttgaaccaacgatgataaccagaatcagcaacgtgctaatcgggcgttccttgaagaaatcggtcatgaagaatagtaagacagcgaaaacaacttcgccggcataaagcagataatacaacttgctattccagtcacgtgctcgcttccgcaagtcgcctgtggtcttcaagcgaatgaagttcagcccatgcatcaacatcatcagggtcactgcaacgccgccgacaatcgtcaatagattaatctgattgcccaacgtcggaaacacatccccatttttggtaatcggcagcggttgaataatcgcggtgaaaatcatgcccaaaataaacggcggaatcaaactgccacacgccaacgcccaacgccaaatgttgcgcccggttttggtctcagcatgtgcggcaaattcaaaggaaaccccgcgaacaatcagaccaaacaaaacaaggaagaacatgatataaaagccggagaacaggcttgcataccacatcggataggaagcaaacatcgcaccgccagccgtgatgagccacacttcattaccatcccagtgtgggccaatggttgctaccaactgatcttcttcatcgctattgtgggccaagagcttagttgacatcccgactccaaagtcaaacccttcaaggacgaagaacccactgaacaggacgaacaataaaaagaaccataaaatctgtaaccagctcattttgcgaacgcctccttagcaaacggatcgctgttgaccccataatcggtgttcaaatcgccatctggtccattcttcaaaacgcgatgtgaatagtaaatcatcacgccacctaataaggtaaagatcaagaagtagcagatgttggtgaacagcaattgaccggccgtcgtggttggcgaaaccgcatcggcaatcgtgtacaatccgtaaacaacccacggataacgacctaattcggtaatgaaccagccagcggtattaatgataaacggcagccacagagcaaagccgagaatatacaataaccaccgctgatctagcaacgtatccttcttcttacgactgaaccacaggcctaagacacccagcaagaagagcaaaacgccgccaccagccatgacccgaaagctccaaaacagggtcttaaccggtacataataattcttatctttgccatacttggcttcaagctctttattagcagtctccatgcctttaactgaaccgttcatcttatgataggacaataagctcagtaaatatggcacttcaatgttgccgctagttgtgtgatctttggtgttgattaactcaaccaacgtccaaggtgccggatcactggtgtctttgtaaatcccttcagttgccgcaaacttcatcggttgatccttaatgatgaactgagtctgcaagtcaccaaagccaatcgcacaggcagaagcaatggtcccgacaaccaagccgactttaagcgacttcttgtaaaaatcaacatgatcttttttaagcaaccgccaagctgccatgcccgcaaccgcaaaaccggctgtggtaaaggcaccaaagatgacgtgtggaaattcaacccacagttgcggattggtgatcaccgcaccaaagtcaaccaatttgacccgaccagttgtttgactgatcgcaaaaccggtgggatgttgcatgaaagcatttgcggaaagaatccaaattgctgataacgtggtgcccaaccaagtcatccaaataaagatagcatgtacagctggcttgaagcggtcccaggtaaacatccacaacccgatgaaagtcgattccatgaagaatgccaacaaggcttcaatcgccagtggcactccgaaaatgtcccccatgaatcgtgaataattcgaccaattcatgccaaattgaaattcctgaataataccggtaacgaccccgacagcaaagctcagcaagaaaatcttgccccagaacttggccatttttttatatgtctcatcctttttgcgtacatacatcgtttccatgatggcagccacaagacccataccaattgaaaacggtacgaaaaagaaatggaaaacggtcgtcatcgcaaactgaaaacgagctagcgataatacgtccattgccattagcatatgtttctcctcctttaatagattgattacaatctaagtataccccgatatttattttttaaaaaccaaaaacccaaaaaaccagatggaaatcatgcttcttaggatatttcatttcacaagattgttatgatattctccgacgtcaataatcgcaaccgctttccggaaagtcgatttcctatcttttcacagtagagaaaacaatcgcatctatttgtgaaaaaacgtttacggtcgaatcacttcatgaattaacggcaacttttttggagcggttgtgccgatatggtaagcttggcgcaccaactctacaatcgcatccacatgttgatcgttagcgtgcagcatgaccagcgtatcgcctttagtcaccggcgttcccagttttttgtgtagaactaagccgactgccaagtccaacgtgtctcctttttgagcgcggccgccgcccagttgcattgccgccacgcctagggcattcgtatcaatcgcagtgacaataccgctttgctcggctttaaccggaattcgatatgctgcttgcggtaacttccgcggatcatcaaccaccgccggatcaccgccttgagcttgaatgagctgtttaaacgcgttcaaagctcggccatcacgcaaggcatcttctgctaacccggtggcaatttccagacttggtgcttttttgcctaagaccaacatctgtgcggctaatgcaaccgttaagtcgtggacatcccgtggcccgcgattttttaaaatagcgattgattcggcgatttccaagctgttaccgattgtaatgcccagcggttgattcatatcagttagcaaagcaacacttttgacgccggcagcctgactgatgctaaccaaggctttagctaaagcacgcgcatcttctgaagtcttcataaacgcaccattgccaactttgacatcgaaaaccaaggcatcggtcccactcgccagtttcttactcataatcgagcccgcaattaatggtatcgattccactgtcccggtcacatcacgcaatgcatagattcgccgatccgctggggcaacatcgcgactggcactcacaatggcttgatggagtgtttgcacttggtgtttgaattgggcttcagtttcgttaacattaaagcccggaatactttctagcttatccagtgttccgccggtatggccaaggccacggcctgaaatcatgggtacgggaacacccagagaagctactaaaggtgccagcggaatactgattttatcacccacgcccccagtactgtgcttgtcaaccttgatgccgggaatatcgcttaaatcaaggacgtcaccggaatgcagcattgcaaacgcaaagtgatcgcgttcagccgcactcatgccgttaaaatagactgccatcaaaaacgcactcatttggtaatccgggatcttttccgcggtatactgctgaatcatccaggttaattcatcatcggtcaattccccgtgatcgcgtttctttgtaatcaagtcgaccatgcgcattttttatcacccttcactcggttgttatgactattgtaacgccctacttgctacctatgttaaactcaaatcaatctattcattcaaaggagaacatcatggattttgctaccttacatacgctgggtaaaacggaactgcattgccatctggacgggtctctgtccttaaattgcattcgtcaactagcccaaaaaatcaatcaaccgttgcctgccgatgataacgccttacgcaagctggtccaggctccggaaaattctgaaaatctggctgattacctaaaaacattcgactttatcgcaccccttttgcaaaccaaggaggcgctgcagatggcggcctttgatgttgtcgcccaagctgcccgcgaaaatgtccgctatatcgaaatccgatttgccccggtactttcgactgctggcgatttaacattgagtcaagccaccgaggcggttatcacgggcttacatcaggctatggcccaattcgatattattgccaaggtcttagtttgcggcatgcgccaattgccaaacgcagacaatgcagccatgtttaccgccaatgctcctttagtcggtgataccttggttggcggcgattttgccggtaacgaagctgactatccgactaaagtttgtgcacctgccattgaaactgcgcaacgacttggcgtcccgttaactttccacgctggtgaatgccactgcccgcaaaatattgccgaggcgatccgcttgggtattccgcgaatcggccacgccaccgcttgttttgaccgacctgaactgattcagacaatcgtgaaaacccatacaacgatcgaactctgcctcaccagcaacttgcaaaccaaagccgcacggtcactggcagaatttccttatcaagccctcaaaaaagccggggccgccatcacgattaatacggataatcgtactgtctccaacaccaccctgacccacgagtatgaacggtatcaagcatattttgataccaccgccgctgactttctaacttttaacctcaatgccgtcaatgcagctttcatccccgaaaccaccaagcaaacattacgtatgcgcttaaaacaagattacgcaccttacctgtaaactcacacgcttaagtccacactccatcagcattattgcgtttcgagctgcaagtgttatcgaggcttcatttttcttaacgtccttaacctttgcttagggaaaaaaccacacgtttatcattatttatccccaaattcatcccgactgattcgcgataaagccacatggacaagctatgctggttctatcaacaaatgaaaggatgattcttatgttgattaaccagacagatttcatcgcaacccaattacagcaaattgtttaccctaatatcaccgccatcactgaaaccggcgcgtcaatcacgattcaaactaaccaaaaacagcgcgatgaccctgctttttggcagagcatcagcgctatcctaaaagcccatctttgggttccggtttctaaaaaatatcatgaactcaccgatcatgactggttagcatcgccagtataaaatttatgcttgatgcgtggcaaaagcattggcagctaaaataagcgtcaaaactgcatcaggtgacaatgcggcactgacagttttaatgtgcccgctggttgcaaccgcaccgatcacttcaagcccatacttcacaatgttgagatcgcgttgaggtgcataaccaccgtcaaaaaccggttcatggttatatgtaaagtttaaatgatcatctttaatcgaaccatcaacgtgattcaccataatccgatcatgtgccgccgttaacggtgcctgatcatcgggcagattgagtttgtgatccgattcagtggtgtaataatcagcctgtttcatgtgcaagtatttttcagccggtttcttaagtacctttaaataatccacaatggcaaaaaccttcgtgggatccagctgggtggtcttagccatgagctcatcattatgggcctcaagccagtctgctaaattactgatactaaactgatccatgttgtgcctccatattcatcgcagattcttacgccagtatagcatggacatcgggtttgatgtgcatgattgttataaacttgtgacactttttggttctataatgatgttaaggggatgagcatcatgccgacgaatcagacaccatatccgattattgactatttggggcgtccaatccaactgcagttatttgtcacctatcgtctgcgcgtcaaaaacggctacattctcgcattacgccgcaaccagcaccaacaagcacttcccaaccttctcgttaaacacgcaagttaagcttgattttgttgggacatgctgcctcgcaatttgcgacacgctttgatttgacgagcataggttcaagcttccacctgagaaacaaacaaagaaaaggacaaatgaattttttgcgagccaagcgctatcaagggttcgttcatttgtccttctttttttgcctaaaaacaggttgcgcattagccacttagtcggaacgatcctcaagcttaggtccgcgtggggtcatgagtgccatcatcgccacggttaaaataatgatcatcccacccagtatctcagccacacctagatgcatatgcaaaaaaatgaccgacaccaaggttgcccccagcggctcaaacgcgtctaacaaggtcgcggctgtcggcgaaataaactgtaagctggccaaatagaccgaataagcaacaatcgtcccaaagatgacgataaaccagtaaccggcccaccctgcttgatccaagtgcggaatttgtttccagaaaggatcgaaaatatcaactaataagccacccagtaattgagcccaagctgtcacgacaataggcgaatgccgcttcagtaatcccgccggcaataatgtatacgctgctgcggctaaagcggccatcaccccccagaaaaaagcagacggcgaaatagccaaatgtgttaaccgtccctttgtcaccactagcatggtaccaagcatcgccatggcaattgtgaataaatcaattcggcgtggtttttcacgtaatcgtaacgccaaaaaaaccaaaacgataaccggtgatagatattgcaaaattgtcgcagtcgctgcgttagccactgcaactgctttaaagtaaatatattgcatcccgatcatgccaaacaacacaaacaaaatcagctgtatcgcatcacgccgattgcgccacggtgacataatggcagcgcgatctttccaaacagctaacgtcatcaaaacaacgccagcaatgatcattttagagctaatcagccaggaaactttaatgccttcatcaaataaagcttcactcactggaccggatattccccataaacttgaaccaaggatagccagaaaaatcccccataagcggatgcgtttcaacgctcttgcccctttttgcgctgattggatcagtcttgcatcacaacatgatcatcaattaatcctgcgccttgcaaataattatacacgattaccgggccaacgaaggcaaacccgttctttttcaaatccttagcaattttcaccgataatgcgcttctggttgggatctcggccaaagatttaggtcgattgacaagtggtttgccatccacaaatgcccataaatagtcattcaagctgccatacgccgcttgaattcgcaaaatagcccgtgcattcgtgaccgttgcttcaagtttcatccggttgcgaataatgtcggtgcgttgtaataaggcatcgatgtccggctcatccatcgcagccacttttttgatatcaaactgatgaaacgcatcgttaaaagcggctcgcttatgcagtaccaattcccagttcagaccagcctgaaaaatttctaacgatagtaactcgaatagcttttggtcatcatgaaccggaacaccccactcatggtcatgataagcacgtaattccggtgacattttggccaaccagtccgtgtattgcttacgcgcctgatacttccgcaatgccgcctctgttttgacctgctcagcgcgatcatgtgcatttgtcattttaggattcctccaagtctttatcgttgttaacgatacattacgccgtcagttacgagaatgccagttaacgtacttcggaagatggttatgttgcgtttgaggctgtggtggcttggaggaattctattttcggcaagtggcggcgttattctctgttatctataacgcgctcgcagtcgcagcaatctgcgtgtaaggacctctaacctaaatgggcaaagcccggccattttaggctagatggcccttatgttctggcttacgcccataacgcgctccccggcgcagaagtctgcgtgtaaggacctcagtcgcaatggccaaagcccggccatcacgcctgaggccgcttacactccgacttctaaacgcgccggctcgcgcttaccaaaaaagagtccgcaaccttcgctgccgactcttcatcgataaaacgcttattttgttttgacaatcagaacatcacacggagccgtgcggttaacgtattctgtcaccgaaccgactaatacgcgctcaactgcattcaaaccggttgcgccgatcacgatcaagtcgttgtgatggtcgtgaggaaagtcggttgcgataactgtcttagggttcccaaaccggatatggatgtccacatctgtcaggccggtttgctttgcctgatccttcaagttctctaaatattcctgtgcgtcctgtgtcagctgataaactgcatcacctgagatcatgccgccgtaactgccgataaattgtttggtatcaagcacatttaacacatccaaatgtgcttgattggccaatgcaactttaactgccttgttgaaagctaattcagcttccttcgatccgtctacaggtaccagcaagcgatcatattcttgatccattccgctcacatcctaactttctaattaacttaagcatagaacggtgaggaaacgaatacaagaaataaatttgcacttttacatggtaatctatcttcacaccatgtaaaatatatgccagtaacatccttgaagcattaacatacaacttgcagaatggctatcattatttattaaaatatgctttacttttgcggttttatgattgatttaatgcgtaatgatgctatattaaagtgagtaagctgaattcttaatttttaaaaatttggcgttcaaaatgaaaagaagcgtggtgaaattaatgattacaaatggtgttggcagtgttttacgacaaatccgtaaaagtcgtggcgaatcaattgtagaagttgcaaaggcaacccatacttccccggcaagctttaccaagtgggaaaatgatcaaacaattccaagtgaacgcagtattcgtaaacttgcagaatactatcaaaccgacccactggaattgctcggtgttgcataccctgataagtatgcgaaacagcaagaacaggaaaaagcagctgcagaaggctcaacgatccgcattgaagatctcatcggaaacaattccgttttgacctacaacggctcgccgctttcttcaggaaccaagtcactcgtcgcagcattcattgctggtcttattatttcacagcctgaatagttgttcgaagtgatgaaggagtcgtctgaaaacggctctttttttgtgagcgcgagccggcgcgcttaggtatcggagtgtaagtggcctcaggcgtgatggctgggctttggccattgcgcctgaggtccttacacgtagatccctgcgccggggagcgcgttatgggagtaagctggaacataagtggcctcaggcgtgatggctgggctttggccattgcgaccaaggtccttacacgtagatccctgcgctggcgagcgtgttatcgtcacgaaaaactattcagccgttgctggtcaccatccatttcgcgtatactaaagtcaaacgttttcacgatggaggaattaaatttggaaccatttgttcttaatatcaaaaacggcctcaactttcgcgatcttggtgggtacaagacgaaatcaggtcaagtgattaaatcacgtaaaattattcgctctgccagattaagtgaactgtcagatgacgacttgcaatatctggcagactatggcctgacaaccgatgtcgattttcggtctccggaagaacaagcagccgaacctgatcgttatcccgaaaacacgacttatcatttcgtcccggttttcccaacagatgaaaccaaaagcagcgaacaagccgatgctctacaaaaaagtttttcacgcgatccccacgctggctttgaaaatatggtcaaaacttatgccgatattgtcaaaatgccttccgcgcaaaaagcttatcggcagttctttgatatccttttaagtcatcaggaaaatgacggtgctgttttatttcattgcacggctggtaaagatcgcaccggcatgggcgccgtttatttgctgtcagcattaggcgttgacggccacaccattcgccaagactatctggcaaccaacgatcttattcagccaatggtcgagaaaaatcttgctgccgctcgcaaacgcggtgcaactgatgctttgcttgccaacattcgcgatctcggcacggtctccggtgcatttcttgatagcgccttagccaccattgatgctgaatatggcaacatgcacaattacctgaaggaagccttgcaattaaccgacgccgaaaagcgtgatttacgcgaactttatcttcagtaattagcgccaaaatcgtcatattctgttcacattttagcggtactttaacatcgtcgtgaaaagcgatattcacctcctgcccattatcctgcactttccgaagttaaatcagggaagtgcgtaatgtaaaagcgctgttcggcctagccgcatggcgctttttgtctattaaaatgactgtatcataatgcgttcaccgacgtaggaatttacagcattgcgattttttgcgttcgtcaggtcatttagctaaaataatggcaaacaccattgttaggggtggcgctcatggatcttaaagctacgattaagcagcacgccaaagatctgggtattgacaaaatcgggtttacgacagccgataactttgctgcattaaaaccaagccttttggcacaaaaagctgccggccacacaactggctttgaacaccagaatctggacgagcggctctatccggataaaattttcgaccaaccgcaaagtattatcgccattgcgctggcttatccctcgaaaattcacgaccgaccaccacgaaccggtcccaaacgtgggcgctttgctcgtgccagctggggaattgattatcacacggttctcgaccggaaaatggcagcactcattcgctttattaaaaaaaccgccaagtcacagactgatatccgctttaaacccatggtcgataccggcgaactaattgatgtggcagttgcccaacgagcagggctgggttttatcggtaaaaatggtttattaattacacccgagttcggttcctatgtctatttaggcgaaatcataaccaatattaaatttgcccctgatgaacccatgtcatgtcaatgcggcacatgcacccgctgtatcgacttttgtccaccgcatgctttactcggcgacggtcgaatgaacggacaacgctgcttatcttaccagacacagacaaaagggtttatggacccggaatttcggccaatgattcgcaatgttttatacggctgtgatatttgtcagcaagtgtgcccgttcaacaaaggcaaagattttcacgttcatcctgaaatggagcctgacccggatactgtcatgccggaattgatcccgatgctgacgctaagcaataaaggattcaaaaaccgattcgggaagcttgccggtgcctggcggggaaaaaagcccttgcaacgtaatgcgatcattgctcttgtcaatctccacgatcgcagtgccgtccctcatttgcttgaggtgatcgataccgatccccgccccatgattcgcgcgactgccgcatgggctgtaagcgagcttgccgcaaccccaaatgctgaattgacaacattcctggagaaagcgcaagcaaaagaaaccactgctttggcgcaggcagaatttcaaaaagcacttgagcgaatcgcgcaacgttgagcatgctataatagaaaataaagatgagaggtgcctattttgaaattatatcaaggacttacccaagtacaggtcaatgaagaaatggccgatgatgcgccagacttcaagatcacaaccgatctagttaagccgctgcattacgcgccatcagaactctatcattacttagacgctgttttgaaaccaggtagtcggcacgatcaaaacaaccttaaatatgtcacagatgccgccttcattggtgagaattttgacttcaattcggtgccttttaccgctaaattgaaagattttgaggccaagatggcatttgcccgaaatctggtcagcgatcttaaccgccacgttgccgtcaatattaatacccaagaccatacgtttgagcttttgtttgtcgattaatgacgtcatatcgaccagtcattcttcccgttttgattggcattcgcccattgtcaagaataactctaaaaataccgcaagccgatcacatgaaacgccgatcaggttgcggtattttttaattgtttaattgattgatgaccaaattcagttctggcgcaacgccggaataacagcggtcagttgctgaacaactaacacggtcagtgccattttaagcaagtcgcctggaatataaatcagaacgcttaaaatggcaggcacaaatccgatactggtcgtggccgttagccataatgcgcccaaaagttctgtcagcaaaacgccgccaaatgtcatgccgattgcttttgtgagccagaaatcccgtttcaggaaatgcgtgatgcccgcgtacgctagcggcgtcagcaaccagccatacataaagccggctgtcgggcccataaagacagcaatgccaccgcgtcctccagtcaacactggcaatcctaacgcagccaacgccagtaacatgccgatcgtaatggttgccggacgcgtcggcaataacatggcgaccaacatgacacccatattctgtaaaacgattggtacacccaagaatccaacggtaattggtggggcaaatgccaacccgattaatacagctaacaataaccccatccgtgtcaacgtctttgtatgcatgacgccacccttcctgcttttgtatttcattaagcataccatgttttgtttacaattgatcaaagaattcgttcatggcctgtctctttagtgttctttttaatctggttaatttaaactgacgaaccatcgtgccatctcactcaagaaccatcgcttaattgcgtcagcgcaaacacaacatgacgcggtacccggcgcagaagtcggctcgtgctcaaataaaaaatcgcggatattatcgtcatccgcgattaaggcctgcccaggctggattcgaaccagcgaccctttgattaacagtcaagcattctaccactgaactactgggcaataagtatgtatagtatattctcatgtttcttagaggaatgcaatacttttgtttgaatttccggcattttttcagattcctcttagacaaggtgctgacaggtgccgtacttgccttgaattttgaggtagcatcgtgatccctcctacccgctatctcgtcacacatcgttcatctttttcctctataatgaacgtgaaaggttgtgaacctatggaaacgccatatcctaatatgcaagataaccccaacctgccagttgaatcaggcgatcatcaaccgatttggcaggcactcatcaagaaaatgccaccgttgactgacttgcgcgtccttgtcattcattgtggcgatggctggttttgccgttatgctttgaaccacggtgcgacagctgttcttgggattgacaccgataccgaagccattcaaaatgcgcgtgcagctgcgagttctgatcggctccgataccgaatcatgcccgatcggtggttgaaattgctgacgggtccctacgatttgattgttggcgcattcgaccaatcgccagcggaattaaaagcgatcactcaggttcttagtgccctgctgaatgccaaaggacagttagtggctgccgttgcaccgccaaaacaaccaaccggtgatcagttagcggtcgaagaactgatcagctcacaattggtcattaatcgttggtaccaggttaccgacaaacggctggctgaaaccgcacaactttatctactactgagttcacgggtacattaagcttatctctctaaaatcaaccacgtaaaaagcacgcgttagcaattcctaatgctagggaattgacgcgtgctttttaaactgattttaactgattaaagtttgccgatgcttagttgatcacttcaacggttgcagaaagcactccggctgatggaatgtccttaccctgcattgcgacgtcaagctggcgcgggttgctatatgcaaatgagccagtatcattaacggttcgttctaacacttgtccgttagacatggtgattcgcagcttagtacctttagggaagacgctcaggtttgcagccacaccttcgtaacccatgttgctacctaaaacagacgggtcatagaaactaattttaaaagtgcccttattagttgatgtttgggtcgtctgggttgctggtgcttgctgttgttgaacggcagcctgagatgcagctgcctgctgctgtgcttgttgctgagcagcggcttgctgttgtgcctgttgttgagccgcagcctgttgctgagcttgttgttgcgcctgctgttgagccgcagcctgagccgcgctggaagcagcagcgttggatgccgcaacgctggaagctgcagcgcttgatgcagcggcgcttgaggcagccgcattagaagctgcagcactttgagcagcagcatcggatgcagcctgattattatctgtggatgtttgcgcaacctgttccgcagtcgaggttgtctgagttggcacagcagtggcatcagccttcttggtcaatgatgataattgctgcaaggtgttgatgctcaaataacgttctggaacccaaccatggtcagatgtttcgtaccagatttctgcgtaaacttttttactattaataaatttaagatgttcaccggttgctacataacgcttaacttgctgtcccacagtcggtgaggtccaaacggttgttgcaccgccattataagtgacatcagcttcagtcttatcactggctggtgcgctgacggtggtgtcagtatctttcgttgccgcgttaacgtgacctggttttgacaaggcaacggcagataaagcaacggctgagaataatactgtacttaagagctttttcatgttcgagttcctcctgaatttgtgtggtgacttaactaactgtcgcttagtatagtcagtgagtattacgaacatgtattcggcgtgttgcgtttaggttaagttctatgacaaaagattacattagattacagctttaacataacagtcggcacaatcaccctcatttagtcagtggtatccagccttcaatccgcaagcaggtcaccatttaaccgctacatagctacctggtttcgtatttgtttacagctcggaaacatgcttcatcattgtcgatcatttaaacagccgttctaaaatagccgtcaaaacctgatgtcccggctctagcagtgcttcgttgaccggcgcttgcggtttatcagctaccgcgccaatcgctgtaatcattgcaggcgtgacttccaaatgaaattgcaagcccacaatccgctcatgataagcaaagccttgcagtgcgtgctcattttcatacagtatctgactgccgggtaatcgactcatcgcttcgccgtgccaatggaaaacattcaataacgtcccatccgttccttttactgtcccgatgccttcctcaggtttcggcatgcgatacacattggcgccgaacgctttggtaatttgctgtgctccaaggcagatacctaaaacaggccggttaagtttgttcagactgcgaatcaaaatccgttcagcagcaagccaatcgagatcatcattcacactcatcggcccgccaagcacaatcaacccatcaatatcagctggatttaactgggcaattggatcgccttggtccggtcgataggtgactgtttcaatcccctgatctgcggcccattctttaatcaccccaagatcttcggcatttgcatgttgcatgactgtaagcttcatccgcccatcagctctcctttattgttcatcttcaccttttagcaccgcggcaaacgcctttattgtcgtcatcccgggattataaatagcaaaataaacccgtttaaaagcaccggcgaattcaggcatcaacaacgtgtcgcgaaaaatcttggcaaccggtttgacgggattcccaaaaacgccggtaccaaaagctcccaaaatgatctgatcaaccgcatgcattttaaaagcacgtaacgtttggagaaccttaaacgcaatatcatgcatggcggtttcgtcatctaattgcggatctacccgacgatcaggagcagctactgtgacgatatcaacatatttattcggtaatcgccggccttgatcgtcaaacacctggcgcacatgttcagcataaatcagtttggaactaaagagcccgcgattggcctgctgacaattgacatcatagtaatcggccatatgttgcttcaaggcgggcaccaggaaagttcctttggcaatcgattcctcttgggctcgggcgccaaacatcacaccaccgcctggatgaatcggactggcaaaattcatcaccccaatcttgcctgtcaactcactcataagctggaaaacatccacattccgaatagcaatttgcggcgcagtagaaccttgtgccggcgtttgcggtaatggttggctgatcagttccgtctttggcatttctggattcgctttaaaaactttcatcgtttcccaatacatcttaacctgttccatcttaatcttgctcctattcaaaataaacgtggtcaaacgcgatcagcactcggtgtatacgcgctttatggtgtggccactcacggtttgacatgacaacacagattcttacgcgcagataaccacgctgacagacgctttatatcaaatgctgccatctaatcaagccgccgcaactaccccaaagtaatttctgaccgatctcagcataacatagaagcaatcaactcatgaattatcgttcatccggccaattcaatgttaaaattaagtttgtaagtaacatgaaatgaggaatggaatacatggaaagtggccaaatcgtccccaatttattggtgatgctcgtcacctttttcttcgcggcattttttgtcgcctgtgaatttgcattggttcaaagtcgtccgagtgccttggaagatatgattgacaaaggcacaggccgcaaagcgaaaatcgagcgcgccttgcgaatggtgcacaacttgaatgaatatttgtccacaacccaagtcggcgtttcgctggcaggtattattttagggtggattggtgaaaccaccgttgaattcctgctggtcgatttgttcgggttgacgcatttaagcttgcctaatggtagtttacatgcggtaggtgcagttttaggggtcattattttaacttatttggaagtggtgcttaccgaaatcgtgccaaaaaacatttcgattgactatccaattaaaacgttaatgttagttgtcacccctttgcattatttccacattttgttcttccccttcgtctggttactgaatgtcagtgcgaccggcattgtcaaaatgatgggcatgaagccggctgatgaaggtaacgaggctttttcgcaagccgaaattttgagtcttagtaaaaacgccgtaacatcaggcgatatggaacaaaacgatgtcatctacatgcagcgggcattcgagttaaacgacaagaccgccaaagatatcatggttgatcgcaccagcctgtttgtgattgatattaataccaccgttaaagaagccttacgtgattatttaacccaaggctatagtcgcttccccgtcgttgcaaatggcgataaggacaaaattttaggctatgtctacatctatgatctggttaaacaaggtcaggtggatccgtccgtcaaagtttccaaactcttgcgctccatcattaatgtaccggaagtaacgccgattcataacatcttagcccagatgatcaagaagcaaacgcccatcgttgtcgttgtggatgaatacggcggcaccagcggcattgtgacagataaagatatttatgaagaacttttcggcactgttaaagatgaaattgacgatgtgtctgatgaatatattcgcaaaaccgacaatcctaaagttttccgagtcagcggcaagaccacactttgggactttgagcgctatttccacaccgacattaaagcgttcaccgactccgaaatcattaccatagccggcttcatcatggaaacacatccggatctaaagttacatgacaaggtcaaaatcgatcactttaactttacggttgccgatttctcccgcggttttgccaactggtttgatgtgactgaagacccaaagccggttaagcaaaccgttgccgaagaggttaaagaagccaagagccagcatcaagactaatgttgtcacgtcatctgcttttgttggtgaagtttttagctcaagacaaaaatatgcggccttattaaaacaatcaaggcccatcattcatcgtttcaaaataatagcgtaccatttctcgacttttgcaagaaatggtacgctttttgactctttcgtattagtagcgtcaactttaacgatttcagtgcctgctacttccacgccactgcctaacgcttcatcctgtgctactttccccagataaactgcaacatcgcgcggtcaacggcgacattgtgttcatgcaagcgactgtgttgggcatgcggtccggtcactgctaacgtttgatacttcgttagccctcgcaacaaatagcctagactcaaagccgaattaacgcttacgaccgtatctgtgtcactgccgtcttgaacattaccataaatattcaaaaccgatttagcccggaagtgttcacgtctttgcaaaagtcgcgcgtactcgggtcgaattaaactgggccgcccatcagctgccaattgcagttcatggggtttgtcattccatcccagtaaaccatcgtatgggccggcaatcacaactaccttttccagttctaccggtgtttgtgccatcgcggcggcaatcacggcataagcgcccatactatggccaaccgcatttagccgggtaacgccatagcgctgatgcaacatagttagaattttggccagccactgactatcgacttcttcgccagccgtattgttttgaaaaatcacctgaataatgggtgcagctgtggcatgcaagtctccttgcacatttaattggccatttggactgacggtcacgaccatgcttcgtttggccaccccggcagcctccgccgattctataagttggttagtggaaaacgcggtcccccgataaccatgaacaaatatagtcggcgtcgtatcggcttcgactaattgaccgcttggggccaagccaatgatcagaaccgccacaactagcagtattcgtttaattaaacgcatataatcctccaccttgccagcgttcgcgcacatagcggcccgcgtaagcaaggaaaagaggaatcgtcacaccagcagcaactaaaacaagtaaattcggatcgcccaacttttccagcacatagccgaccgccttgtgcccatacattatgggtagtgtactacgaccaatgcgatctagccagtctccaagcacggttccggttaatgttttcgcaccggcaaataaaccgccgcagataataaccggcacaaagctagcaagtaatggatccgttagatggtgcgacttcatgtaaagcaagaagtcgatttgaccgcgcgactgggcaacaaataaaccggcaaaaacaccaagcgcaactagcataaaccatggttgcgtgacaatatggcgagcgtaatgaaataaccaccagcccacaaacatgtaaggcaatgcaaccaatactaaatcaagattgccgggaatcggaaatcccaaaacattttcagcgttagggtaactaaaccctaaccagaacaatccggccattaaaattgcttcgtgccagacttttggcaaatacccgcgcaataagctaaacagcaagctgctgaacgcatataccgtcacaaaccagaaaactgacaagtagccattcaattcggtcccaccataaattaaccgtcgcaaataatcaacggtaaacgccggggtgcgctgttcaatgataaagttcaacaagattaacccgacgccgtaaccaaagtattgtttcaataatggccaaaaacgtcgcgctagaaaagcttttaaggttggcagcgttgtcggcttaacaaaaaaaccgccaatcatgaaaaacaacggcatatgccaccaatacagactttcataaaaggttgtgttgcgcggatagaaatgtcccagcacaaccgcaatgattccgaggcccttggcaacatcaatccattcaattcgctgatgcgatgatcggactttcacgtttttaaacgcccctttcgttcgactaacttacttttagcctaacaaggtgagtggggtatttctttgatcgctttttaaagattttgtgaaggccatttacccaaaattgtcagattacgtgctagactagattataatgtttttagaaaggacacgatattgttgacaacaactgatgttaatggtcatccctacaatcgtttgctgcttgtcattacgctactgatcgggacctttacgacttttctgactcaaacgattctgacgactgcctacccgaccttaatggcggattttcacattagcgccagcgcggttcaatggttgacgaccggcttcatgctgattatggggattatgattcctgtttcggcttggctgctggataaattcaacgttaaacatctttatttaaccgctatgacgattttctttttggggtcgctgctatgttggctcgccaatgattttcaaatgttgctgcttgggcgactcattcaggcaatcggcgttgggatgtcgatgccaactttccagaccgtcatgttcaccattttcccacctgaaaaacgcggtagtgccatggggttggccggcattgtgatcgggctggcaccggcaattggcccgacgctttccggttggattctgctacatcacacctggcgtgcattgtttgcggtcattatgcccatcgctgccggcgttgttcttttggcgatttacagcatgcgtcaggtgctgcctacttcgcatcccaaaattgatgtgccgtccattattgcctcaacgttaggctttggtggcttattgtatggcttttcaacggttggtgacgctggctggacagattcgcaggtactcatcagtctggcgattgggatcgtttttgtggctcttttttgctggcggcagttgcatctcaaaaccccactgctggaattacgggtttttaaatcgaaaacctttactttgagtgtcattttgaccgctgttgctttcatgtccatggttggcgtggaaatggtgctgccgatgtacattcaaacgattcgcggcgaaagtgcttttcactctggaatgatccttttccccggcgccattatgatggggatcatgagtccgattactggccggatttttgacaaaatcggagctaagcgtttggccgtagctggattatttctcttagttgccggtacgctgccattgatgactgtcaccgcaacaacaccgctaatttacatcacggccatttatacggtgcggatgtttggtatcaccatggtaacgatgcccgtcaccactgccggtatgaatgcactgccaacccatctcatcaaccacggcactgcggttaacaatacgattcggcaggtcgcggcttcaatcggcaccgccatcttggtttcggttttatccgtcgtcacaaaaggcgccacgccctcagctagcgggaaagttctggatccgattgactacaccaacgcgatgcatcaagcaactcttgctggctatcgtgctgcttttgcagtttcgctggtcatggccgctttagggttagttctgagtttcttcttgaataacgatgccatggatcggaggcacccatcatgattattctgctgttgattattggcgccgttgccttcttttggacgatggtattgatgaagcccaaccggcgtcgtcccttggcaatcgctatgagcgccttactaattatgataccggttgtacttttgagtttgaatgatttgtatcacatcggctttacgattgacgaatccactgaattgcaaccgctagcgcctatgaatgaccagttacaaattcaaagccaccccatcggcacggctaagaaacacatggcttatcaatatcgtatttctggtgatgcaacgattcataccgttaagccaagcactaccgtcaaaaccaaactgacacacggcacgattccgcaagtcgccgtgactgcgcagaaactcgagtacaccaatattttcaccgctattatgttcgccggatccggtgaacaaggcaaaaccattggcaagatttacacgttcactttaccgagtaattggcaggttgtaagtttttaaagtatctatatccgaagtggttgagccataattctactcaaggacatgagattcattaaattccgaatacttttatagaatgagttattaaaacagttccgggccgtgccaaactacgcaatctccggccagatggggctggaacgctgtgacggcgcttggagcctgcaagcccggcagtctcccagtcgcctaacaacatcagcgacgaaacccggtcgctgtgttgtttacacggctgagccccatccggcctacgattgctccgccttggcactaaaatctgtcaagtctctttatactaatgcaaggaatgtaaaagacgaaccacttctcgattttagcgagaaacggttcgcctttattttgaagctgtgaattatggtccagcctctataacctctgaatttccatacggttgaataaaagcgcaaacgtcttacgccaacaacattcgatacaacgtactgatcggcaaacccatgacgttgtaaaaatcaccattgatcgccttaaccagtaaagcaccagcgtcttgaatgccataagcacccgccttgtcttgataggcgtcttcttgtaaatacgactcaacttcggcttcatcgagcggccaaaatgtgacatctgtggccacgacttgttgccgaaccgtgccattgtccaaccgcacccacaagcccgtatagacttgatggttttggccgccgagtgtagtgatcatttgcttggcttctgcacgactatgcggcttacccagtaattttccttgaaaagccaccatcgtatcggccgcaataattgttgcccccggatagctcggtactaacgattctcctttggctttggccagactctggacatactccggtggtggcaaaatcggcaacgcccgttcgttaatcgtcgcaggatggctttcaaatgcaggaataatgcgcttgagtaaggcttggcgccgtggtgaatgactcgccagaataatcatgcctgcatttccccgctttcatgactgtcttgaattcgcttgaacattttttccagatcggtgttggaaaagtggaccagaaccggccggccatgcggacaattgaatggattttcgcattgcggcagtttctgcaataacgcccgtgcctgctgatcgtctaaatgatgattggctttgatggcccgcttacagctcatcatgatcgccgtcttctcccgaaaagccgcaacggagatcttgccgtcacgcaaaacccaatcaaccatttctttgatcgtgtcttcttcctgaccggctttgaaccacgtcggatgatgctccaccacgaaactattttggccaaaatcctctagatacaagccgaccgcttccaatacatcccgatgcgtgcggatattgatcgcatcagccgcagagtaatccagcacgatgggaaccagtaaatgctgctgatcgttgctgacttcaccaattgcctggcgataaaactcataattaacccgttcttgggccgcatgttgatccaaaatatacaagccgtccccagattccgccagcagatatgtcccgtgaacttgggcaaggtaggttaaatcgggaaaacgttcagtcggttccggtcgcttcaaatccgaagctgcggtatcctccaccaaggcaggcgcaacattggcatctaacgtttgataacgctgatcccaagtagccaagcgctgtggctcatcaaaaattggccgatcatctaagtcgttgatggttaaatcgactgctgcttctgcctgcgctgccggttgagaagtcggcgtattgccagtgttagtgtcggcgttttcgcgcacttcagcaccttgatgcggcactgctgtcgtcttcggactgattttattaagggtcagttccagttgatcaagatcataacgctcgcgtttgggcaaattatccatggcatcgggaatcaggttttccttggctaagcgcgcacgaatggcctcactgagcaagtggctgagctggtcttctttacttaaccgcacctcggctttggttgggtgcacgttgacatccaccaaagcggcatccatctgaatcgaaatcacgcccataggatagcgcccgaccatgagtttggagccataaccggcaatcacggctttcgtcaactgaaagttcttgatatagcggccattgacgaccaagctcagataattgcgcgatgcccgtgtggtttcaggcaagctggtcaagccactcaccttaaaatcaagatcctccgcttgaaaatcaaccattgaccgcgcaactggcaaaccgtaaatgccggccaatgtctggcgcaggtcaccttgaccggctgtccgcaccatcatattgccgtcatggctgaccgtaaacgcaatcttagggttagctaatgccagccgactgacaatatcaacaatcttgccaagttcggtctgttgcgacttcatgtacttcagccgtgccggagtgttaaaaaacagatcgctcacttcgacatcggtaccgcgacgatgcgccgctgtcgtttgactttctacctgtccgcctttgacatgaattttagcgccaatcccggcatcggtagcggtcgttagcgtcacatcggcaaccgctgcaatacttgccagcgcctccccgcgaaatcccagtgaatgaacattaaatagatcacgcgtggtcagaattttactcgtcgcatgacgcaagaaagctgtcgccacatcgtcagggtcaatgccgattccgttgtcgctgacatgaatggcttgcaaacctgccgctgataccttcacgtcaatttgggtggcttgggcgtcaatactattttccaccaattctttcaccacgctggccggccgttcaataacttccccggcagcaatttggttacttaaagtggcagatagttggtgaatttttggcataaaatcacttcttctttaaatgcttttgcaggtcaaaaatcaaattcatcgcatccatcggcgttgcatccatcaaatcgaacttagcaagcttggctaaaatcggactattcttgggtgcaggtttaggttcctcaaacagtgataactgctgatcctcgacttggctggtagctgccgggacggttttttccggagttgccgcttcgagttgtttcaaaatggtatccgcgcggctcaataagtcggcgggcaaaccggctaatttggcaacgtgaatcccgtaacttttatcagccggtcccggcatcatcttatgcagaaacaccaggttgccgtgttcttcaactgccccgacatggacatttttcagctttgccaatgaatccgataaactggtcaattcgtgataatgcgttgagaaaagtgtcttggcatggacatgatcgtgcaaatattcgattatcgcctgagccaatgccatcccatcatacgttgccgtgccgcgaccgatttcgtcaaacaggatcaaactcgatgcggttgcatgactcaaagccgcatttgcttccaacatctcgaccataaaggtactttcgccatttgctaagtcatcggcagcgccaatgcgggtgaagatttgatcaaaaatcggcaaatctgccgtgtcagccgggacaaacgatcctgcttgagccatgatgacaatcaatgccagctgtcgcatataggtgcttttcccggacatatttgggcccgtgatcagcagcatatccgtatcccggtccatgatgacatcgttaggaatataactgtcttgccccaaaacatgttcaactaccggatgccggccgcctttgacgttaatgtcatgggtcccggcatgcatcgtgggccgcacataatggttattctctgcaacggtcgcaaaactttgcagcacatctaacgccgaaatttgagcggctaaatgctgcagccgtttaatctgagccttgactttttcccgaatatcctggaaaaggtcatactcaagcgcggttgaactttcctgcgcctctaaaatcagcgtctctttttctttaagttccggtgtaataaaacgctcggcattggttagcgtctgtttgcgttcataccgaccttctggcaccttatccaggtttgacttggtcacttcaataaagtagccgaaaaccttattgtaacggattctaagattgtgaatgcccgtcgctttccgctctgaagcttcaagttccgctatccactgcttcgaatttttcatggcatcgcggtaagcatctagtttttcattgtaaccgcgcagaattaagccgccatctgttacggaaatcggtggctccggctcgattgaccgccgaatgagtccggccacgtcactaaccgggtctatcttaccgcgaagttctttaaaactgccatcatcaagcttgctcaaaacatcctgaatcgccgggacttgatccagcgaggtttgcaactgaatcaaatcgcgcccgttgacggttccaaaggccacccgtcctgctaaccgctcaagatcatacacctttgtcaaccgctcttgcagctcactccgctcaaaaaagtgttccagcaaatcctgcacctgattttggcgcacactgatggcgtcaatgtccaacaatggccgctccagccactgcttcaataagcgcccgcccattgcggttttggtcgcatccaataatgacaacagcgtatcacctttgcgtccggtacgactattttgcagaatatcgagattgctgcgtgcatcctgatccatttccaaatacgcggacggttgataggcaacagccttttgaatatgtgccagactgcgcttttgggtgttcaacaaatacgccatcagcatttgcaccaccgcggcttcggcaggatcggttaaatcttgggaaacataactaccttcactggtcggcttcgtgtcttgctgcactgatagcaggcgctctccttttttaagcatcgcggcatcttcatcgttcaggtcttctggcaccacaatctctttggtggccagcgcgctcaactcattttgcaaagcgaacttacttttcagatccgtgactttcagttcgccagtggaaacatccccgtaagcaaacgcgtacccggctgcgtgcggcaaaactgctgtgatatagttattggtcttcgccgcaccggccttaatatcgacattcgtgccaggcgtgattaactgaatgaccgcacgtttaaccataccgactgctttttttggatcttccatttgctcacagattgctaccttatagccatgatcgatcaaaatatcgacatagctttgcacagcatgatgcggcacccctgccattggaatcggatcatccgcgcttttattccgcgccgtcaaggtcagctcaagcaactgcgcccccttgatcgcatcatcattaaacagctcatagaaatcaccaatccgataaaataaaaatgcatccggatactgcgctttaatcgcattatattgttgcatcatcggcgtatcgctggttttttgcggcacaaaattcaccctttatcctttgactttctctgacgttctattattcatattttaccagttccgtcaatcccacagtttaaaaagtaagtgtcaagtttttctcggttctactctaattaagtgatttccgttactccgagctggctccgcggcgattgggctggaacgctgtgggcacgactttgaacccgcaaagtgcgcggtttcaaagctcggccttggtctaaagcggagaaaagcactccgcttaagaccaatttcacagctgagcccatcgccgctccgccagctcttgctttctatgctaataatcgaatagggcggccaatcacactgctgctggaatcgtctaaactgaggggtacctttatttgccttacacgtgctccaagagaaacgctaatgcctaaaaaccggccagattcaaacaatccagccggcagcttaccgaaacttatttcttcaaatgataactgtacgtcgcaataatcacattttcccggctagcaaaagcagcccgtaagcggaaattggtttggttgtggagaatgttctgccactttttgcgcgggacgaactgcggaatgagcaccgtggtcgtgaaattacgcttagctgcattgcgggctacgatgtcgacaaatcgaatcgtgggcgcttcaatcgagcgatatgacgaatggatgtctacaaaccgaacatccggaaagtctgcccgaaactcactttgggtttccttttccttattaggattctcatccatcgacacatgcatcgcgatgacataatcgccaatcgactgggcataattcaacgctgctcgggtaacccgcgtcacattgccgacaaggacgataacggtgctaccgtcatagtcatgctcttcaacatcggccggcaaccgtaactgcgccgccactttgtcgtagtgatctcgaatcttgtagaacaagaagatggcaagcggcatgacgatgaagaacggccaaatatcaaacaagcgataagcaaagagaatgactaaaatggcaaaggaaattaaggctccggagaagttggcgaccgtcttgcctatccagcctttaccacgattgcggaaccaatgaatgatcatgccggtttgcgacaacgtaaacggaatgaacaccccaacggcatacaacggaattaatcgctccgtggacccctggaaaatcgtgatcaacgccgctgaacccagcgccagtgtcaggatcccgttggaataacccaatcgatccccacgatccaggtacatatgcggcatgaacttatctttggctaaattaaaggccagcactggaaaggcagaaaagcccgtattcgcagcgactgccaaaatcagcgccgtcgcaaactgaacgacatagtacatgattccagtaccgccaaatgtttctttggccacctgcgacaataccgtcactttcgccattggcaccaaaccataccagtagtttaaaaatgtgatgccggcaaagaagaagcccaaaatagccgccataatggccaatgttttcgccgcatttttttcttttggtaacttaaagaatggcaccgcattgctgatcgcttcaaccccggtcagtgaactggaaccactggaaaaggcgcggaagattaacgccatggaaacaccgggaattgcagcaccgaccatcgatgttgccttataaggaatggccccggtcacaacttgatacaacccccagataatcatcgcggtcataaccaaaacgaagaggtacaccggaatcatcaggaaattagcggattcactcattccgcgaagattcatgcccattaaaataaagataatgacaagcgagatggcaacttgatggccataaagcgctgggatcgcactggtaatcgcctcagcccccgccgaaacggaaaccgaaaccgtcagcatgtaatcaatcagaagtgaagcgcccgccgtcaaaccggcattcttgcccagattttcgctcgcaacgacataggctccgccgccacttggataagcatggataatttgccggtaagaaagtgtcagcgagatcaggagaatcaacacaaacgccgcaattggcaatgaataccagattgctgcagctgacaaggttgtcaaaaccaagacaatctgctcagtaccatatgccacacttgacaaagcatctgacgacagcatcgccaacgctttgaagatgtttagctgttgtccgccttcttcggaagatttcaatggccgtccaataaacagccgcttcaaatgcatcattttaaactcctattaaccttaattgaaattttaaaaagtaaacatgcaccagtctacgctaaaaattgcccagcgcctaccctctttcatcttaacctatattgattggcaacaacaccgccattttacgaactcgcgcaaaccaaaagaaaagcgatcaccctttcgtctgaccgaaaaagtaaccgctggcaattaagccttctcgactatcacaacatcatgaacctttagcttgcgatggacttcatgttcaatctcgcttttggcagcatgatcgattttcaattcatcttttggcgtatccggcaataacttttccaagacaaaatcaatctcggtatctttgattgtccgtttatcatgcgtcagcacaatgtcaatctggtcaaagccttcgacataataaacatgtactgaaccaagtgtgtaaagctcaaagtatttaaccggcttgcgactatagagataacgcatggtattcggtagcattttatgcaggctggcgttaagtcgaatcggattttgaactagtttcatatcaaccgctccctttgctaatgtgagcgcgagaaattcattaaacggaccccacgcattgcttgactgtcgctatcctggcaactttaaaatgataaccaagatgacttatttattttattttaccaaggaaagccggtcaatgcctattattgcgcttaatgccgctcagttaccatctttatttgttaatcatggtcatcttgtttcacgcctcaatgatcgtcagaattaaccgaatctgttccttatgtacaacaaaacaccagcccggttggggactggtgttttgttgcagccttaaacgccgaggcgaaattacatcataccgcccatgccagctgctgggtttgcgcggcggcagcgttgttatcttttggttcaggcttgtcagccacaactgcttctgttgtcagcaacagtgctgcaactgaggcagcgttttgcaatgcggagcgggtaaccttggttgggtcgataatacctgacttagccatgtcttcccattcgccggttgcagcgttatagccgatgccttgcttttctttcttcaacttttcaacaatgacagaaccttccttgccggcgttttcggcaatctggcgaactggttcttccagtgcacgttgaacaatgttgatcccggtctgaacatcgccgtcttctttcaaagcagcaacagcaggcaatacgtctaccaaggcagtaccaccaccagcaacatagccttcttcaaccgcagcacgggtcgcgttcaaagcgtcttcgatccgatacttacgctctttcagttcggtttccgttgcggcaccaaccttgacaacagcaaccccgccagctaacttagctaagcgttcttgcagtttttcacggtcgaaatcgctggtcgtatcagcaatctgcttcttgatgatgttaacccgttcagcaatggcatccttggaaccagcgccatcaacaatggtggtgtcatccttggtaaccgtaaccttgcctgcacggcctaattgttcaatcttggtatccttcagatccaagccaagatcggagctgataacagtaccacctgtcaaggtcgcaatatcttcaagttgagccttgcgccgatcgccaaagccaggcgctttaacggcaacaacattgaaggtgccacgaatcttgttcagaaccaaggtcggcagtgcttcaccggcaacatcgtcagcaatgatcaacagtgccttaccttgttgcacgatttcttgcaagagtggcagaatatcttgaatattggagatcttcttgtcggtaatcaggatatatggatcatccagatcagcttccatcttgtcgttgtcggtaaccatgtactggctcagatagccgcgatcaaactgcatcccttcaacaacagaaagttcagtatcaatccctttgctttcttcaatggtaatcacaccatcatggccaactttttccatcgcgtcagcaatcaggttgccgacttcttcattagaagaggaaacggaagcaacttgggcaatttccttcttgccgttaaccttgtggctgatcttgtgcaattcgtcaactgcagccttggttgccttttcgatcccggtccgaatgccgactgggttagcaccggcagtgacgttcttcatgccttcacgaataatgctttgtgccaaaaccgttgcggtggtcgtaccatcaccggcaatatcattagtcttggaagcaacttctgcgactaacttagcacccatattttcatagtgatcttccaagtcaattgactttgcgatcgtgacaccatcattggtgatttccggtgcaccatagctcttgtccaaaacaacattgcggccttttggtcctaacgttgtcttaactgtgtttgctaactgatccacgccacgcagcattgcggcacgtgcatcctcagagaatttaatttcttttgccattgtttttattcacctcaaaattgatcaattattttttacgcaattgccataatgtctttttcgtgcagtacgaggtagtcttgaccttcatacttcacttcagagccggcgtatttgtcgtataatacagtatcgccaactttaacggccattggcagacgcttgccttccggtgtcaaagcgccttcacctacagcaacaactttgccggtttgcggtttctgttttgcattgttggctaaaacgatgccgccaacggtttgttcctcttcttcaacgacctcgacaatcacgcgatctcctaatggttttaacaaggcaatccctccacattacattttttgatttagcactcgttgtgtctaagtgctaactacaaaagtaactataacgagttttgcgggtgaatgcaacccccaaactccggaatgttatactaatttcagacattttttaaaaggagtcgtttatgtcacttcaaaaacatgctttttctattattggcgcctacttggttgccttcatcgctaacctccttatttttcaggtattgccggttgggcgccttagccttggtattgttaccttaatcagtatggtcgcactcattatcgcgattttgagcgagcgtaacttagtgattgccaacgcgattgaagcacctggcgttcttgccccgcagcaacgcgtcttctggggcgtgatgggcattgccggtgttttggcagcgcaactggttggttcgtggcttgaaaccattttattcaaaatgccgcaaaccagcagccaaattcatcaacagctttccagtatgacgactaatccttggtactttttgaccattggcttagcattgccgatcttggaagagttggcttttcgtaaagttctgttcggtaatctcgtcaatgtcaccggtatctttggcggcgcgctcatcgccagcctcctatttgccgtgacccaacccggtggccactggcttagtgcaactctggtcgggttggtacttgcttacgattatcgccacaccggcgccatcagcacgccgatcatcgcccatatcggtgccttatggatggtttggctttattacattgcccattccctataaacgtaaccgaatattaatcgcacccatcaccacaatctcctataatggaaaataatgcttttacgaaggagttaaattatggagacccgctcaaatcaccgtcagcgtcaaaaaccccgccgatttcactggggaagactcatcggtttaatccttgtcgtcggcctgtttacagtcggagcttatgcgttgcgcttatacagtcaggcaaaatatgcgattgacaatacataccatgccaccaaacacgtcagcacggatattgcccaaaagaaaccatttgctgttttgctactgggagttgacacaggggcagacggacggattgaaaaaggcaactcggatacgatgattgttgccgtcattaatcccaagactaaaaaaaccaccatggtcagcattccgcgggataccgctgctgaactgattggtaccaaagaattcaatatgcaaaaaatcaatgccgcttataacgtcggcggttcggacatggccatcaatactgtctccaagctggtcaatgtcccgatttcttactacttaaccattaacatgggcgcacttgaaaaggtagtcaatgcagtcggcggaattgacgttaacgtcccattttcattccaagacccgtataccggcaaccagaaattcactaaaggcaacatgcacctaaacggcaatatggccctcgcttattcccgaatgcgtcattcagacccagaaggcgattacgggcgccaaaaacgccagcaacaagtgatcaaagctattttgaaaaaagccatatcagtgggatcactcggtaatttcaccaaacttatggacacggtttccaagaacatcgccactaatatgagtttcgcagatatgcaaagtatcttcttgaattatcgtgatgccgccaagaccatctcaaccgatcatttgcagggcgtcaatgcctgggtcggggacggcgcctatcagattgcctccgatgcggaaatgcagcgagtctcaaataaactccgcacagctctcggcttacaaaccgaaacgattagcaatgaagaaaccaaacaaaacgcgaagaactcgcaatttgactttgaagccacaacggatcaaaactacattatttataccccttatgatcgttaatggccgttaactgtctggccgaacaatcatcaaaatcaatcagaacccacaaaaaaagtcggctccggcgctgcattttcatgcgtgctggagccgacttttttacgccataaaggcatgtttgcataaacttcatgacttaaagccagtttcaaactgttttggttttcaacgatgtttgcgatcctacatgttctcgccgctgccaccatacacctagcccaatcaccatgccaattgagacaacatatgatattaagcgattttgtaagatccaatcatcaaacgtatacggaatcaccacgagtgcgtatgcgagaattaaccatcgcagcttcggcaacaataggacatcgcctgaatgttctagggaaatccgatcaaacaaccaccttatcaggaaataaccgccgacactcgccagcatcgccccgataaatagtaaccaaaaaagttgattgccactgggaatcagcgtgtgccaaaagctctttttgactgggccgtaaaatctaatcgaatttataaaccgttctattgcgctcatgccaaaccacgtaccaaacaagccaaaaacgcccatccaaaatggcgaggcaaagatcgtgccaaccccaatgccgactgtaaacataaaactgttgacggcgagattgattaataatgcccccacaatattagccccgcttagaccaacatacatcgcaggtacggcggcataaaaacctaaaagcgtgatcccaataccgattgttgttgcccctaataaatacgcaagaccatagccatagcgaactgaaaacagttgtcggcgccgaaaccggctcgtaaacagtgccgcattgagaccactggcttgatcaacgccggccatcgctattccgacaagcaaaggaatagcatacgaaacaattgtcatgaccagtcccgtgaaggatggtgcatacaatttctgcttgtcttgcggagcgattaaatacttttgttgttcttgatattggctataagacatgttggcaaacgtgtcatcatgatgctttgctgcctgctttttagtagcggtaaattcgctaggactcagcatgtactcctgacgattctggtagccttgtatcgttccgccaagattgagaaatgccagtaaaataacaaacacaaacacaacgcgcaacagaactttgtgccgtgattgaaccagcttcagtaactgatggtcatacattatttcacccccgaatgatgtggtcgaaattcaactttgaacaaatctgacaacgacagcggcaaactttcattcagtaccggttgctccgctgccaatgctgcttgaatctcctgattgaagtccgggaaaaccgcctcaatcacccgcccgcgaatattcaggattcggccatactgcttgactactgccggaattttattggttttaaacaccaactgtaacttcaccgcttgctgccgaacatcttcaagggtcaaatcgcgactgatgcgcccccctttaacaaacaaaacccgatcggataagccgtccaactcaatcagattatgtgaggcaatcagaaacgtacgctggccatccccaaccgcatccacaaccagattgacgattttttcccgaatcaaaacatccaagccatcgaatggttcatccaagaaaacataaggtgcctgactcgctaaagccaacgcgaccatcaccagtgcctgataacctttagataggctctggaaacgggcggttccatttaggccaaacttttcaatcaagtgcagaaacgcggcttggtcaaagtcggtatacagcaatgcgtagttggcggcaattttaaccagtgaatatttgcggaaaaacaaatgctgctggtccaaataaaaaatagcttctcgctgggccggttcggttgccaaatcatgatcgtcaaccttcaccgttccgccatccgcaatatactgatggatgatggtgcgaaaaatggtggttttgccaataccgttgggaccgactagaccgacgacctggccgcgatctaacgaaaatgtaacggcttctagcaccggttgctgatcaatctttttttgcaaattcgtgatggtgagactcatgcaggttcctccttttcatttagccaggtatgcagcgtggcaagactgataccgagactctgcgcctcaaccaccaacgcatcaaatttagggcgaaaggttgccactgctgctgcgttggcatgtttcaacggttcggcaataaacgagccacgtcccggttcaacaaagataaccccgtcagcttcaagctgcttgtacgccttcgcgaccgtgttaggatttagctgttcttgcttcgccatttcccgtacggacggtaatttgtcacctggctgcatgatgccttgaacgactctggctttaatttggagcaccagtcgttcatagtaagccaagtgagcataagactcagtcgccatgaccgcgcctcctttcgtattatgtgtactattatacgcagtacactaaaaagtgcaatataaaaacgccgcttgcctgctaaaggtaaacgacgccattatggtcttattcaggcttctggttcgttgagcgttggcccataatgttccaggaagtaaatcaatgtttgcaactcggtggctaaatccacattctgcacgcgaacataactcggtaccgaaatccgaatcggggtaaaattcatgatccctttgatacctgctttaaccaaatcatcggtaatgtgctgagcagcatcaattggcaccgtcaagatcacaatttcaatttgctgatctttaatctgtttaatcatttcatccatcgggtaaatcggaacgccgctttgaatcgttccagcgagcttaggattaatgtcaaaaccggcgctgatccggatgttgtttgcctgtcgaaaattataattcaacaacgcatgccccaggttgccgaccccgactaaaccgacattggtaagtcgatcctgattcagaatctttttgaagaaattgagcaaatccttcacatcataaccataaccgcgtttgccgagtgcaccgaaataggaaaaatcacgtcgaatcgtcgccgagtcaacctttaccgcgtccgacagttcagttgaactgatcttggttgtcccggaattagccaagaaattcaagtatcggtagtacacgggtaggcgtttcgccgttgctttggggatgatcgtttccgccatgtaagcaagcctcctgtagaagtattcccatgcagaacatgtgaactgtccaacatagtatcttctgcttatattagctggtttatggcctgaacgcaagcggatacatcttcacaagcagattttgccagctaaatgtatcggcggggaatgcgcgcccatgaacgaaactatgttatattaggtcttaacgattaattgtgaaagaaggtattcctgtgatcattttgcaggcacaacaagttggccgcagcttcaacggcaatgaattatttgccaacgtgaacctggagatccaagacggcgcccgcatcggccttgttggtcccaatggcattggcaaaacaacgctgctggaaatcctgaccggtattgctcccccggacgccggtcaggtcaccaccatgaagaatctatcaattgggtatttagctcaaaactccgggcttgattccgacaaaacgattttcaaagaaatgctgaccgtctttgctccgcttcaagcgatggcgcgtcaaatccatgatttagaggccaaacttggcgatcctaaactgattgccgatcaagctgcttttgcggccactatgaaacaatacgatcaactgcagcatgactttaatgaacaaaacggttatggctacgaggccgaaatccgttcggttctacacggctttcagttcggtgaagacacctatgataaacccgtgggtactttgtccggtggtgaacgctcacggctagcattggccaaactgctgctggaaaaacatgacttgattatccttgacgagcctacgaatcatctcgacatcgaaacgctgagctggcttgaaggttatctcaaaacataccccggtgcgatcttaacggtcagtcatgatcaatattttcttgaccacgttgtcacggaaatctatgaactggatcatcaccacgcaacccattacaaaaccaactacagcggctatctcaagcaaaaagccgaacgccaggcccaagcgtggaaagcctataacaagcaacaagaagaaatcgccaaactacaggattttgtcgataaaaacattgtccgcgccagcaccaccaaacaggcacaggcacgccgaaaacaattggaaaaaatggacgtgctggaaaaaccgaccggcgatgataaaaccgtccattttaatttcacgcctaatcgaccaagcggtaatgaggtcctcaaggttaatcaggcaacagtcggttatgaagccgatcatccaatggcaggtcccatcgattttcaggttaacaaatacgatcgcatcgccattatcggtccgaatggggtcggcaaatcaactttacttaagagcatcttgggaaaaataccgttcttagccggcactgccaagtttggcgccaatgtcgatgttggttattacgatcaggaaattcaacaactcaatcccaaaaataccgtcattgacgagatctgggatgatcatccgatgatgccggaaaaggatgtacgcgctgtccttgctgccttcttattcggtgccgatgatattcaaaaaccagtgagcgcgttatccggcgggcaaaaagcgcggctggaattaaccaagttagcgctgaaacacgataattttctcgttctggatgaaccgacgaaccacttggatattaacagcaaagaagtgcttgagcagtcattaaaagacttcaacggtacggtcttgtttgtttcccatgaccgttacttcatcaatgaactagcaaccaacgttatcgccatcgcccctaccggcagtaccacgtatcttggcaactgggactactaccaggaaaagctggccgaaaccaaagcccaggccgaagcagcagcggctgagtccccaatgaccaaatcggaaacgaccggtgccacttcttatcagcagtccaaagaagatgctcgagcagcacgcaaattgcagcgtgaagtcgcggatctggaaaccaaattgcaaacattggaacaacaagcaaccgccattcaaaagcaaatgaccgcgccagatgttttaaccgattatgttaaaatgcaaaaattgcaaaccaaacttgatgcggttcaacaggaaaccaaaacgaccgaggatgcatgggaagaaaaaagcattcaacttgaaacgatgcaaaatgagtctacctaacccttttcgttttgataaaagtttgccgttgactgtcagatgacaagaatataaaagaactggttccaacaacaaatgctgctgttagaaccagttctttttttgcacgctaattggtgggatgtttaaaccttttgatcgagtagtcccaatgcctggcgtaaaactttttcgccatccatcatcccataggctttcatgtcgattaccgccattggaatctttttctcgtcagccttggctttaaactggctttccataaaccggacttgcgggccgagcatgaggaccgaaactggctctgaggcgagcttgttgtccgcatcggcagctgcagttgcaaaaacatcgacgtcaataccatctgcagccgccgcttttttcattcgttgtaccagcattgaggttgacataccagcggagcaaactaacatgatcgttttttgagccatgggaatcatcctttcgttaacaaccttatcaataagttaagtctaaccaaaacagttagacaacgtcaataaaattgctgtcgcgggtgacgattacttacgcatgggcaaaactcaggccgggatcggcatttaaatcttcagaagcgagatgccgttttgccagttcaatatgagctgcagccccaatcatggcaccattgtcaccggtcaggcgcaatggcggcacaatgacatcgacatcgggaaaatgaacggccaaggtctcattcatcgcttctttcagcccttgattagcggcaacgcccccggcaatcacgagctgtttaaccggatattcggtcagcgctttttgggttttgtgaaccaacacgtccaccactgccgcttgaaaactcgcagccagatcttcacggctgagtgtttccccaatttgatcggcatgatgcaccgtattaatgacagctgacttcaaaccactgaagctaaaatcgagattgtcttctttatccatggctcgcggaaaatgaaaggtatcatgaccaagatgggccaagcgatcgacttcttttccggcggggtaagggatacccaatatccggccgactttgtcatacgcttcaccggccgcatcatcacgggtatcaccgatgatttcaaattcaccggcagcgcgcatatagaccagttccgtgtgcccgccggaaaccgctaatgccaacaatggatagaccaatggcttaacaaatctagctgcataaatatggcctgccatatgattgaccggaataagcggtaagtgatgggcatacgcaatggttttggcagccgttaccccgatcaacaaggcacctaccagtccgggtccatacgtcacggcaactgcggtcaggtcagtataagtcacacctgcttcttttaacgccgcatcggtcaccaacgtaatctgttccacatggtgacgactggcaacttccggtacaacgccgccaaaccgctgatgactcttgatttgcgtggcgataatgttcgataggattttggtcccattttcgacaacggccacgctggtttcatcgcagctgctttcgaatgctaaaattaattctcttgctgccacattattctcctctacaatcacgatgatcgccgaaattacggcaattcccgatacatatccagcgcatcatcatggttgctgacataatagccttttttaattcttccatcttgaaaacctaacgagtggtataaccgtttggcaatctcgttattggttctaacctcgagtgtgatcttttgactgccgtaatcaattgcacggccaatcatgaattgcattaaaaagcgacccagccccatatgctggtaagctggatcaacggcaatattcgtcacgtgcgcctcgttcatggtaaaccatgtaccaattaacgccaccatctgaccggcatcttcaacggcgaggtacaacgaatgccgtaccttgcgcagttcagagaagaaagcataacgatcccacggcgtatcatgataaattcgacgctcgatggccagcgctgcgtcaacgtccgcttccgtcattcggcgcaacagatattctttattgcgaacattgatcgtccgcggtttaaattgcaattcatcaggcgtcgtgcgttcaaaccacgacctaaactttctcaacataaacatcatgtcctttgccgggatgcgccttaagccagttgttttcggcttctgttaagcgtaaatagcgcggtacaaagtcataaaccgaaaccggtggcaagtctttgccaagctgtcctagtcgcaatgcttggggcaaattcagccaatccggggcaaaatgtgccaatccgccaagtgcctcaataatctgactccgaaacatgccagcatctacgccaacaaaaatgactggctggtgcaaggtcgataactccgtgagcagcagcgtcaatggaacatgtcgatccgtcaccacattcagcagtttacctttgtcccactgataaacccccgtgaacacattattccggcgcgcattcataatcggcacaatcatcgctttagtggcactgatgtttgacgctaaaacggccaagctggaaacaccaaccaacgcaatgtttagggtatatgccagtgttttcccagtggtgaccgcaattcgaataccggtataggatcccggaccatcagcaacgataatcttatctaaatcttcaggttgtaagccacttgcagcaaccagttcgtcaatggtcggcagcaattgttcgctgtgcgttcgcttgtgattaatcgttgtttgcgccaataatcgatcattatccaacactgcaaccgacatcgcctcatttgaggtatcaagtgctaataatcgcatatttaaacctccctccggcgatacaatcatggcaatagtttatcacaaatagcctcgaagcgtgagcatgtatatgcagagcttagaatataggtgcgtacttttagtgctatgattgagcaaccaattgaccgcaaaaccatcactttttgaaagagtagcagggttagattaaatcaacattaaatccacgcttgaccaggatcaggcaaagcaccgtttaaagccgccagcaaaagaagcacgccaccgacaataagcagcacctgtaacaagatcttaagccacagacgttgatgaatcacgccttctggagtccaatacaagtcggttgcactttgaattccagtggcttcattctccgctaacaagcgatcgtgtaaccacttcgccaaccaaatccaggccaagccggcaactataacactgatcatcacgacccacaatgccagatcacgcgtcgtcaaataattcgtagccatcacataaagacggctaataaacggcaaatggcgcaactcggtataaaattggtttccaagtgccacggcaaacgccagcccgctgatccaactaccaatcaacccaactcggcgaaccagacgcgcactcgcatcttcgcgatacaagttacgaatataagtcttccgcccgctacgcacctgattcggatacatcattttatgcgttgtcaattgcatcgccacaatctgccgttccaactgcaaggcccataaaccgactccagccaaagccagtgcagtcaaacctatcaacaaaagatacataaccggcaccctttctgtatggtgagcgtgagcaggagcgcttagcaatcggagtgtaagcggccttgggcgtgatggccgaactttggccattgcgaccaaggtccttacacgcagattgctgcgactgcgaacgcgttatggtgagctgagcgcgagccggcgcgtttagaaaccggagtgtaagcggcctgagacgtgatggcccgctcctggccattgcgactcaggtccttacacgcaggtttctgcgccggggagcgcgttatgggcgtaaaggcggacttgtggcctcaggcgtgatggccgggctttggccattgcgaccaaggtccttacacccagctttctgcgccgagtaaatcccccgcctaaacctttgattgtctattctaacaattaacggccccactgaccagtcaaccgctcaaccacctgctcaacatcaaaaaagcaccgaccttctgccatctaatcatggccagaaaatcagtgctgtttttagccggtttcaacaatcaacaatgtcaattaaagatgtggccgaatccgttcaacactttttagcgttgcgtaggacagcgccgtttgaattggcaacatgaccacgtttttaatcgtgcgcggccagataataccttgccatggcgtgcccatcatgtttagccacagtgtcgtcaaaataatattactaatcaacaacactaagccaaccccaagcaatgtccgaataaccgaaaccttcttaccgtggaagaacatcccgtaaatcatggctgcaattgctgcactaagcgtaaacccaggaaagttagcgccaggattaaagatcatgatcgacagctgatcattcaatgctgctgcggctgctgccatccatggtccgaaataataccccattaagatagtggcaaaaaaagcaggactaatcttcaaccacggggtgccaaaagaaaaacggctcaaaacaatctgcatagccatcatcatggcgagatacacaatgtttcgagtggaaagcttgggactactaaacgataaaacttgcattagctgcaatctccttttttgcggagacgcctaaacatcaggcgaatgcggaacctgcaccgcgacatctgtcttcgtctgccgttcacattccgttccggcagcacttaacgcgcaggttcctactcctagatttttgtaacgagtcttatcgtacaccgaaaattatctaaagggaaccccttaaatgttcgcattgccgttcaaaaaagccgtggtgaaatttatctcacaactttcacggtattttctagcgtgataccaacgatgctgccagactcttttgctaaaatattgactcgtaatcacatctttctggttgctctcattccctcatgtagggattcccttaacacttcactatcgaagtgtttttttaatcttttattttattaatcacttttcaaacacccgtggcatcgctcatcatcagctgcgccacagtatttacagccaaacggaaaaaagtccagacttatttagcagcatttcaaaaccgcttaccagtggttttgacacgtgaccattttaacagtcacgcctggaaaaaaagccgtataatgaatctcgataacgtgtgaaaggaagatccaatcgtgaccaaacacattcttgttttacatactgggggcaccatctccatgaccgaaactcgagatggcgatattatgccaagtcagcataaccccttacttggtgccgacagctttgttcctgccggtgttgaactgacaaatgaagaaatttttaacttaccttcaccgcatatgacgcctgaacggatgctgaccttggttaagcgtatccgccgcgccgaaaaggaaggggcagatggtgtggttgtcacacacggtacggacacactggaagaaacagcctatttccttgatctcacccttgattcggcaatgcccgttgttgtgacaggtgccatgcgatcgagtaacgaaattggcagtgatggcctggaaaacctccaaagtgcgattaaaacagctgccagcgatgaatcgcggaacaaagggactttagtggtcatgaacgatgagatccacaccgcccgtttcgtgaccaaaacccacaccaccaacgtcgccaccttccgcaccccgacatttgggccagtgggattggtgactaaagatggtgtgcgcttcttccaggaattaatcaatcaagaagtctgtgcgattgatcatcttgttgatcgggttttcttaatcaaggcttatgccggaatggacggcactttatttgatgccttaccggataatatcaacggccttgccatcgaagcgcttggtgccggtaatcttcctcccacaacactgccagccattcagcgcctgttagaccgtcacgttccgattgtgctagtttcccgttgtttcaatggcgtcgcccaggccgtttacaattacgaaggcggcggggttcagcttaaaaaaatgggcatcatcttctgccaaggtctcaatggacaaaaggcacgcattaagctgcaagtgggcctaagcgacggcaaacgcggccaagcattggctgactttgtggataatgctgtgagttaagtttgggcaattaaaaaagcagtcctaagtgatgaaaattgcttagaactgctttttattcccaaacaaaaacttttccctgcgatgtttaagcactgaagtcatcccagatcatctgtgcctcggcattcacctggtcattggttacaacccgatgcaaggtgcgcattggatcatcaggatcatgttgaaattgcgcggttggcgtggtgccatatgctacttcacgttcatatcgaatatctgcgccccgtaaagtatgcgtgctcaagaagtcataccctaggctgttttccatccattccagataatgagcgttattcacatgaccattgctatcaatgtcaaaataacgaacatgaaaagcttcttcaccatccggatcggtcacctttttaaaccgtgggaaccgattgattttacgatttgaaacggctccgacacgttcaaccagttcagggatcacatcgacaattttacgggtgcgcaaatccataatcacccaattgctgctcactgaaaccaaccgattgccttgcgcatcatcgatccagtaatcgcggtaagtaaaatacttattgtaagtggtggcttccgtgccgacacgtaaccgttcttcaatctttggcatacggtggatatccatgtgatactgggtgatcacccacccggcatgaaactcactgatcgcatcaatgccggcatgcaactgctccaattggcgttccgacacttccaacatgacattcatcatgttggccaatccggcgcgaccaaatcgatctcctagaaaacccggaattcgataatcttcttcataaactgctcccatgaaaaccccttctctttcaagctcggttttgtctcagtcctcagattctaaaaatatattcgtttacttatccaattcatgataagcatcataaaccacttgcttagccacgccattttgcttggcaaccagcttgatcgcagcattgggcttggcaccggttgccacaatcgctgccacctgttctttaagcggcaattgactgttaacagccggtttgtccgtcgcgccggctaccatgatgacaaattcgccttttaattcgttagctgcataggtttgtaattccgttaacgatccgcgaataaaggtttcaaactttttagtcaactcccgcgccaaagccgcctgccgatcgccaaacaccgctaccatcgccgcaagcgttttgcctactcgatggggactttcatagaatagcaaggtcgccggttcgcttgacagcttttctaacacgcgctgcttttctcccgttttgcgcggtaaaaagccgtaaaataaaaatggctgcggtggcaaccctgacgcaatcaatgcggtagtggccgcattagcacccggcagtggaacaaccggtatgccggcttcaatcgccgcgtgtaccaattctttaccggggtccgaaatagacggcatgccagcatcactcacttgtgcaatggtgacaccgttttgcagctttgcgagcagttcgggaatgcgcatttgggtattatgctcatggaatgaaatcgttttggtagcaatctcaaaatggttcaacaacatctgggtatgccgggtatcttcagccgcaataagatcaaccgttttcaaaagctcaactgcgcgaatcgtcatgtcagctaaattgccaatcggcgtcgggactaaatataacgtaccggttgtatgggtaccaaagcttcgttgctgctccaaatcaattctccccataaataatatcaagacaaaacgcacatggctcgtcattgacccggcgctggccataaaacattgggcaaacatggaagccttcattatagaggctttctaggttttgctttgactttgatagttcaacgccgccgtcactggttttgttgtcgtctttttccagttcagccaagtgttgacgcagatgcttattctcgatttcaagttccgcattgcgttcaagcgtctccgccatatcatctttcatcgccgcaatttccttgagcatctgctgggcgtgtttctcaaggactaggaaaccatcgtacagttctttcttttccacaagatcacccttctaagagtttaagcattaactgttctgttgccgattgaaacgtcacattctgcgttaaccgcacctgtgctgtcaaaatagcttgtaaggaagcggttaactggcggcttgataacttagccaaaatgccaattgcaggaatgtccagctgctgcggggcattcacttgaaaatgacgatttaaggcatccgcataagccagtccgatcaatgccaagacttgtcgctgtgcctcggcatctttggcaaccggcagtaactgggtttgcacgcgcacgaaactttccggatcatgatcagctaatcggtctaataactgaaaaacccgattaacccgatcctgaaaatcatcagacgccaatagttcctgcgcttcactgacattaccggttaagcgccctgccactcgcgccagctgcgaattggctccgccttcttccagcttggtaatcacagcgttacgatccggactctgaaaagtaatcacctgtgcccgcgataaaattgtcggcaataactgattcttagccgtcgccgttaaaatcaccgtcatccccggaaccggttcttcaaaaaattttagcagtgaattggccgctcctgccgtcattttatcagcatcttccacaataaacacgcgctgattgccttcaaccccggttttgctcatttcctgtttcaagttgcgaatgtcatccaccttgatactttgcgtactggttttgagcatcatcacatccggatgattatggtttaagatgcgctcgcactcaggacactcgccacaaggagcaccgtcttggacatgctggcaaaataggcgcagcgcaatccactcagccagcgctaacttccctgctccttttggccccacaaacaaataggactgggccaattggtgccgatcaatgacgcgggcaaattgggcaacaagcttaggctgcagcgtgttaatcagaaaatcagccattagaagcgatgaaaggcttcaatcggcagcacgaagacggtagccccaccgacttgaacctcaaccggatacgcaatcgaactatctgatgtcgcatcaagattaactggcggcgtcataaattgttgccgcgtctgggaagtctctttaataatcttaagcacttcatcaacccgttcgtcagcgacaccgataataaaagtggtgttgccggcttttaaaaatccaccagtcgtcgataacttggtcgcttgaatattagcatcaataaattggctgcttaacaggttactatctttgtcttgaacaattgcaagaatcagcttcataatatcctccctgcgctagttagcattgtcgcacacgacctagcgcattccattccttacttcgcaaataactccgggaaccgctctgtaatcgtcataaacgccgcagtgacaaccgccgcaagtggctgagtcgcatcaacggtgacgattcgcttaggattatcggcaaccagtttcatgtacgcagcatgaacccgctcgtgaaaggccagactttcctgatcaaggcgatcatattgacgttcgccttgatgagccatgatccgatccaagcccacctgtacaggcacatccaaataaacggtcaaatccggttccagccccgcggtcgcaaattggttcatttgtaacaccgcttgcgtaccgatttgccggccgccaccttgataagcaacggaactgtcgacgaatcgatcacaaacaacgatgtccccgtgagcaagcgccggctgaatcacttcaaccaagtgctggcgccgtgacgctgcgtatagcaatgcttctgtgcgtgcatccatggccgtattcttgggatcaagaatcacatcccgaatcatctcggaaattttcgcgcccccgggttcacgggtaagatgcacagaagtaaccgaacacgcctttaatttaggaattaatgtattcaagacgctggttttccctgcgccatcgggaccttcgaaggtgataaaagtgcctgtcacgatatgccgctccttttttggaattaagtccattttacttgaaatgtttcacaattaaaaacttatctttaaatccgtttcataaaagtcatgcaccaagacttacagcgacataaaaacggtaaatgcttagatctgaaaaagagatcatcaccatttaccgttaatgtgaaatatcgcgtgcttctaacatcaccgcgaagcacttgtcccgaccaaaaggaaaccggttcgagcagctgactgttactgatcccggaactccgcaatttgttcagccgcaactttggctacaatttcacccttgatcttgcgggtgcgcgcctcacgatagagaaaatcgaataaagctgcttgcagcgcgacttgtgattttgtctggtcatcaacctcacggaaagttgccacgagcttccgttgtgccgccatctgatcacgaactcgataaacaagcatcatgagttcttcgtctttttcttctttgaccttgatctgcttgcgtccgaacattacagctcagtccttccttcaaccgccttcattaaggtcatttcatcggcatactcaatatcgctgccaaccgaaaggccatgagctaaacgcgtcactttaatcccagccggcttgataaggcgcgcaaggtattgggctgttgcttccccttctggcgttgcattggtcgcaataatgacttccttgacggcggtattctttttcagccgcttcaaaaggctttcaatgttaaggtcttccgggccgcgaccctcgattggcgatagcaccccatgcaacacatgataaaggccatggtagtcttgagcccgatcaatactcatgacgtctttgggctgttcgacgaccaagatggtgctttgatcgcgatttttgtcacgacaaattgcacacggatcttcatcggtaatattgccgcagatcgaacaataatgcagatcttctttagccgcgaccagacttttagcaaatgccgtaacatcgtctttgttcatatcaatggtataaaaagccagtctagtagctgttttagcgccaatgccgggtaagcgcatataactatcaattaacttactgatcggttccggatattgcatagtaacccctcttgctaaaatcgtgatcgctatcgtgctaaatgacgaacagctttatcatctacatgattcgactaaccgccattaaccgcggcgtcttcgcttacagaatccgcttgatggtgggttacatcggaagtccgcgtgtatacttgccaagtttatcctgcgtttgcttgtcaatgtcggccattgcctgattgactgcttcaatgatcagatcctgcaacatatccggatcatccggatcaattgcttccggtttaatctgaatatctttcatgactttctcaccgctgaatttaacggtcaccatgtcagaagcagatttaccttcgaattctgtcgcgtatagttctttttgcgcggcctgcatctctttttgcattttctgcatctgccgcatcatactttgcatattacccattccacgcatatttgatcatcctttactagtcatttttgattgtcacattaggtgcatctttgccaaaaagttcagtcagtttactgacaaccgggggcgtctgtggcttagtctctttcgtttctgccttagctgccggtgccttgagttcctgaatatattccttgcgaatggtcggccagacatcgctttgtaccaaaacaatcttgggctgcttgccggtcaacttctgcaatccggtttccagttctgtcattaaggccgcatcgttcatggcccgttcaactaaaatatcatagtcgaagctgacaatcacgccatccggactggctgctaccggctcactgactttcatcatcgcacgtttggtaatactcagcattcccaaaaggtcaggccagacatcttttaaattggttaaatcctgcttggttgccgcgccgagaatcggataaattgccttacgattaacatgattggctttttgttttttgactcggcgggtacgcggtggcggtgcaatcgtaccaccatttgcttctacccgcttaagttgatcgctcaactgtttgactttggccgatagctgctcaagttgcggcgtcacggcgggctcaggcgcagcttcgacaaccggtttagcggtctcgcttagccgaaccgtggcaacttccagataaatttccgggtgattggtcatccgcaattgttgctgcgtcgtatttaacacgtcaatcatatggtaaatctgcgccggtttgaagttttcactcaaaatcttgaattgatcgtctagcaggcttttttctaactcgcctaataacgcaggtgcttgttgattgaccaataaatcacgcagatactcaatcaggtcttcaatgaggcgaccggcatctttaccggctgccagcaagtcctcgaccattttcaaagcctgcgcatgatccttagccaacaccgccgccagatatttgcctaaaacggctgtggtgacgccaccggtgacatcaagcgcatcctcagtcgtcacgtgattatcgccaaaactcaacacttgatccaggattgacaaggcatcacgcatgccgccttcagctgctttggcaatgaccttgagtgctgcatcatcataggtgatctgcttgtcatcaaggataaagcgcatccgcttcacaatatcttctggcgtaatccggcgaaaatcaaaccgctgcgtccgcgaaataatcgttgccggaattttatgcggctcggtggttgcgagaatgaaaaccacatgtgctggcggttcttctaacgtttttaataacgcattgaacgcaccggttgataacatgtgtacttcgtcaatgatatacaccttaacgcgtgctcgtgtcggcgcatacttggccttgtcgcgaatgtcccgaatttcatcgacgccattattggatgcagcatcgatttcaatcacatcggtcagactgccatcgttaatcgcctgacaaatttcacaagtattgtccggctcaccatcttcaaggtgtagacaatttaacgctttggccaaaatttttgcgaccgatgttttcccggttcccctggggccagtaaaaagataggcgtgactcgtttgtccggtgatcaacgcattcttcagcgtcttggtaatcgcatcctgcccaataacatccttaaattgctgcgggcgccagacccgatacaacgcttgataactcaccttttcgccccctcatgaatggcttaacatttcaatcgtttagcataaagcctcgttctagtttaccatagccaagccagaagatgccttgtattctgacaacaaaaacggccgctttataacaaagcgaccggtcaatttctcaataacaaaaggcacatgacgaacctaccttagtgctgcttccttccggacctgacacaattcggaaagccatcattgccttaaggccttgcggcaaaaaccattatacctgattttgatccgtttgaccagcctgtttggccgcttttcgttttgcccggatcgcacggaaaaaatcttgcaataaggcagcacttgcagtggcttgaatcccgggaacaacagcaacttggtgattgaatcgggtatcttccagcaaattataaaaagtacccgctacccctgctttcggatcagtcgcaccaaaataacaggtagcaattcttgcattaatcattgcccctgcgcacataggacaaggttctaatgtgacaaacaaactgcaatcttctaaacgccaggtgccaagttgacggcaggctgcctgaatcgccaatatttccgcatgctgggttgcatcctgcgtcgtctcgcgcaagttatacccacgacctatgatttgctggtcatgcacaacgacggctccaattggcacctcgccgatagccgctgctttttttgcttcgaccagtgccgcgatcatatattgattgatttccgaatccgtcattgccatcgtgaaaaagcggcctccattttagtgtgattatcagcacaagcctccagcgggttcatataccgccaaactcgcctcataccggttcttcttattgtaaccatttaaaagaaccgcccacaaggaaattttcccatggccggttctttttagatgcttgattctttaaaactgtttcaaacgctcaacgactcaatgctgctttcaagcgatcaaatgcggccagcccttgttcgcgtgctgatccggcatactcactggcgctgtctttgaggctgcgcaacttatcactgacccggagcagattggccacgtcatcatcgcttaatttgtccaaaatgctttgaacccgctcattgtcaccaaaaatcttcttgacgaagccttcaacctgtttccgctgatgcctgcgttcaaaatattccgttaaattcttggcacaaacaaatgcgccggttgcaatgacagcagcggcaaccgcacctgctgctaggtacttcgaatttgccatctaaatctgctcctttctatcctagtatgagtgtaccacgtcacgtattaaaactgttatttactcgctttgagaatgtaataaccgtgctctttcttaataacttccgcgttggcataagtggctttcattaactttaatgcagaaggcgcaccttgctttttttgaatgaccgcatacagctggccgcctggcaaaagatgcgcggctgctccggaaagaatgccggaaacaatggctttaccggcacgaatcggcggattggtcacgacgaccgcaaactgatcatcaatgctgtcgtacatagaactttcgatgatcgaaacattggtgatgccattatcagccgcgttttgctttgccaaggcaagtgcccgttcattgacatcactcatcgtcacttgccggttcggaaaatgctttgccagtgccaacccgattggcccatagccagcgccaacatcaagaatcggcccatcaggcaaggtttcggccaagaccgctgcaatcagtacgcgactgccgaaatccacggtatgctttgaaaaaacgccgttgtccgtggtgaaacgcaaacgatgaccgccaagttcgaaatcaaaagtgcgttcatcgtgggcaagatcaggatcgttcgtataataatgctgcataaaaacctccttgaacatgagcatgcgtgcaactcggcacaggtagatccgagcaaacaatcgcgtttagatttactttaacgactattttacactttgtctgcaagcatgcgtacctcactagcccgcatctaccaccgactgcttatttgtcaattccctggccaagacggcttacccaagccaaacgcttaggccaccacttaacaggcgatgcaatggtcactttttgattaaccaccatcataatctgcaacaacgtgaacagtaaggatgtccgcttacgataagcgacatatttaggaacccactctgttacgtatttgtttttatatgagcgtaatccttggaaaccatagaatcgatagccatattcataaaccaaatgggcaatcttttcttcgatgaaagaatagtcagacgttcccacattggcaagtggcgccatgcccatattgaaatacttaaaaccgcgctgcttggctaattggaacaggttgataaacacctcatccataattcctgacggcgcatcagcacttgaacgcatcaagtcaatactggtaacttcctgattaccacttggcatatcagaagcaaacgcaacgatcttaccttccgggccgcgaacaaccgcaatcggtgcctgattaagataatggcgatcgaaaaagccgagactaaatcctttttcgctgcgcccagccaaccacgaatcggataccgctttgagttcctgcattaacgcatcgtcaaacggtggctgcagtaattcaaccgtatacccttcccgttcgaatttatgcattaatgcgcgttcgcctttgcgttttgatcccgccaaggtaaaggtcgtgacatccacataaccttcttcaccaaacttcataaaatcaaaaccaaactcgtgcagcttcatcgttaggctttcattgatttcataaaacaccagtgatagatcctgcttatcggcctttttcatgaaatcaccaattgccgcagccatttgggtttcatccccgatcggttcgcccatgataatcagtttgtcagctttctttttgaataagaagaaaactcgatcctcaccgtctacttggtaaaagtgcagcgacttatcacgcatcaaagccaaatgactgacttcattgccgccatatttttcaaccactgcctttaagcgctcctcatcatagggatccgccaatggtttggaaggcgccgacaagtaacggaagattaagtacactgttaacgccgccagcatgaccccgattaaagtcgtgaaaaacatgcgctcggacgggaataagaagacgtccggcacatgacgatggtgaatcgccggggcattataaaacgcggcgaatgcataaaagatgaatgtcaggccaaaaaccgccccatcaatcagcttattgccccacgataaggccagccgttcacgagtcagttcccgccgcgtcaaaatcaaggccaggacaaccaataccaaaaagacgataaaacgcaggtgattgtcctcgcgcaatgacgcaatcatggcgacgatcaagacgatgacagtcggccaataagcgcgtttgacacgactggcaataccacgcccaaaccccagaatcaggaatgccacaaccacattcgtcacccgatccaagaataggaatgtatacggatatagtcgttgataaagcgtattccgaaacgccaagtccggtgctactccgcgcaacagcaacatgatcccggaaaagtacaggaaaataaccaaaaaaccgaacgcaactttacgaatcagctgaaccggcaagccttcaagataggcattcagacgtttccctgcatcttgagcaaacagaccggcaccaatcagaaatggaatcacatagtaaaacaatcgataaaacaacagccacacaacagcaacattgctatccagtcccaactgtccgagttcaaagatcatgaacacatcaaatgaacccagcccacctggcaccattgaaataaccccgatcacattggctaccataaatagcggcaacactgacatcaacggaatccggacctcaagaaaataaccaatgagcaggaagaaagctgcacacccaccccactccagaaacgagcctaatgttaagcgcaactgccgctttaatggcatatccgcgaagaactcactgtcgcgcacatgggaaatgaacatcaacaatggaaaatacgctgcgcccccaactagccaaatccaataattggaaaattcagcgccaatcccgaaaacaaagataatcacaatcccaatcattgaccacagcgacaagcctgccaacaggaacatagcgatcttagaaatagcaaataaaacctgcttctgcgttgccttttcatgatagaaattggcccgcaaactggctcccagcaagccaccaaaaccggcaatattcgtaaatgtattaacaatccaaccggacttaataacatatcggcgtggatagtcgcccggcagtaattcggtaataacaaaatcatacgtcagcatcggcgtcacagcaatcaagcccacgattagcaaaatgatcagtgaaccgggactttgcgtggctaggctcgcccgcatttgttcgccgctgagatcttgactaatacggccaacctcgaaaatcacaaacacaaggactgccagcacaaatagcacctttaacgttgtgagatgttttttaaaaaacgttccgacttttcgaaaaagtctcttcattattttgcgccctccgtgtttgtactcccatccattatatggaaaacacgacccgtccgcactcattctgacttttttgtaagacactgtaagtttgcaggaccttaacgcgttcactgacacagggatctacatgtaaggaccttggtcacgaggggcaaagagcgatcatcacgcccaaggccgctgacactccgctccctaagcgcgccggttttcgcggtccatataaaaaagtgaaaattttagtgtgaaagcacttgacctgtaacgcgttacacaaattacactgtgtttgcagttaggaaatggttttattggttgctagagagacaggttaacgaaatttggttgcgcttatcatcacgcgctccccagcgcagcagtctgcgtgtaaggacctcgaacgcaatggccaaagcccggccatcacgcctgaggccacttacactccgattgctaagcgctcctgctcacgctcactttcattaggaggtgattaacagcagataaatatatataacaatgtagcgtaatatggtatgttatgagcacgataattaagtggaagatgctcatatgctcaaaccagacaaaatggctaaacgcctcggtgtcactgcagaagtgggataagtctagaaagttcaaagcccacatagcaccgactaatcgatgttatgacacagaagatcaacacctagcctgtattggtcatgctgatgagtcaaagaaacatcgaccagttgcgtatgttttggctatgattggtttgagcgcctaaccccaaaaattcaacccgcagcttgtgggattgaatcatcctaatctatcacctcaagaagagctaactgaagacttaattagtatcattcacttattttcgtgtcggttatccggcttacgtaaatacaagaaaaagattgaagacgatccgtctttgaagtaagtcctttagttaacttgaagggaggtgaacacttttgattaaaacacataagatcaagctatatcccaatgcaaccatgcgtaaagaactagaaaaactgtttgattatcgacgcttcgtttggaaccaagggcttgaggtctggaatgacatgtatgatgcttctttagtcatgatggataagtcgatacggcctaatgagcgaaaagttcgtgatgaactggttatgaacaaagcagattggcaatttgaacgatcagcacgcgtcttacagcttgctgtgaatgatttaagtaaggcgtgggcaaactacttcaatcctaaaatgccaaatcatgaaaagcctaaatggaagtcgaaaaagcgctcacgtaaaacttttagaacggatcgtgcccagatagttaatggcaagctccgtttggacaaaccacacggcacaagggtatgatatgacatcaaaatggctgaacagccacgatggcaaggtgaaatcaagcaggtttgcatcgttcaagacgcagatggctactatgcatcgttgtctattgaagccacagtcatggttgaaaaacgaaccattcgccgggttactgccgttgacgtcaatgtgagcaagttcgactacaaaaccccatcaggttatgccattcagccaacactacccgcttctctaccagcactttacgctcgtatcactcactatcaaaaacaattagcacgtaagcgaacaacaaatccaaagcactttaattcagcgacctatcgcgcaacgagaaccaagttgaagcgaaactatcaacgcgttgaacggatacaaatggacttgttaaacaaatttacgaccaagctagttgttgatcacgatctaattgggatagaagacttggataatcagcacatgcgcatgaatcatcgtctcgccaaaaagctgcatcgttcaatgtttggcaaattcaaaatcatgatgcaatacaaagcggattggaacggcagtactttaattcttgccgatccaatgtttccgagtacgcaacggtgttcaaaatgtggttatatcaaaaccggtgaagagaaacttactttgcacggtaatgccaaataccacactggacatgatgattacatttgctaccaatgcggtgccaggatgcgacgtgatgagaatgcagttgataacctgatcgattatgcaaaatcaaaagtaccggggtaggctatacccttaaagttcaagaggcggtcactgtcatgatgaattatttcagagtgggaataccgctgttaacgggactaaatgaaatgctgaatgtcaatcaagaaaggaaatatatagaacctttattggtgtcaaagagacattcttccacgttttatatagcaggtcattttcatgttaatgcaaacacatttttactctgaacttcccgtttatcaccctacacaaattggggctttgaaggcgattgcgttaaagctgaccactgactatgactttgattatcaagaagttctcagttcactgttagcaagcgccgcagaggagacacaattgctcagtgatcggattgttttgacttacgggcacgttagcaagctatccgcgccaatggtgatcggattcgactttggctcccaattaccgtgggcggctggacagcaaattagcggtgcagtcgtgctgctagtgccagtctcaactgatgatcaaaccatccatgattggcttgatgcgattgcaacaaacagccgcgatcatcaagatttagaggctgtaactcaaatggcaactgctgctattgcttaaagcccgcagtcgcgtatccaagccgatatgcgtgcacgttaaacgcgctgcatgccatatcggctttttcgactgggtgaatcgactggtatactgtgtgtggaggtgctttcatggcgaatattcacgacattgcacgcctatctggttactcaaccgcaacggtctcgcgcgtgattaatggccatcgttatgtttcggctgctgcccgcgctagaattctgactgttatgaaacagcttgattatgtgccgagcacgatggcccagaatctaagcgccggtaagacccggacaatcggtgtcattttacctcataccgatcatccctattttgaacaattggtaacgggaatcttaaacgccgctatgatcggcaactaccacgccgttattttaccctcgcgttacgatcaggaacttgagcgcacttatctggaagcattgcgcagacaagcctatgatggactgatcttcacatcccacggacttggtttaagcactattgccagttaccaaagatatggtccgattgttgtttgcgaagatccgggccaggttaaacttgccgctgcttacgctgatcgcactcccgcttatcaagctgcatttaactggatgaagcggcaaggccacactagaatcggtctcttgctcagtcgaccttatgcgcaaagtgccacaagcaaactcacgattaatagttatgtcgatgtttttggtcaccgtcccgagcaatctttggtggtttatcaaatgcgtacttttcaagatggttatcgcgctggaaagatgcttgcggcgaaacagcctgattttattttgggtaatggtgacgatattacggcaggattgcggcaatattttgttgatcagcatctccctattccgccattaatgggtcaggaaaatcaactttccagtcggctactaaacatgagcacgattgatcatcatgtaaccgccattggtgccgcagctttaaaactggccttgcgtgcagaagttgctcagaccgtaattcagtccgatttaattcttcgtgattgatttttgtctattttaaccaaaatttaaccaaaataaaaaccggcattcagcatggcgtttacacaccatatctgtatgtcggattttttaaaccatagattcataaccgagcgttacaacgcttgaccggtagtcgatacttgtaacgaatcgttttaaagatagtgattagctttgcttgcgtttacgcttgatgccaagaagacctagcccacccatgactaaagctcctaagaaagcaagtgcgggccgtggcgattcatttgtacttggcagcgtatctttagtggacgcttgactgtttgcaccattactattggcgttttcggtccctgttggttgtgccggcgtttcttgcgtctgtttcttgtcgtcgccgcccttaggattggttgatggtgtgtcttttggttgatttcccttgtcagtgccagagcctttaccggcatctgaaccgcttccggtgtcagatcctttacctgcttcggaaccacttccagtgccggaacctttacctgcttcagaaccgcttccggtgccggaacctttacctgcttcagagccacttccgctgccagaccctttacctgcttcggaaccacttccggtgccggaacctttacctgcttcagagccgcttccggtgccagaccctttgccagtgtcagaaccacttccggatccgcctccaggttgctgtggtgtcttggcagctgcctcaaccgctgcggcaattttagtcttcaaaccaaacaaaccttgcaattgtgcaatcttttcagtatccgctttagctgctgtacctgcagcaatgacagcatcaacatcaccgtaccaggttttaccggtagtggtatctttggcattaccaactttgacaggcgttgccgctttaattgtttttgccaattgattcaatgcagcatctaataccttattgaagttggtttcaatttgatcggcggtactagttcctgctgtcgtttgcgcagcgacagcgtccagttcggcatttagcgttttaccggtgcttggatcggtttggccacctaaatcagttccaaacgcctctttggcagattgtatcttgtttagtagtgcagcttgttggtctgctggcagcttatcaaccaactgattcactgcggtggtcagctgcgttgttgccgttgtgagtgtttcaattgtggcatcagctttagctaaagcagtctgcgccgatccgatagcggtattcagagcatcagttgtggcgtcagtatactgagcgctcgctgcttttgcctttgcttgagtaagcaaatcctgcagcgttgttgtggccttttgtaactgcgccggatcatccgtcttaatattcttaaccgcgtaatctactgccggcgattcattaccgtatagatcaacagccttaaatttaaagtccgcgtttgccgatacactcagtcccgttgtcggtaaatcttggtaagtcttgccgccatcagtactgtattgaacggtctcacctgctgctgccttggctgtcaacgtcacttctttagctggatcagtcgtatttggcgtaattgttggcgctgcgagtgtcttcttaggctcataataaaccgtaatctttttagttgtgacgttactgccgctatctgttgccgcaacggttaagacattcttgccctctaatagtttcaccgtctgatcaattgccatatgacccggctgcccgctgtttaagttaatgtcctcatattgactggcaacctgactaccgttaattgccagttccaaataattaacgttatctgtcgctgttccggtgatacggaaattcggatcattcgtatagacaggtttgtccgtcgagctatcgagtgacagtgtcggggcaatagcatctaaaataaaggtcaagctgtcttgaaccgttttatcttgcgtggtatcaccaattacaacgccaaacggtttctgaccggctgtccccagattcaacttaaaactaaaggttagatcatcattaatcggtacttgtttaccatctacttgcaaagtcgtcgtcggatgcttgactttaccggtaatcgttgcaatcccggtcttagggtcatagtacttagcatctttaactttcagttgatttgccccgaaagtgacgccttggtcgaaggtcaccgcattttttaggacatcggcatcataagttgagtttaccttctgctgcttggtaacggtattgccatcttcatcttctgccgtcaccgtaatggtattatccccatagttaacgggtacatcgccactaaagtgatgtttggcatccaaagtaaccggtgttgtcgtgccaccgttagtaaccgttaccttctcagtgtcggcactagctgttccggttactttaacggtactttcggacgtttgatcttgattatcattaacccgcaagtcactaaaagtaggtgccgccaaccggacattcgtatcaaaatgtttaactaactgggtatgtgcttggtcagtataaagatcaaccttcgtcgcatagtcgctggcgtcaagtgccatagtggctttgaaactattggcatcagcgtcataagtggtcgtcaaatcatgctgctttccttgcgcatcggtataggtaccataaacagcagccggatacgtcccggtaaaggtgtaagtgccaccttgcttccctgcttgatagttagccgtttgactcgtgattttatctggtaaaccaccaccattaataatcagatcataagcagttgatccgggcttttgtgcggaagctgattgatccgtggcgtttgaggcgttatcggtcaaataaagttcaacattattatcgccttgacccaaggcttgtgcctgcttatccgtcagtggcgtttcgagttttgtgtagccatcagcagttgtccctgtcgtcgtaaaggtgccatcaagattggtgacttgattaaccgatgtttttgcactcttagtggcatccaaaccgcttcgatcgtcttttgcttcagcggtgagatagtaagtggttttgcctttttcctgtctagacgttaaagcgacatgacgaaccgttggcgccttagagtccagcgtgaatgctacatcgtatgtctgccgcttgtcgccgccttcaggaacacccgaaatacggtacgtgtagttgccatcagcggctgttttgatattgccatctcgttgatcataatacgtaccatcccaagccggtgcgcgatagtaagtatagttgcgaccagttgaatcataataagtcttagtctggttagtcgtactgctgagcgttgttactttgttaccgtgattatccagcacatcgacttgcacatcgctaatattgcgtaacaggtagtattgcatgctgatgtcattataaagcgcgttcttatcgctcgaaaaggccactgctttatcatcaaccgtttgcttgccacttgcatccgtgactaagccaccgtaatactgactgccggttttcttattggtgagcaccggaacagtcccataattgccaccagttggatcgtaagtcacgccattcaggctatccacgatcttcccgtcattccaatcaccaaagaagcccatatatggcaagttgagattcgagccatcatttcccttgaagttcaagaatccttcaacaaactgttgctgatcaaaagtcttaggcagtgaaagcgtgaacggtaccttcacggattttccagccggtaccacaatatcggtatccggcttgactgccgcatcagtaattttcttgtcatagagaacgcctgaattcggatcggtagccgaagtataaaccgcattggtgtcttcattgctagtcatttgatacgtcagctgatgcttggtgcggttggtaaacgtcaacttaaacgttttggtagtgctcgtgaaatctttcaattcaacagcaggatagccgttttccgaaacaaccgttgatggattcttctccaaagcatcaatcgcggctttgacatccaccaaccctgctccctgtcggcgtggagagacgatgacattattatagttaatatcattaatcggttttgcagtattcatttcaactgttttgaggaaatcggttaatgctgtgcctttaagttgcttatagtcggcatagaactcattgtctttattatttagcgcttgttttagaagtgcctgggagccggcgataaatggagatgccattgaggtccccgacatattcgtataaccattgttgttttgcgttgaccaaatattaccacccggcgctgtaatatcaggcttaaaggaaagatcagatacagggccatatgaagtgaaacttgacatccgatctgctttataattttgatttggcaacaacgccaaggcaatttttacgcccagactgtcatttggatgcgcagttacccagtcaaccagtttttggccagtcgtattggaaagaccaaaagtaggaaaagtagccgttagagaaatcgaagtcaaaggtgtggatgtgccatcattattaacaatgattaagcctgctgcaccagcggcctcggcatatttctgcttgtcagtgaaagtcagactgccacgtttgacaattgcaattttccctttggcatccgccgtatagtcgccagcatcacctgtacttaacttaccgcttgcgtctttgacaacgtagaatttcttctgatcaaaactgtcaacaaagtcattgcttgaaagctgtacggtttcaggcccgagttttaacccgctgccgtcagtaatcgtaacggcttggttgatgacatctgtattttcggccgatgcgacagtcgttgccccgcgtgatgtccccggtgtgccaaccgtctcattatcctgcaggccataataatctttgttgaccccttctgtacctgacccggatgtacccgaatttcctgctgaaataaccgctgcggtcccggattcattggcgttttgaacggctgcaatttcaggatcttccagtgtttgattgccggaaacagacccaagggacatattcaaaacatccgcgcccagtttggccgaatcttcaatcgcagaaacaagcgttgacgaaccagtcgtcgccgatgtatctgaattggtaaacaccttcatcgctaataattgtgattctggcgctacaccgacaactgacttggttggatcatcacctgtaccgttagccccgatgatcccggaaacatgcatcccatgctgttcatcaaccgtgtcgtcggtaatcgtgtcattgttatctgcgtaattaaagccatacggaaccttagccgtgaaataacgcccgtgtttagcagtactggtgaatttttcaacatctgttcgggtcaatttggcctttttagtatcactaagccgcatgtccttatggttggggtcaatcccagtatcaatgaccgagacaaccgtgccttcccctttatacttgtaattagaccaaaccgcctgcacatttgccattgaattggccttagcatcggttgggtaataaaccttggctaaagtaacggttttaacgccggggatttgtttcaaccgcggaatatcagcgactttgactttggttgtaaagccattaacaacgtaaccatagctttctccagctgtctgatgcgtcacttgttcaacggctgatttaacactggcttgagccgcgatgacctgatttgttgcctgctgaatttcggcagtactggagtaatcgggtttgagcgtgccattttcggaagccggtgccgcgctcatctgcacaataacatcgacataagtatcctgttgctgaactttatttaacttgttgtaatcaatgccttttgcggctaattgggtcgcaatggcttgattggtcaccgcactggtcgtgtctttggcagttcgtccagctgaggcagtcttggcttccgctaaatttgttcctttagtttgctgcgagattgccgctttagcttgaacttcaccaattggcaaaacagaaagtgctcctaatgcaactgtgctggctaagagaattgatagccctttcctttttgtttgcatcctataccctccgattcccagtaatttcaaaactattcaaaccttggcttgatatagttaagattatatacagacactcaggagtttcaacataatttttaatcttttattaattttcttatttgtaaaaaagctctcatgactgtgatactgggcaattcaggtatgctaaggcggaaaaatgtttaaattatgtgattatgaggaatatgttgagttttttaatatccaacgttagaatgtagccacgatctattccgcaatctgttaaaggagattgatttcatgaagaaaaaactgcgcgttccattcttagccgcaatgatggcatcttcaatcatgctattaagcggctgccaatccaaacaagccgatagtacaacggtcgctacatactccggtggtcaggtcacacaagccagtttttataaagagctcaaacaatccccgaccaccaaaaccgttctcgctaacctgcttatctatcgcgcactcaacaaagcgtatggaaaatccgtcagcgccaaatcagtggacaatacttataacagctataaaaatgaatatggtgaaaacttcacttcttttttgagtcaaaacggctttagtaagagcagttttcgccaaagcattcgaaccaacctcttaagcgaagtggcactaaaaaagttaaagaaagtcaccaacagtcaacttaaagccgcttggaaaacctaccaacccaaagtgaccgttcagcatattctaactagcgatgaaagtacagctaaacaagtcatcagtgatttagcagctggcaaagacttcacgacgttggcaaaaacttattcaatcgatacctcaaccaaggataaaggtggcaaagtaagctttgaatcgaacagtaaaagtcttgattcgacctttaaagacgccgcgtacaagcttaaaaatggcgagtatacacaatcaccggttaaagtcacaaatgggtatgaggtcattaaaatgatcaagcacccggctaaagggacattttcagacagtaagaaagccttaactgctagtgtctattcaaaatggtcgcgtaattcaagtgtgatgcaacgtgtcattagtcaggtactgaaagatcaacacgtcaccatcaaagataaagatctagcggatgcgcttgacagctataaacaaagcgtcgcagccaattagtccttagtttgctcacatgccatgaatttcttcctatttaataacaactttgtcattgatgttgttatttaaatcaatgacggcatcgtgagcttgagttgttatcttcggcagtcttttaaaatttatacaaaaaagcacctcgccttttgcggtattaccacgattaagcgaggtgcttttgtttgaaaatgaaactagattatttgagggttacggttgcgccgacttcttcaagctgttccttgatcttgttagcgtcgtcttcggacaagccttccttgataaccttaggagcggcatcaacgagacccttagcatccttcagaccttggccagtgatttcacgaactgccttgataaccttaaccttttcttggccagcttcggtcaattcaacgtcataggaatccttggtagcagcagcatcgccaccagcagcagcaccggcagcaacaggagcagctgctttaacaccgaattcatcttcgatcgacttaactaagtcgtttagttccaaaatggaagcatctttaagttgtgcaatgatgccatctacatctaaagccatgtttgtttcctccgttttttaaatagtttgtaacgtaaaattatgcagcaggttcttcgtctttggattctgcaattgccttgacaaccaatgcaaagtcgcggacaggtgcctgcaagacagaagcaagttgcgacagcagaccttcgcgatctggcatcttggacatttccataatggtgtccaatgaagcaaccttgttttcgatgatgccacccttgatcttcaatgcatcaaattggtcagcgtacttggccatgatacgggcaggggcaacaggatcgtcattggagaaggcaacggctgtagggcccttgaaaacatcatccaatgcttcgtaaccgttggcatcagcggcccgacgcaggtaggtgttcttcaagacttccatcttgacaccagcctcgcgcagttccttacgtaatgcggttacttgctcaactgttaagcccagatagtcgacaacgacagcactggtagcattcttgaattgttcagaaatcgtcttaacgagttcagctttttttgcgatagcttgttcactcatgtttttcacctccattagtttggttgaagtttttagcaataaaaaaactccatgtctaccaagacatagaggtatctactgtttccgataccacctcggcaggatgattaaggcttgcgccccctgagtcttaggcagagtgactaatcacaacgagtagaataccatggtcggaggttgatgtcaaagtgtttctgcaaaaatatattttgtgcgaatgccgagacttcaacaatcgtaaactgacacgttgaattgtaagcacccacagattgcgttatattagttaggtaactaattttttgaaaggaagttggcgatcttgccaagtaaacttaaaagtctcgagccatggcagcaaaatttagctgtcttgtggcttggcaccttcatcgccggcatgagttttagtgaggtttcgccgtttatctcactctatgtcgaccagctcggcgattttaccaaaggccaactcagtatctactccggtattacgtttggggtcacctttatggtagttgcgattgtcagtccactttggggccgactggcggatcgtcgcggccgtaaactgatgctgctgcgctccagtttcggcatggccatcattattggtgcgtgcgggtttgtgcataatgtttatgcgctcattgcattacgctttttacagggattagcagctggttacattcctaatgccagcgctttgattgccaccgaaacgccgaaagcaaaaagcggaactgccattggaattctgacaaccggctatgtttccggtaatctgatcggaccgattctaggcgggtttttggcccagacattttcaattcggctgactttcattattaccggagccttactcatgattgtctttgtgctcagcttaaccatggtgcatgaacactatacgcctgatccgcgcttgctgaacaagcaaaagcgtcccggattgctcactcaagtcggcaatcccaaggccatcatggtgttgttgatttcaactgccatcattcagctcggaaacatgtctatttacccaatcatcagtctttatgtcaaggaattaatgcataacgtcgggccgatcacagttgtcgctggtattattgccgcattaccaggtatttcaaatctgatggctgcaccacgcttggggcagttgggcgatcggatcggatccggaaaaatcctggtcagcggattgatttttgccgtgatcatgtacatccctcaaggtattgtcggcagtatttgggcattaggctttcttcgcctcatgatcggggtttcagacggtgccttattcccgacgattcagacgttactttcgaaaatgacaccggtgagctataccggcaccgtgtttagttggaatcagagtgctcaggcgttcggatcaatggcaggttcactggccggtggttttatttccaacatttttgactacaatggcgtctttatctttactgcattatgcctagcacttgaccttgcaatggtctggatcttcatccctcatatttggtcaagccggccacgacaacaggaataacgataaggtcgcatttcatcaagatataactgcacatcggtatcattaaaagcggttctagcacttaaactagagccgctttttgcatgcgatttgtgccaattaatcaagtttcatttgccaggtcatcagcggatgcggatccggtactgccagctgctgataaacggcccacgcgaatgaatcagtatcatcaaattcaccgttcaccaccgagaatgctgcctgaagccgcggtaaaactgcgcgcatcagccggagcgtatctgcaagccctgttccaccgagccaagcactcgtgagttcacctggctcgtcttcaaaccagaagacataagccaaaatggtgccgccttcaaccaaaaagctcggctggttcggatcggcttctcgcaatgattgttcaaattgcgtctgcgtcatcgtggccggattagcggtatgcgcgtccacataattttgataacttaaccgaaccacagcttgccactgagcctcggatagctgtgaccgtgccacgacggtatcattagaggtcgctgctgcaagtttccggtagtgactcatcgctgtgtgtcggataagttcaaaccctgcccattgcaattgttgcgtcaacggcgatgctgcagtataagtgctaaattgcaaccgatcatgcttacccgccattttcttgagtttggtgagcaataaaggaaaccaagaaccttggccaacgacattaaaatatagtgcgtgatcatggtaagcattttgccacacagctgccgcaaattgtatcggaccggtttttggaaaacccagcaaagtcgccgctgagttggcaaaaagtcctttcgtccagtcatcggctgtttccagcagcggccggatgtcagctaaagtaaccctgcggcagcccgcgtgattcaaattagtcatgatgatcggtatccttttcctgctcctgattgccgtgcaagtgcataaacccataagcaaagcgagccacgccataaatcaccggaaccacaaccccgatccaaaaatggtttgtcagataatactgcggcaatggattcatatcgagcgcggcttcataagccatttcgattgcaaaaataatcacggccagcaacagtgctgataaaaccccgcgcgcaaccgcaaaccaaacatattggcgataggcttccggtgtgtccgcttcaattacctgcaaacgatagtagtacaaacttgtcacgttcagtaacgcaattgccactgtcactaacagtaaaatccacgtactggcagtaattaacttaaggctattggcgtcgataaaaacagcaatgacacttgcgatcactaacataagctcggcggttagcatattgcggcccataatggcgtcataagtgcgttgtttgaaccgatccttaagtgaaataccataataccattccatgattttcttcatcaattattgccttcctcactttttacaatgttgttttatcttaccacgcctcacgattgctttttccttgaatcctccaagctttgaaaattatttggcttttcactcgctactttttgttaacgccacgatcccttctttacctcagacgtgcttactatgaaaattttcattgacagacccgcctttttttggtgaaataagtaacatgttttggggtgtcaagacacctaattaatgttggatttctcaagggggataacgatgtcaaagaaagcacctagccatacgcggttaattatcggaatcggcattgcctggctgtttgatgctatggatgtcggcatgctgagttttgtgattgccgctttacataaagaatggcagttgagtacggttgaaatgggttggatcggaagtgttagttcaatcggaatggcagttggcgccatcttgtttggtatgatggcagatcgcttcgggcgtaaagccattctcatccttacattattagtcttttcgattggcagtggcatatctgcttttgccacgggttatggtatttttcttgtactaaggtttattattggcgctggtcttggcggtgaactacctgttgcttcgacgttggtttccgaaagcgtcccggttgaaaagcgcgggcgcagcgtcgtcttgcttgaaagtttctgggctgcggggtggctactggcagcgatcatttcatactttgtcatgccaatctggggctggcgagtcgccatttttgccactggattagccgggttgtacgcattttacttccgtgaaggcatccatgaatcgcgcgcgttcaaaaaagtggcgcggccggggttaatcaaaaccctgacaaccctctggcggccaccatatgttcgttcaacactcatgttatggattgtctggttcatggtagtcttttcttattatggcatgttcctgtggttgccaagtgtgatggtgctcaaagggttcagcctcatcaatagcttcggttatgtgttaatcatgacccttgcacagttaccgggttactttgtggctgcctggttgatcgaaaaatggggtcgaaaaactgttttaagcctttttcttctcggcactgctggtagcgcgctaggctttggcatggcagccagcttaccgatgcttttgactgccggcatgctactttccttctttaacctcggtgcgtggggcgcgttgtatgcctattcgccagaacaatacccaaccattgttcgtagcagcggctctggcatggctgcaggtatcggccgaatcggtggcattgtcggtccgttattagtcggtcacctgctaggcgctaactggtccgtcacgggtattttcggaatcttcacggcgtctatcctcattgccattattgcgattattttccttggtaaagaaactatgggcgttaagttagctgacaccattgaaacttcaacagcgaaacagtagctgtccttgaaagctcaatttctttataggaaaacggtagagtatactaagatggtttttcacttagtcatcaggatagttatttagagacagattataataatcataaataaaggcgtactaaaaatagtacgcctttattttgtggtcatggattttttttagagtggctagattacccgcaaaaccaatttaaccacatcaatttcaaacatttgtcacacagaatccataaaaaaacgtgcttaacaaaaaagtggtgcaagagaataatcatctcttacaccactagctatttccatcagattttggtttatcaccagtgtatgggcgacattagtgatccaatattactttgatggcttattttccttctgatgtctggttcccgcaagaccaaacaatcccatcagactaacaatcagcaaacccaaaacagaagtaccgctttcagcatcatcaccggtctgcggtagcatatgcctccctgcatgatccgtttgcggtaatgaacctatctggattgtttgaccggcttgtgttggcttcgtttgtgttggcttcgtttgtgttggcttcgtctgcgttggcgtctgacccgatggcatactacctgtcgtctctccaccagtacttggcaaaatatgggagccagcggttgaccctgcggcactctgatcagccaaggatgtggcggaactaatggcagcagttgtcgcgctggatgctacatcggcggcgctacttgccttagcatcgtcagacaaagcggcactggcagcgctagaagctaccgaatcatcagaagcagcagcactggcggcactgcttgcttggctttcagcgctcttagcactgcttgcagctgcacttgctgcatgagagtatatacccgcagcactactgttaccagcctttgcagcactggatgcggcactggccgcgctggacgcgacactcgcagcactgcttgatacaacatcctcactggaagcaatacttgcttgttcactagcatgacttgcagccgacgatgccgtcgaagcctcactttgtgcggcactagcggcactggatgcagtacttgctgcactggacgcaatacttacatctgactggaccccactatcacttgggtacctggacgcagcactggatgcggcacttgcttgacttgtagcactacttgcatggccagtcgcttcactggcgctggagcctgcctgatgagcatatgaaccggcttcactggcactcgaacttgcagcactagcatacgcagacgttgcggtcgatgctcgacccgcttcgctggcactggaacttgcgccacttcgtgtgccttgagctgccgctgaactagcagccgcgctcgcggcacttgaagctgcgccttccgcagcgctggcaactttgtcaaagcctgcagccgcactggcggcactggaagctaccgagtcatcggatgccgcggcactcgccgctccgctggcaactgcttctgcacgcttggcactgcttgctgcggcactcgccgcactcgagaatcctgctgcggctttgctatcacccgccttggtcgcactggctgcggcactcgcattactgttggccgtgctggccgcactgcttgccaccacatcggcacttgcagccgtcttcgcctgttcacttgcatcactggcagcactggaaccaaccgcagcggcactggttgcggcactcgcgttactgcttgcctttgctgcctcgcttgcagcctgactggctagtgactgaatcccactatccttcggatagctggatgccgcactcgcagcggtgctggcatgttgggctgcactgccggactgaccggcagcgtcactggcgctggagcctgcctgatgagcatatgaaccggcttcactggcactcgaacttgcagcactagcatacgcagatgttgcggtcgatgcttgacccgcttcgctggcactggagcttgcgccacctcgtgtgccttgagctgccgctgaactagcagccgcgctcgcggcacttgaagctgcgccttccgcagcgctggcagctttgtcaaagcctgcagccgcactggcggcactagaagctaccgagtcatcggatgccgcggcactcgccgctccgctggcaactgcttctgcacgcttggcactgcttgctgcggcactcgccgcactcgagaatcctgctgcggctttgctatcacccgccttggtcgcactggctgcggcactcgcgttactgttggccgtgctggccgcactgcttgccaccacatcggcacttgcagccgtcttcgcctgttcacttgcatcactggcagcactggaaccaaccgcagcagcactggttgcggcactcgcgttactgcttgcctttgctgcctcgcttgcagcctgactggctagtgactgaatcccactatccttcggatagctggatgccgcactcgcagcggtgctggcatgttgggctgcactgccggactgaccggcagcgtcactggcgctggaacctgcctgatgagcatatgaaccggcttcactggcactcgaacttgcagcactagcatacgcagatgttgcggttgatgcttgacccgcttcgctggcactggagcttgcgccacctcgtgtgccttgagctgccgctgaactagcagccgcgctcgcggcacttgaagctgcgccttccgcagcgctggcagctttgtcaaagcctgcagccgcactggcggcgctagaagctaccgagtcatcggatgccgcggcactcgccgctccgctggcaactgcttctgcacgcttggcactgcttgctgcggcactcgccgcactcgagaatcctgctgcggctttgctatcaccagccttggtcgcactggctgcggcactcgcattactgttggccgtgctggctgcactgcttgccaccacatcggcacttgcagccgtcttcgcctgttcacttgcatcactggcagcactggaaccaacggccgcggcgctggttgcggcactcgcgttactgcttgcctttgctgcctcgcttgcagcatgactggctagtgactgaatcccactatccttcggatagctggatgccgcactcgcagaggtgctggcatgttgggctgcactgccggactgaccggcagcgtcactggcgctggaacctgcctgatgagcatatgaaccggcttcactggcactcgaacttgcagcactagcatacgcagatgttgcggttgatgctcgacccgcttcgctggcactggaacttgcgccacctcgtgtgccttgagctgccgctgaactagcagccgcgctcgcggcacttgaagctgcgccttccgcagcgctggcagctttgtcaaagcctgcagccgcactggcggcgctagaagctaccgagtcatcggatgccgcggcactcgccgctccgctggcaactgcttctgcacgcttggcactgcttgctgcggcactcgccgcactcgagaatcctgctgcggctttgctatcaccagccttggtcgcactggctgcggcactcgcattactgttggccgtgctggctgcactgcttgccaccacatcggcacttgcagccgtcttcgcctgttcacttgcatcactggcagcactggaaccaacggccgcggcgctggttgcggcactcgcgttactgcttgcctttgctgcctcgcttgcagcctaactggctagtgactgaatcccactatccttcggatagctggatgccgcactcgcagcggtgctggcatgttgggctgcactgccggactgaccggcagcgtcactggcgctggaacctgcctgatgagcatatgaaccggcttcactggcactcgaacttgcagcactagcatacgcagatgttgcggttgatgcttgacccgcttcgctggcactggaacttgcgccacttgcgtaatcagttagagacttgatcttattcaaatcatcaagtgcttgacttcttgctgtagctgcagtcgcttggttattcttggagtcgctttgagctgcactagcaacagcagctgcactacccgctgctgctgcatcactcactgcaaccttggcagcaacttgcgctgtcgataacgctgcgctcatggcagccgcagcggaacttgctgcagatgatgcagtggcatatcccgaactatcattagcagcagaagcggcactggcctcagaagcgtaggaatcataagcagcggctgcagagtttgctgatgcatcagcgttacttacggcagcagctgcagatgacgcttcactagccgcgctacttgccacgattgctgcggacgctgccgcactggaactagccgcagcagacttgctagctgccaaagcaatttgcgattgcttctcagcatcactggcaagagacttgacttccatattatcagcatgactgccagcaatcgattgcgcttcacttgcataactcgccgcatcactagcagcagcacttgtagcctttgcctgtgaagctgtgacatcagcagcactattggcgttgattaagctgccagctgcactggatgcctgctttggcgtttcggcatcgttgatcactaccgtcgctgttttcacaatgaatccagcactcgaaataacttcaaatgaagcattggcaggtaacgaaaccccagtcggcagttcgtaactccaattaccgcccttgtccgcctgtaccaaatattttgtactatcataggaattcgcagttaagctgccttctggaatcccctttaaacctgaaatcgttacataggctccggcagtggttttacctgtaagcgttgtggtttcatcagtaactggatttaccttaataaaattatcactggcactgacgaactccaggcttttatcagtcgcaaacgtgtcggcaagtgctttcccggattgttcatcttctgctgtctcaccttcaaccgtagcggtatctgaagaagagccattcccttttagtgtatagatagcggacttatatggaccataggcattcccgtcatccggaatgattttcacatattgacctgttagcgtaccggtaccactgactttaaataaactgctgtctgcgtcatcgttatcggtaatcttaaaaagaacggatttcggcatatagatgttaatgttggcatcgtcaccgactttcaacaaatgcgcttcgcccgtgccaccgtcaatggttaagttggccgtagcatcctgtgcaaaactcagttgaccgtcatttgctacattaattgcattgacactctttgtccctgtacccgttacattaagatccaaagtgctgccacttgcaacgaagaagcctccggtacctttaatattgataaagccatagccaagtttaggcgcaccattttgagtgatcgtcatgtgcgatccttcgttgaggttgacagttccggtaccgtcaattcttaccggaatgtttccagttgcaccggtaatggataccgttgcattcttatcaacggttagattaccaccgtcttcaatatagattggtgcaaagccatctttcacaagtgcatttttattaaggataacggttgatccatccttaaactcaacattacctccctgtgtatcaatcaatgcattcgtaccacgttcattcgatttgcttgcatccgtgcgttgtaagttaacggttgctcccttgtcaacaataaatgaaccgccatcatatacttcaacgttagtcccaccagtagttgtccccgtgtaagtagcgccaggcaaaacctctaaataactaatttgaaagttttgctggttgcctaagccttgggttgtctgggttgatccgtccagcggggaaacataactgcccactgactgaatctttgtattccccttaataaaggcttttgtataaatgccatacatcagttgtgcacctgtgtatgtgacattattgaacactaccgaatgatcgatgccgtctttcggcttactacccttgatagtaaccgggccccaccaactgtaaccgtacatatttaaatcgttgatggtaaacgattcattctgactacttgtaggatcagcttcgaaatacttcttttgaaaatcaattgtgtggttattgccattaataactaagtttggccgataagcatacgattggcgatcaccactaacatccataacaaagtcggactgtacgttgatgacacttaccgttgaatcggccatggctgcatcaaactctgacgcggtgctgacatcggcgctagaagcatcgtttgataccgcttcattaactggagtttgaccttcagatgtatttgttgcagaggcactattggcgcttgcacttgttacactggcggcgctgttgccttcatttgcctgactcgtagtatctgaactaccacttgacgtgccgccaacaccctgactcgcacgaccatcgctggcattaactgcactactgcttagagcgctggtcgctttttcgccgttactgccagcactggctgaactagtgcttttgatctggccactactttcaacgctagcactactttgagacgcactggccgcgttggcactactttgactgccgccaattttactattagtggtcgttgccacatttgccgtgctcgctttggcttgaccatcgctcgcactgctgctggctgtagctacacttgcacttgctgattttaggctatttgttccattttgaccactactggctcccgatgaaggcgcttcgataaactctgaactgttgggcgcttgagcatcagctttaaccaaattcgtctgataggcggttcccaaaccgatgccgatgaagaataatggagcaattaaccatttcttctttgccttaaacatcttgaaacgctttttctccaccaaaacatttgctctatttatctttttcatacccaagatcctctcaataaataatgagcaacccacttgattttttacttgtatttaaaaatccggcttagaactgtttaaatagtttctcgtggtgcgatcatcccctttcctgagtacttgcaagcaaaagcgaaccgggagtcatctcaaaagaacgctgataatactgacttccatgcaccgatgaaatcagcttctgaatgttgttttgcagtatttaaagcaccagcttgtaatttgtgataaagccgattatcttgtaacacgaccaaaatcgccttgcctaactcgctaggcgtcatattagcaaccgccaccccgttttgtctgttcactaacaggttatgcttcaagaagtgacatccgtatgcaatcactggtatgccatacgacattgcctcaagactattcataccgaaagcttctgacttcgccgcagaaacaaacagcgtcgtcttgttcaaaatatcctgattgtcattgctataggcaaccagatgaatcgcatcatcaagttttttcttgtggattctatcgcggatctcccggcgataggcctcgtctgaaaaataacctttgaggaacagttcagcatccgggcgttctcggtgtacacgttcaaacgcatcaaccaaatccgtaatctgtttatctggaaaaagacgcccgatatacgccaatcgtggatgatcgggttgtattttcttagctttcggcgtctgtgcataagtatccggggcagcctcaatggttaagtacggatattgagtctcaatcgctttaacttgatcatgcgtaggaaaaataacggtactaaacggatgctgctcgcttagtacctcgttataaatgacattaggtacgcgcttcttcccttctcctttcaagaacaggtcaccttcatgaataaaagcgagcttagcagttgcatgattaacttgcttgacggcagcatcgagcgttctgcgatctgaaatcatgatccccggattgcctttactaatttcattcaggaaaaaacggaaaaggtcatcttcggaatcaaatacataatcatgtccttgataatgaaccaacttccacattgtcggtgcaagctgaccatttttattcatgtggataatctccaaaaccacatggcctttctgatccaaaaacttctgtgcagccacggttccatcgggattataattttgttccatagacttaaacccgcgccaatcccagaattcggttaactctttgtgatcaaagcgatcataataatcaatacttccaactaatccgaccgtctctggcatgacagtaatctttgcaagcgttcgacctaacagatcgatagttgtcgtattattgtcaatcccaacgacatgatatttcgtcaggggaatcgattccagtaagcgtaacttttgttctttacgctcaaccccgacaacaccctgaaagtaatcgtacatgttgatatatgcatctttgttaactcctgcacgctcggcatcccgatacaagaagcgattatagttccggagtagcagtttagattcaatgccattttgattgaaggctttcaggctttgcagctgcgagaactcagtgccggaattaaatgtaaaaacattttcaccaaccatgtaaatcatttcgtcaccttcccctcactcttttgtgcatccattaaaacgttgtgccatttcttccaaacattttcttcagaatatctgttagcagattcgtatgcattcgtactcatctgctgcatcttgtcacgatcggatagcaataactgaatcttctccgctaaggcatgaatatcgccatacggagtgacatacccattgatgccgtcttgcacgatttcgtttggaccgtagttaacgtcataggtcacgccgacaacaccatgcgaaatcgcctccagtaatgagagatcaaaaccttccatgatagaagttaagccaaaaatctgggcagtatcatacgcactttccagattttccgtgtagcctttaaaagccacaaccccttccaatgaaagttcttggattgttttttcgatttttcgtttttcagcataatgattcgttgcatccgggtaaccatacaaatccagcgtcacttgcggtatttgtttgtggacgatggcaatggctcgaaccagatcattcagatttttttccggtgcaatcctagcaaccgcgatgactttgccgaatattcgattttccgacagaattcgctggcggtgaagcacgtcatccgataccacgccaacaggaacatggaaggactttttgatgtaagggaagcgtctttgaacatcggctgcctgctttttagttgcagaaacaaatgctgaatacttcgcaccattaactaatgcaaattcataattgttattcataatcgaatccattggccgttgcgcatcgccagcatgtgaattatgtaggtgcataatcgtgtaagcgggtttctctagatgaataagcgcttcatccgccaataaagaccgatcaaggataaagacattctggccagtttcattcatgtcattaataaaatgttcaaaaaacgcatcaatcgtgtcaaactgaaaaattttacctttgcgatctgtcagaatccacccagtctgcttaagcttgccatcttcatttttcttgttaaatgctctgattaccggacggccatccaccgttagccattcctcgttgccaaccttattgtctggggtataccactgaaccaatgatttaaatccgcgaacatcataaaattcaacttggtatagattctcaactccgtcaaacaattcgacagaaaccacctgtctagtgccgcgaacatagttgatccgcgcagccaatcgcccatcagctcgtgaaaccaacatacgattgtgctcgtaatcatcggaatattgaagatctttaagtcccagatctacctgctccggtaacaaccggaccacgtcaacatggcaggcgtgctgatagtaatcaaacatgttaacgaggtgatcatccgtaattcctgcattggcagtgttagtatgtagatcccgttcccaatcccgtagaagaaatacgtaaggttcaccatgcttatcaaataggcgcttgcgctttatctgcgcatgctcaatacccgatttgctggcaggcataccgaaattgatgaaatagttcactagcaatcactcctagactcaaaaataaacttatcgagaaaaattgtgttagttatgaaacgaactctgactattaattaaccttgtctcccggaagcattatctatccaatataggcgctaacacgtcggccactcagaaccgtcactggctagaatttaactcataccctacactaatttctgactacttatacaatactagcattaaaaaatttgttaatatataaatacaatgaaatcgattccacttttgaatttttctcgagcatattgcaccatcccccgttataatcagcgccatatcagccatccacaggttaaaaatttttttcgaaaattatttttcaaaaaccagatcatcaccaaaaaagcatgccaccataagctgttccttggtctacaaattttttcgcaccaaattccagttattgactcatgcttctggccattaaaaaagactttatcacggcaaatgcgcaacaaagtcttttcaaagtttcgttatgatacaaaggcggtttttcacttgaaactcgtgtgggctagatcactgacgcagcgcccgggtcaccgtttgctcattgacaaacgtatacaggcctaaatctcccagttcacgaccatagccggagttcttgaccccgccaaatggcaactcagcattgtagctttgactctgattggcaccgaccatcccggtttcaatctgggcagcgacttctgccgcatgattggtatcaccggcaaagactgctccgccaaggccataaggaacatcattggccaacgcaatcgcttcttcttcgctatgcaccttataaacgcaggcgaccgggccgaataattctgtccgatacgccggattcaatggcagtatcaacctgaccttgcagcttatcttttgccttttgactgttcaatggacccacattgactgatggatcactcggatcgccaattttgacgttttcaaaacctttcttcaagccggcaacaaagtcatcgtagtatttatctaacacaataaaccgtttggagctggtgcaaacctgtccgcaattcatgaggcgagttttaatggcttctggaatcacgtgctcaagatcagccccgtccaagaccagaaaagcatccataccgcctaattccatcagcgacttcttcaaatacttacctgccaacgccgccacatgcgaacccgcaccttctgaacccgtcaagcagacaccggcaacgcgcggatctttaataaaggtctcggtatcatcatgcccgataagtgcgatttggaaagcacctttgtcagcgccgccagccagaactgctttttcaaattcaaggccgctagccggaacattgctggcaggtttaatgatcaccgcattccccaccataaagtttggtgcgaaaacacgcattaactggtagtaagggaagttccacggttcaacgccaaacacaataccactggcaacgtgattgaccaccgcagcccctgcagtactgttaagcggttgcggctgcagcaatgccggagcccgatcagcgtacatatccgcaatttcagcgcaaagttcaacttcgcctaacgcttcttcggtccgcttgcccatttctttggtaataattgccgccatttcatcggcattgtcgcggaaataagcagcaaccgcatgtaatgttgcactacgcgttgcagggtcaagattacgctgctgcttgtaaaaagcatgccccgccgtcaacatctcactaatttgtgccggtgttgtgttcgcataagttttctccaacgtgttcgtgttcggatcaacggtttgataagccatttttgtaaacgctcccttcgtgtccttacttaatcatagcttattcagagggtagatgccaaccggataaattccaagacagcggatgaaccctcgacgacagattgcctggcaaattatcgtatcaacaagcaccgaataatccgctatcaacaagtcgtcgggctcaaatacccgttgcagcagctaactgaatatggtaaatggcaagcgattcagtgttttgttcgggcaagatttcctgtaaaacgccgccactggcctcaatcgtcttgcggcttgcccaattagccgcttttgctgtcacaatgacataaggttcctggcgttgctgataataacctaacgcaaatttgagcaagtttttcgcataaccgtggccgcgctgagacggagccacataatagccgatgtgcccgccggttctggctagcatcggtgtcatttcagtccggcagcgaacccgccccaagatgacgttttccgagttaaacatgaaaaaagcaaactgcggcactaactcgggtttttcgggattctgatcggcggttagtactgccaaccttgtcgtaaagtcggttgcaggcgtcaattcgcgaacaatattttgactgtgaggattttgctgatcgaaatttaaaacatcgcgccgaaactcattaaatgcatcctcatcattgggttgaagcgaccggatcgtgaatgattccatagtaagacctcttttcgtaacttgacggttcagacttaatttaccgcaaaagaaaaagacccgctaatcatagcgagtcttaaaatattcaatgaatgttttagaagtctgttgggttaaccttgatgccaggtgccatcgttgaggtcaacgtcaaactcttgatgtaaatacctttggtgcttgctggacgagccttcagcacaatatcattcattgctttgaagttttcaagcagcttgtcagcatcgaagctcttcttaccgattggggcatggatgataccagccttgtcaacacgataagcaacttgaccagccttgatgtcattaacagccttggccgtgtccatcgtaacggtaccggtcttcgggtttggcatcaagcctttcggtccaagaatccggcctaaacgtccaacttgggccatcattggtggtgttgcaacggcaacatcaaagtccaaccagccgtcctggatcttttgcacaagatcttcggcgccaacaatatcagcacctgcatcttcagcagccttagcctgatcgccttgggcaaaaacaataaccttcgacgttttaccagttccgtttggtagcacaacagcgccacggatctgctggtcagcctgctttggatcaacattcaatcgatatgcaacttcaacggtttcgtcgaactttgcaaagtcgattttcttaagcagattaactgcttcttcaggggtatactgcttggtcgcatcaacggccttagcagcctctaaatactttttaccttttttagccattctgggttttcctccttgcaaatgtggtcactgggagcattttactcccttccacctgattgcctcagttttcactgagaatccgaacagtgcggcctagtcttcgacttcgaagcccatggagcgagctgttccttcaaccatgcgcattgccgcttcaacatcggcagcgttaaggtcttgcatctttgtttcggcgatttccttaacctgagctttggttaccttagcaaccttcttcgtgttcggttcgccggaaccatgttcaacaccagcagctttcttcagtagaatagcagccggcggggtcttggttacgaaatcaaacgaacgatcttcataaaccgtgatgacaacagggataatcatgccagcctgatcagctgtccgtgcattgaaatccttggtgaaccccataatgttgataccggcttgcccaagtgcagggccaaccggaggagctggggttgctttcccagcaggaatttggagtttgacaatgtttgctacttttttagccacgagacatacctccttaagtccgtgatgtggttatgatggccagaatttttggcctcccacgcgtatgctgaaaacatactcgaatagattaccatgttagacgataaaaggcaagaagaaccggcacatccctgcgttttatctgttcccaaaaaacttcataaccacggtcgtccgcgctttaggtaaattcttttaacagtttcaaccaatatcaaatagataagaataatgacagcagctccaggccagtaagtgactggtaaaataccgaaatcaaatgcctgatggaatggcgatagaattatgaaaaggccaactaacaaagccatcatggttgacaagatgacaatagctgaggctggtgaccgccaaaatggcgtttggcgggtgcgtaagacatgaaccaccagtgattgggtaaatagaccaaccacaaaccaccccgcctgaaataggtgctgagccggcacactggcagcatgcgtcccaacgccaagcccgaaccataaaaataggaaagtcgtgatatcaaaaatcgaacttagcggtccaaaagtcaatgtgtagcgcaataatcccttggctcgccacggtgtcggttgcgctaaggttgcttcatccacattgtcccatggaatcgtcatttgcgaggtatcataaatcagattttgaaccagtaattgaatggccagcatcggtaggaaaggtaaaaagatactcgccactaacaccgaaaaagcattaccgaaattagatgcaatggtcattttaatgtatttcatagcgttggcataaacgcgacgaccttctagaatcccatcttccaacaccaataagctttttcccaacaaaataatgccgcttgcatctttggtaatatcggcagctgtatccacgctgatgctgacatccgcttcacgcaacgcagcagtatcattgatgccatcacccatgtatccgactgtgtgaccggccgcacgcatggttttaatgattctggctttttgcatcggacttagtttcacaaacaaatccgtggtctcaactgcctgtcgcaacgcgctatcatccatggcatcaacgtcattgccggttgcaacaagctgattggcaattcctacttcctcagcaacatgctgcgtaataatggcgttatcgccggtcagaaccttaacccggacaccatgcgcgcctaacaacccaattgcttcttttgcatcgggtttggccggatcaaggaaacccagaaaaccagccaaaaccatatgctgttcatccgctggcgtataaatttcctgttgatggacgtcttgacgatatgccacgacaatcatgcgcataccttgaccactcatggccgcgttagtttgctcaagttttcggatccgctcaggtgtcagcggcagtacatcaccattgagttgcactcggtcacaaaccgccagcatttcttcgaaggcgccttttgtgatcatccactgatgcgcgtcgttagcaacgacaaccgtcagtcggcggcgttcaaaatcaaacggaatctcatcaattttggtcagcccgcttggtaaatcggttaaaagatgctgatgctcacgggcataatccaccactgcagtatccatcaagttgtgccacccggtttgataattagcattcatatatgccatccgcaacactgccggatcggtttcgcccgtagcatcaacatagcgcatcacaacgacccggtcctcagtgatggtcccggttttatccgtgaaaagcgtatcaattgcgccaagattttgaatggcgtgcagtcgtttcacaatgactttccgcttcgacatcgccaacgccccttttgccaggttactgttgacaatcatcggcagcatttccggtgtcagtccgaccgccaccgcgatggcaaaaaagaatgcctgggaccaatcgtgcttggtaataccgttaatgacaaagaccaccggcaccagcaccaacatcatgctaattaaaacccggctaatggcgcgcatcccttgctcaaaactggtcggcgccggcttatcgctaatttgactcgccatgtcgccaaaataagtcgcgtctcccgtttttagaataacagccgtccccgatccggaaattacatcagttcccataaaaacgagattaggagcatcaaacaagctttgtttatcacttaaattcgccgcgcctgctttcttctctaccggcatcgcttcaccagtaaacgacgactgattgacaaataaatcatgagtcgcaactaaataggcatcagccgggatcatatcaccggtcgccagctgaacaatgtcaccaggcaccacttcatccatggggtgctctttggtttcaccggcacgcgtgatcgccgtggtattggcaatcaaggccgccaatgcatgactttccttttgagaacgatattcctgccaaaaatgaatggacaccgataagataatcatcaagcccatcattctggcgccgtcataatccgcagtcatggttgagactgcacacaacaatagcaatacccagacaaagggttcgttgaatgcagcgaataaaattaaataccacgggcgcggatgttgggtaacaaccgtgttggggccgtcctgttcaagccgttctgctgcctcttgtgaagacaaacccgcttcttgcgtcttcaaagctgcaaaaatggcttgtggttcttgctggctgtaccgtgtcagtgcagcagttttctcctgagtcgaagcatcgcgcctcgatatggttttattgaacatcattatttgttatataaactgtggaagcatgccgctatgacacgaattaaagctttatatcgttcctcctcataaatttgacgtatgcatgtcgtctctagcaagcatccgcgagacacttactggtttcatcatacttggcaaggtttcagagcctatgttgcttattaacagctcatcaatacatttcgccattgagtttgttttgaccacatgagcaccttccacttaatgattgcactcatgtctgcgtgggtgccgcgtcgctattatccataaactgccattgtttcatcactccctcgttttcatgccttagccgaaaaaatataacgggctaaaacaattaactttactcaaagcttaacttgacggtaagatggttgtcaaaggtaactaaaaataactgctgtcagggaaacaaaaggcgcttgttggcatgaggtctaaccgcgccggctcgcgcttcgaccataacgcgctcaccagcccagaaacctgcgtgtaaggaccttggtcgcaatggccaaagcccggccatcacgcccgaggccgcttacactccggtttctaaccgggctggttcacgctcactttctataacgcgctcaccagcgcagaagtctgcgtgtaaggaccttggtcgcaatggccaaagcccggccatcacgcccaaggccgcttacactccgacttctaaccgcgccggctcgcgctcactatctttttggaggctaaacatgatttcttcagcattagctcaagccgcggctgttcgtgcaggtgccgtgacgagtggtgacttgattgacatgactgcaaaaaaattaaccacgcgcaatccgcaactgaatgcggtaacgtggacgaggtttgatgcggcaaagcatgaagccgcggcactcacggatactggtcagccttttttcggggttcctttgtttttgaagggactcggtcaaagcctcgccggcgctccggaaacaggcggcagccgtctttttaaagatgccaaggcaacccgtacgaataactttgttcaggccttgcaaagactgggtttcatcattgtcggtcaaagtaatgtgccggaattcggatttaaaaacattaccgatgctgcactttacggaccggcgcgtaatccttggaatctggcctactcaccgggtggctcttccggtggtgctgcagcgttggttgccgcaggaattagcccgctcgcagccggttctgacggtggcggctctatccgcatccccgcttcattttctggattgatcgggttaaaaccaacgcgtggtcgtgttcccaccggtcccggtgaatggcgcggctggcaaggtgcctccattaattttgccttgacccggacaatggcagataccgaagcgctcttacgcggtttagccactactcaattagccgcaccgtttatcgccccaccactgcggcttgatcaagtcaacgacacgcgaccgttaagaattgcttacacaacgcaatctcccgtgggcacaccggtcagcagcaccgccataactgccgtcgaaaaagctgtcgatgcgttgcgcgctgcagggcataccgtgaccgaagctgctccggatgtggacggtgtggcactcatgcaggcttattatctgatgaatggtggcgaaacggctgccatgttccaagcctacaccgatcaaaccggtcggacggttacgcctaacgatattgagttaatcacttgggccatctatcaagcagggttgcacaccaccgccgctgattacagccggtcgttagccatctgggatcgagccgctgaagcttacagtcggtttcacgaaagttacgacttgctgttaaccccgaccaccgccaaaaccgccccgcgcattgatgccgcgttacaatcaccagcgatcattaaaaaaatgcaccacgcagccgagcttgacccaagcgaacaacaaacgctgatctgggatttattcgaacccagtctcacctattcaccattcacgcaacaagcgaacttaaccggcgccccagccatcagcttgccgaccgctatttcagatgaaggcctgccactagggatccaatttaccgccgccaagggtcgtgaagatcaacttctacggatcggctattggtttgaacaacaccatcttttgaaaatgttgcctgtagcggaataagatcgccagccgcaagccagccttcgtaagcgacagaatagcttttagttaaaaatgcgttccactatcacagtatgcaaaaagccttggtccaatttttcggatcaaggctttttacttgcgggtctttcaaactaacgatcacactaaccttgtttacttacttttcacctcagcaacgcctgctttgaagttgacgtagcgtgccaacgcaaaaagatagtcagatagccggttgctatattgcaatgtgacggcgctcaaagtgtcatctttagcagctaattgatccaatgaccgttctgcgcgccgggccactgctctgccgtattgtaacgcggctgctagcggatgtccgcctggcaaaacaaacgctgtgatatggggaacggcggccatcatttgatcaatcgcatcttctagtgccttcacatgtgcttctgtgatcgtttggtgccgcggaaccgcaatatccgccagcagctcatataattcccgctgccgtgcttgcaacgcttctgtaagccaggcaaatcctggcgttgcctgcgcttgagcagcaacatagccgagccacgaatcgagttcatcaagatcgcctagtgccacaatctgcggatcgtattttggcaccttcttaccgttaatctgtttggtcgcaccgtgatccccgacttttgtgtatagcttcatgactgcctcctgtcttcaaccctgatgagaaaagcgtttcaatccctgttgcaaaaccagcaccacaatcggataaaacacgagatttccaatgacgtgataagtatcaaacaataaaccacttaaataataagcccaaaagccaagaccattcaaactgccaatgacggccattcctaaactaacgatgaacccgtataagtagccaagcagaccggctatcccaatctgaatccaaagtgtgagccgaatcagcggtatcaacgttacgctaacttgaaccacgactaggcacatcgcataagcaacaatctgcggcaacgtccacaagccaaatcctaaaatcagatttgaaaccaccaaggtactcatggtcaaagcaatgccccaccgaaatcccagtagcagcgttgtcaccatcaaaatatccgtgacgggctgaacattaggaatcggtactttaataatgcgcaaaaccgtacacaaggcggttaataaaccaagcaaagccaccgcccggacaggcgatggctttttggctgctactggcagcttcatttagtcacactcaagtcaaacacaactttatcatggttcttaaccggttgctgcgaggcaccttttttagccatcttgccattgatggtgtacagccagtatgttttcttggcaacattttgcttcttgccagcgatctcagtgatgaagcccttggaagccttgactttccagcccttcttcaaaccggtcataacaacagattttttaggttgcgtgattttcttattcgcaaatgccttaccgttttccttcagttgatacgtgaccacaatctgattgggtttgctgctgcttttggccgtactgctagcactgctgctgcacccggtaagaaccaacatcgcagtgaagaagacaaccagtgaccgtaaaactttctttaacatgaacctacatcctccatatcgtttatttaatcgggcaagcaccgccagcacaatcggtttgatccactaatccgagatctttttgatcatgatcggcattttgagccgcaaaaaccgctgcaaccgaaccgtgaatctgttggcatttctgcttgtaagtctggacgtcaattggttcttttggtgcttgtttaaagcctgcgccaacgtatggcagcattgacgtggacttgatgacatgccgatattgtgataataagtcagcaatctggtcagcttcttcaggctggaaggtcacggtgcaactcaccgcattatcagaccagtatgtttgcaagaacgcttgggtggcaatttgttcggcaatcgaaaccgtgcctgccgaagcaaatgccggatcatccgcatgcgctgcacgaatcggaaattcaacgaccatcgtatttttagtgtaaacatccggttcaatgtgatagccacatgccttcagtgccggcaatagcggatcattggcctggaaccgaatccgttgaatcaaataaccggcataatggaaatgcatgccttcggaaacacccgccaatttagccacagttccggatggtttaacggttgtgtgcttgcgcgacggttcgcatcccaaggcttcagaataagctttatctgcgttgaccaccgtacgataaagtccatcaaccgcttgtttaatctcaggatcgtaaatcggtttctcgaccatttttcccgtatgcggatcaacaaccggtttaaatccggaaacaacccgatgaccgaaatcatccaggaaccagtcttgaataccggacatcgaaatgccgattcgccggttcttcttgataatatcgcgtgaaacctgccagtcgtagttgctaaaggtgacccgtttagcataacgcgccgccaacgtgaaggcttgttttagcttccaaccttgctgcacggccacaaccgggaatacttcaaataaattgcagggctcaccgttggccaaagaaatttcgccgcaaggatttgtcccttcgacatccggatcattggcggcattttcgccatcgacaatgcgtccatagtgccgggacaagtcgagattgacaatacctggttcgccatttttggcaatcgccgtcgcgatcggtgcgtaggcttcaaactgggtatcaatcgcaacactgttattcgatgcccaacgatgatgatacagttgcttttgatcctgcttcatggtgataaacgcatcatcatcagcagatcctaacgacatttcggcagagcggcgaacattacctgcgacaacggttttaccaatcagattgccaatatcggttgcatcaaccgctgtcaaatgcttgccaactcgcgcattaagcacgttattgatatcctgcaacatttcaactaacggcatgggccctgaagccgtaccgccaaaaccatgaatgcgcgcgccttttggtcgaatattggtaatgtctaataccaatttcgtttggccactaggattagttgcggcaaaatggtgatcaatcaccttggcattggccaaaacccagccttcgcgcgtatccggcaaaacataccgatcgttgcgttcggttgcatgggcttgttcccatgcttgtcgatcaaccgcgcccatcttaagtgaagcttcataactggcgctgcgccgatcaatgacaatcgtcaaatcaaccgcactggctactggtggcaacttggcgatattgtctttggtgacggaaaaaccaacaccgccgcctttcatcaattcatcaaacatgaaagaatatggcatcgaaacagcaggctgatcagcagaaaaatcggttggcacaatatgtgaatcgccatatggttggggacgaatcgcaataaaccagcaattattcaatgcatcgccattacgcttttgataatccgttccggaaatccaaaggttacggccagatggcgtgcctgccaacccataaataagtttgaaaagattgcgcgcctctttttgcaaggccgttactactttaggatccggatccgcagtatgtaaacgcggatcaaggttaatattgccttcaacaacgcgcttgacggtttcatcccaattctcggttcgctcttcattcggcagccaccgcgcataggtccgcttgtaggttacccagccaagctccccccagtgcggcttaatttctttcttaacctcggcaatgaattcaggcgccaaggtgatcggtttcatcataacttgcatatccgtccctcccgtatacaagatatggtatagccaaacgaattcaatatcaagatatagattaatcaataacaattcgttaatgctgacgatgaccggtcaaacagataatggcgggcttttaaaaaattcaggatgacattaaaaaagccagcgttacatcacgctagcaagttttcagttatcatcataacgcgctccgatgcagaaacctgcgtgtaaggatcttggtcgcaatggtcaaagcccgacaaggccacttacactccggtttctaagcggccctgttcacgctcactaaaacaccggtcccacataaggacgaacgagcacatgatctaaatccagtgttttcagctcggcaatatctgttacaaaacaggtaatggagccggcgagcatcaggttcattttcatgtccgtcagttgtagcgccacaattggcatgtggtgcgcatacgcatagccgatctcaaaggcggttcccggatcagggtcttcgccaatataatccaaaatcgcgaccatcaccgttgcttggtgcaagccgcgaatatcttcaccaaaaacctgtcgctgccaagctggtgaattttccgtcaaacctgctttgttagtatcatcgcgtggtgaaaaaataccgctaacggactcattttcatttaaagccgctaatacctgattcaaccgctttgtctgcgcgggatcaaaaaaaggagcggcaagatagacttgggccatattttcctcctagcaagcattgcggcaactttattgtcgccaatgccttatttccggtgacagcaacttgcgggtaaaacataaggaaccttggccatcatggtcaaggttcctaagcaatgccaaaaataatgtgccgttgcttatcgcgcaaccgatatcttctgacaatagctaaaaatcgcgttgctgctgccataaatattcaacaatatcatgatcaacgaggcgattctcatggagcaaactgtgggctgcccgcggtccgcgaatgacgacctccgtatagtccttgatccgatccttcaccagataacgcaccgcaaaactgctgttaatcgcaacctcgccgtcatggcgacctccaagcatcaagtctccggcaatgttcagccatcgcaaatcagaaggaagattgtcaatggtgcgctgaaattgctgataaattggggctgtgtgttccggtccctgacgcgtcaacgaccagtttagaatcggtgagcgctgagcaacttctaagtcattcataggcgcagcaatagtgactaggttggcgactggcacagctggtttgcttaataaatacaacactgccgtcacgccgcccattgagtgtccaatcagattaagctgactgaaagcttgttgcgcctgtaaagccgtaatcacgtgatttagtccccgtaattgcgcagctgggcgcacggttttatcggtgaatagcacttgcaccgcagcatgatgattcaagttcaaccgaccacgcaaacgcaccctgccatcaggggcaacaatcgcgacaacatctttactcaagccataacgacgctgcatacgccacaacatatggccgaatgaataccgcgtacctaaatggccggggatgaacaaagtcggcgttgcatccatgactaatggcaccggcgcatatccgggacgacccagtaatataaagtctgctaaaccgcccgcaatcacaacagtgccaactgcaatcacgagccaaaaccagctgctcatgagccttgcctacagtttgtcgacttgatcaaaatccagttcagcagtgacttcgcggtcaaacatttcggtcacgactttgagcttcatcttgtctttatcgacagcggttactttaccatgcatcccggtaaaggccccatcaataatcgtaacgggttcgcccacatcaaactcaacatcctgatgccgtgtgctcatgcccattgaatgcaagacacttgcaacttcttcaggcaacaatggcgccggctttgaacctgcaccatgggaacccacgaaaccggtaacgccaggcgtgttccgcactacgaaccatgattgatccgtcatgaccatttcgactaacacataacccgggaaggtcttcttcatttcgatcttctctttgccgttcttttgctcgtgttcttcttcttccggaacaactacccggaaaatataatcatccatattcatactgctggtccgttgttcaaggtttgtcttcaccttattttcgtaaccagaataagtgtgcaagacataccaacgtttctctgctgatgtaactgtttcagccataatgttctccttttagtgttttgagtcaaaataaaaaaccgtcatcgaaggcggttttgcgttgctcatagtatagcaaaaataaagcagtttgtcaggtcttaatataagaaggcttggaagactgcattgataacccagtccacacccgcaaaatagatcgcaaaaataatggaagtcatgatgacggtaaacgtatcacgccgcgtctgctgggcagttggccaagtgacagctttcatttccgcgaaaacacttttgataaatttcatcattgcgctccttccattattacttggtttcttgatggaccgtcacgcggccacaatgtttacaaaacttttttaacgttaaccgttctgttcgttttgggttttcgggaacaaaataattccgttgcccacaaaccgaacaagctaaagcaactttctttactgacatcttgttccctccagtcacgtccaatatcttaccaagattacaaacagatagcaagcagaggttcgcgccggtaagtgtcaactttttctcggttctactctaattaagtgatttccgttactccgagctggctccgcggtggcgagggctggcgaccgcgcagctagagtggtgggcacgactgagcccgccaccgctccgccagctcttgctttctatcttaatattctaacaaggtggacccatcgcactgctaccaactaccatgatcgagtctgatattttgaactcacaccctcagaagaaaataccaagccacaaggtcaacagtaaagcaccgccaacgatcattaaagattgaatcgtaaaaataaaagttttgtctttgcttggtgctttagtgtaccgccgcgtgtttttcttcaccaccggccaagtcaacataacgagtaaactccaccatggcaaactgcgggtcaaaacacctagcagtaacgcaacaaaggtacagaagggtatcaaccggtaccaacgtaaagctcgggttcggccaaggtaatatggcaatgtaaagcgctgatttttgatatcctgcgccatatcagcaatgttatcggcaaacatgacagcagcattcaaaatgatcaccggtaaaacagcgatcaacagttgtaacagccagcccagattaagtgcaaatgtaaacgtgcggcggtcaagcgttaagtcaagcggtcccggtagtgtcatattgataaacaccgcgatcacgaaagtcccataaccttccacaaacccggccaacacctctcccagcggcaatcgtgatagaggaaccggcccgaatgtatataaaatggccacaccgaccccgaccgcgccaatcactaacaagctcaggttggtgcgcatgacaagaataatgcctaaaaccacgctgatgagcaaaataaagatggtaagtgccaacatgccccaaggtgacaaatgctcgcggccgataatattttgcgactgctgataactgcgatctttggccttaaaataatcctgaacattgttgaatcctgtcacaaataaggcaatagccaattgagccgcagcgtatatgagactattgatccaagaaaactgatgaaatgcccaagcagcgtaactgattcccaacaccagcggcaacatactggcagccttagccggtaaccgaataaattctaaaaatagcggccacgtcagccgatgataagactgggtcatagcaccacccccattcccaaacccacaaccagcaaaccgttttccaaaaccaggttgatcaccgcggtatgaaacgttcgctgtttgctgggatcacgaatgaaccgatgcacattgcgaatcaccaacggccaggctaactccaccaccaatgtccatatcggtagcgcgccaaaaatgacgcccaagatcaccgctaagaagccggcataagctaacaacgcgtatacccgtggcgaccaccatttgcccagatacatcggcaacgtgtggcgatgattgcgctgatcttcttcaatatcagacatattattagccagcataatattggcaatggttgccatcggggtaatgcaggctaatcctaatgcaacgatggcgataaagtcaccacgtaaaacaactgttggccacccaaaatccaaggcaagcaagcgtcccggggcaatattgacataggttgcaataaccggaatgcctaatcccatgacgatcccggaaaaaatttcaccaagcggcaaacgagaaagcggtaatggcccccaagtatacaaaataccaatggcaaaacaagccatccccattaacagcaacagccaatccgtccgcacgaccaacacaacgcccagcaacgaagcgaccacaagcattaccagaatcaacttggcaaccattcccggatcaagctgagcccgaccaatgacattcacttcctgctgataatgagcatctttggctttttgataatccatcaaattattaagcgcagttgtcatcatatcgaaaatcaacattgcagtaaaaaataaaagcgtattgagccaatcaaaggcgtgaaaataagtcactgcaaacaaagtgccaatcgcaaatggcaaaacacttgccagtttggtgcgaatttcaaccagttctaaaaatatcggtaacgacatctactctccccttttgtagtgagcgcgagccagcgcggttaggggctggagtgtaagtggccttgggcgtgatgacccgcgcttggtcattgcgaccaaggtccttacacgcaagccctgcgctggggagcgcgttatcgtgagcgtgaaccggcgcgcttagaagtcggagtgtaagtggcctcgaacgtgatggcccgctcttggccattgcgttcgtggtccttacacgcagacttctgcgccggtgaacgcgttattgtgagcgcgagccagcgcggttaaaagtcggtcaagcctttattgtgaacccttaaccaacttactttaacttcgccagcgtataccccgagtccttcaacaacttaaacttatctttcaaccccgagctcacgtaaacttttttatctttggtaacaaaaatagcatcagcataattcaacttttcaatataggccatcccatcaactagccccttatcaaaagtcgctgttgacaaagcatccccatccacactctttttggtaataatcgaaacacccattaattcattatcaaatggatagccggttttgggattcatcaggtgcatataaaccttaccatcaactttaagatagcgttcatagatacccgaggtcacgatggttttattgctggcaggtaaggtcccgatggccgtcccacgaggcttcttaggatcctgaataccgacactccagtcttttttagtgcttttaggacttttgcccatgacaaaaatattgccgcctaagtcaataatagcagtcgttacatgctgtttcttcaacgttttcacgacttcatcggtaataaagcctttagcaataccacctagatcaattgccatgccctttttcttaagatataccgtctgttgtttcttattgagagcaacatcttgatagtgaaccaatggcagcttggcatcaatttcactttgcgccggtttgcgcgcatcggcaaaaccaatatgccacaaactcgtaatcggcccaattgccaagtcaaacgaaccgttcgaattttcactataatgcttggcagcttcaatcacccgataaacactcggagtgacatgtacgggtttcacccccgcattcttattgacagcatcgacttcggagcccttctggttaaccgtcagttcatcggccaactgctgaacacgggcaaaagcagcatctagtgctccctgcttccccttgtcataaatcttaatcataacaaccgtccccatcagaaactgagtatccgaataaggatcgcccgaaaccaattcccgtttagctgtcgactgactcgaacagcccgtcgccaccagtgccaaaagcatcaggataacgacaatcaatcgctttttcatgtacaacctgctatataaaatgtggaagaatgtctctttgacaccaataaaggttctatatatttcctttcttgattgacattcagcatttcatttagtcccgttaacagcggtattcccactctgaaataattcatcatgacagtgaccgcctcttgaactttaagggtatagcctaccccggtacttttgattttgcataatcgatcaggttatcaactgcattctcatcacgtcgcatcctagcaccgcattggtagcaaatgtaatcatcatgtccagtgtggtatttggcattaccgtgcaaagtaagtttctcttcaccggttttgatataaccacattttgaacaccgttgcgtactcggaaacattggatcggcaagaattaaagtactgccgttccaatccgctttgtattgcatcatgattttgaatttgccaaacattgaacgatgcagctttttggcgagacgatgattcatgcgcatgtgctgattatccaagtcttctatcccaattagatcgtgatcaacaactagcttggtcgtaaatttgtttaacaagtccatttgtatccgttcaacgcgttgatagtttcgcttcaacttggttctcgttgcgcgataggtcgctgaattaaagtgctttggatttgttgctcgcttacgtgctaattgtttttgatagtgagtgatacgagcgtaaagtgctggtagagaagcgggtagtgttggctgaatggcataacctgatggggttttgtagtcgaacttgcccacattgacgtcaacggcagtaacccggcgaatggttcgtttttcaaccatgactgtggcttcaatagacaacgatgcatagtagccatctgcgtcttgaacgatgcaaacctgcttgatttcaccttgccatcgtggctgttcagccattttgatgtcataccatacccttgtgccatgtggtttgtccaaacggagcttgccattaactatctgggcacgatccgttctaaaagttttacgtgagcgctttttcgacttccacttaggcttgtcatggttgggcattttaggattcaaatagtttgcccacgccttacttaaatcattcacggcaagctgtaaaacgcgcgccgatcgttcaaactgccaatctgctttgttcgcaaccagttcatcacgaacttttcgctcattaggccgtatcgacttatccatcatgactaaagaggcgtcatacatgtcattccagatttccagcccttggttccaaacgaaacggcgataatcaaacaatttttctaattctttacgcatcgttgcattgggataaagtttgatcttatgcgttttaatcaaaagtgttcacctcccttcaagttaactaaaggacttacttcaaaaatggatcgtcttcaagctttccttgtattgacgtaagccggataaccgacgcgaaaatacgtgaatcatactaattaagtcttcagttagctctccctgaggtgatagaccaggatgattcaaccccacaagctgtgtggttgaatctttggggtttggcgctcaaaccaatcatagccaaaacgcacgcaactcgtcgatgtttctttaattcatcagcatgaccgatataagccaagtattgatgctcggtataataacatcaattaggtggtgttctgcgagctttgagctttccagacttatcccactgttgcagttgcaccgagacatttagccatttcgtttggtctgagcatatgagcatcttccacttaattatcgtgctcataacataccatgttacgctacattgttacatatatttgtctgctgttaatcacctccaaaaagtgtgagcgcgagccggcgcgcttagaaaccggagcataagtggccttggacgtgatgaccgggctttggtcattgcgtccaaggtccttatgtgcaggtttctgcgccggggagcgcgttatagtgagctgagcgtgagccagcgcgcttagagatcggagtgtaagtggccttggacgtgatggccgggctttggccattgcgtccaaggcccttacacgcagatctctgcgctggcgaacgctttatgcaccggtgagcatcttgaaccgaaagcaagccgacacactagccaagtgccacatcgtttactgactaaaacggttacagcaccattataccgggcattatgagcataagaaaagaactcgctcagaaaaattattccaaacaagttcttgcttagttaacccgcgctaataacgcacattaacttcttttcaagatcacgccattacttgtaaacaatattgtcgacttcgatcttgttggtattaccattttgagcagcgttaactaactgatcagcatacaagatgaaggtatcggaactgtgggttgcaccggaaaccacatcaaccttggctggtgactgcttagcaaccagtgacttgttcagttctgggatgtattccttcgggccaaccttgttcactttcttcatgttagcttcgtatttcgtatcctgagtcttggacttaccgtctttattgacgttgtcgtagttgctttcggtaatcttaccgtctttaaccgtgatggagaaggttacccgatagccgttgaagtagttcttttcttcaagcgtgtaagtaccatctttcatcttgccagtgttattgacttcaattggcttggtgtccccagcctgagccgcctgaactaattgttgggcgtaattcttaaaggtcatactggaatcggtcgcaccggaaataacatcgatagcgccgacattggttccattcttcttaaaggacttgtttaattcaggaatgtattcctttggtccaaccttgaccttagccttcatggccttttcatagctggcgtctttggtcttggatttgccattcttatcaacgtaatcatacttagtagaagtaatcttcccgtctttgaccgtcatcgccatttcaaccttatagccatggtcatagccggtttcattcagcttgtaagtaccatccttcaacgggccacctgcaacctgcttttgggttgatgacttcttgaccactttactgctggaagccttgctgctggatgaatttttgctgcttgaactactgctgcatgcacttaaaaccaaagtggacagtgcaacaacggctgtccccgtcacaactttacttaacttcatgacatttaccccttttgcagttcataactgcgatattgtgttttcaatcacatatttagtttagctagtcaaatcaaaaaaatcaaccaaacacgggtattataagcgctttctcattttttaatcgtcctttacgaagcgtatttttgtgtcattttacacaaaaatgtacggctttagaaaaagagagcgcgaacgttagacattacgtaattttaaaggctataatggcttagatacatactttgtaagagtatgggtaaagcaaatggtaaggagtgttatgcatggcgaaaaccaatatcgtcgtggttggcgcggggtttgccggggtctatgcgacaaagcacctggccaagcactacaaacgtaacaaagacgtgacgatcacgctgatcgatcgccactcgtacttcacttatgtcaccgaactgcacgaaatcgccgcggatcgtgtcccagaagacgcaatccaatacgatttacagcggttgttcaatcgacgtaagaatgtcaagctggtcaccgataatgtgactgggattgaccgcgacaagaaggaagttgtcactgaaaacggacgcttcccttatgattatgtgatcttgggaattggatcacaaccgaacgactttgggacgcctagcgttgccgaacacggtttcaccttgggtaagtgggaagacgcgattcggctaaagcgccacattgaagacgttgttcggcgcggttccgaagagcacgatccggctaaacgcaaagcccttttgtctatcgtcattgtcggttctggcttcactggtaccgaaacgattggtgaattacgtgactggcgcgataccttagccaaacagtacaagctagatccgaacgaaattcaatttagcttgatggaaatggcgccaacgatcatgaatatgctagatcgttcagacgcgaacaaagccgaacgttacatggaaaaacgcggcatcaaggtcatgaagaataccggcgttgtcggcgttcacgcagatcacgttgatctaaaagacggctccacgttcccaacatgtaccttagtctggacggccggggttaaagcaactgaccaagcgaaagatttcggcttgaaacaaggacgtgccggccgaatcttagtcaaaaacaacatggaatcgcaagacgatccaagcatctatgttgtcggcgatgtatcgttagttgatcaagacggcaccggcaagggccagccgcaaatcgttcaaggcgctgaggcaactgcccacaccgcgttgacgaacattgaagccaagttggaaaataaggaacaggttgaatataaagccaactattccggatttatggtcagcttgggttcaaaatatggtgttgccaatatcatgggctggctgcacctttccggtttctttgcgatgttgatgaaacatttagtcaacatgctctacttcgttcagatctattccggttattatttattcgagtacttcatgcacgaatttttccggacccgcaatggccgcaacatgttccgcggacatctttcccgtcaaggcaatgttttatggacactgcctgcccgtctcacattaggcgctatgtggttgattgattgctggccgaagattcaaggtaaagagtcatggttcattgacaagctccggttgccatttagctggttacaaccggctgctaccagtggtgcctctgctgctggcgctgatgcaaccagtgctgcttccggggccgctgccggtgctgccaaagcaaccaagaccgtcttctccctttcatatcagtatggtaatgatccgatgatggtctttgacaagatgccaaactggtactacagcattaccaagaccttgattcctaatcagcaagttgccttcttcatgcaaaaggccatgacgattatggaaattctgattgggcttgcgcttgttgccggtttattcacctggttgacctctgctgctacgatcgcttttgtcggcgtcttctgcctcagtggtatgttctactgggttaacatttggatgatcccgatggcctttgcctgcatgaacggttccggccgcgcatttgggctcgataaatgggttgtcccttatctccagaaagtctttggcaaatggcgctatggaacaccgcgatctctttacggtaccgatgcactcaaataattgtctacacaaaaggctctgggtggacttacctagagtcttttttcaagagcgggaagctgctgcggtctcttttatcggccacgactgctccccgtccttcgtgttcacatcatcgttttgaagtcatgaacttgaacgcgattcaatttcactagattggaggctcacaatgaaacggccaaatacctttaaacgttatcttaagatgattcgcccatttgactggatcattgttggcggcctgtttatcgcagcgttcattccgtatcttattttcggcattcatgagaatcagcagcaagcaaccgcctcgcaacaggtattaacagccgtggtgacccatgacggccatgaagtttatcgcaagcgactaaccggtcatactgggaccagccacttcacctatcgtgataaagacggtgactggaataagattgaagtcaaaggcgcgggaatcgcgattacggaagctaactgtcaggatcaggtctgcgttcgccgcggtcggattacgaaacccggtcaaacaattgtctgcctgccgcataagctactcattgcgattaagtcaaataaaggcgatagcaacacgggaggtatggtgaccgaatgagtgtttataaagccgaccgtacccggcagtatatctatattgccttactctgcgctcaaggcgtcattatcggcctactcgagcgtatgatcccgtttccctttgcctttgcgcctggtgccaaattgggcctggccaatttaatcacgatcatttcattgttcacgatgtcaattcccgacagctttattctgatgtgcttgcgactgctgctcaccacactacttggcggcaccttgtcaacctttctttacagtggtgctggtgcggttttatcgtggtttggcatgttactcattaaacaattaggtgaaaaacgtgtcagtatgatcggtatttctgcagcaggtggcattttgcataatgtcggccagctcttgatggcatccttcatcgcccaaagctggaccgtcatgctctatttaccgattctcgcgtttatgggcattctggcgggcattgcggttgggattgctgctaattttctttttgaacacatcgatatcttacgacgactccgctatgatcgcaccaagcgtcgtaaaaaaggagctacacatgaaaattcatcccatgtggcatgaatacccgacgttggcgccggagcttgcttcagcgctaacgttgattgaaaaacagatcacaaccaacaatacacctgtggccaaggcgatcatggaaatgattaatggcggtggcaaattgttacggccggcgtactgtctgcttttctcccggtttcaagacacggatcgcgagaaaatgattgcactggcggccgccattgagacgcttcataccgccactttgatccacgacgacattatcgataaatctccaacccgccgcaatcaggtgacgattcaaaaacaattcggcccggacacagcagtttatgctggcgattatctctttgttgtctgcttcaagctgttggcacattacgcctcaagcctccgcagcattcaacaagacagcggcagcatggagaaaatcttaaaaggcgaactggatcagatggccacacgctaccaaacccaaatcaccattaatgactatctcaagcaggtttccggaaaaaccggccagctctttgcgttaagctgttttgtcggtgcctacgaaagcggcggaacaacgaactttgccaaaacggccgaaaaaatcggcatgaacattggcatcgccttccaattgctagacgacattctcgattacactagcgatggcgaaactttgggcaaaccggtttacgaagatgtgcgcagcggcgtctactcagcaccactcattttggccatgcagcgcgatcgccaagcctttttgccgctgttagcgaaaaaagaacacattagcgataccgagatgattcaactgcgcgatcttgtcatcaagtatgaaggtgtcaagcaggcctacactatggcgcaacaacgtactgaactggcgactgccggtttgcagaagttgcctgccggcgctgcacgagacgatttaatccgtttgacggagagccttttgaagcgcaaatcttaattcgtattaaccggatcttaagcaaccagcagaaattgagctggttgtttttttgttaatgcagatgtacaacaaatcctctaactcctagatcgctatcaggttcgatttttcttactctcgattaatgaccattaacttttcatttttgatctgtttatctgcccatggtctttacggcgtcttgtcgatatgtagcccattttgatggaaaaatctcttcgcttcatgagacaatcccaagacttttttactttcacaattgttagaactcgttatttaaagtcgaactttcatctgcggaaaatcagctaaataaccaaactaatgtaacagtctcattcgatgaatccgcttgcaatggcaacgaaatcagcttactataggttcacaatttcaagtcgtagaagtcagaagtctatttttgaatagtgggtaaccgttatggaaaataaagctaaagtcattaattccggcaagataattgtcagtcatatcgtctttcccttggttctggctattgctgttggcatcaccacttctggatcatttgtttaccaagccgttaatcatgaagaacccgttgtcgtccaggctgcttcataccccactcctgcaaagcgcggtatcaccctatatggattgggtaatgatacggtttatgtttactattcagcctcacaaatggctgcagttaaagcggcttcaaacacccaggcaaatgctagactagcttttgcggcagcttttggcgctataaatcaatacgcagggcttctggcaacggccgcattgattcgaacaaacacccagttcaacaactttagagaggcgatcaattcggctatttctaaaaagaaaggcttgcagcttcaatacaacacaactttcgatgatggtaataacagcgctacctggggagcatcatttgttgttaagtaattagcattccccttaaatcgaccccatgcaatgtacattgctgaattgaaggaacaatcagctcatctgctggttgtttttttgcgttccacaaagcatagttatccatagagccttcaaccattctcaacccaggaaagtgtgagtgacatgacaaccattgccgtcttttcagatatccatggcaacttagcagcgttagaagccgtgtatgcagatgcgattcaacatggctctggagcttactggttcttaggtgatctttttgggcccggaccagacgttcagccattgtgggaagaattacaaaccatcaacccgacgatcaaaatccggggcaactgggaagatttcttggtcaccacatggtcaggtaaagatcgtctatctaccacgcaaaagaaaattgaagcttatattttgaaccacctgcatgatccggccaagatttgcgccacccttgccagctggccgcttcaccaagaagtgacggtcaatggggtgcaaattgggctctcacaccatcttcccgccaataacagcggggatacgctctcagtccgtgctgaaggttccgcattatcggcattattcagtggaccccgtagtacccttgacttggccatctatgcccacattcaccatcccacaatgcgttatgtcgacttaagcatgccgatccaaaccgctgatgcctttgattatgccaaagccgatgaacgccttgttttgaaccttggctcagtcggtttgccttttgacaagccaactcgccggtatcaagagtggcgcgctgagtatctcttactggaagtgactgacgacggcgcaatcaatccgcagtttcgccgaatttcttatgatctgcaaagggaattcaagcaggcgctggcaatggacatgccgtttgttgagaattatcggcataatttctatatttaagcgagggaggtttgctgtgcatacttttctgcttttgttaggattttagttagcccaacatttaaaaaattcagtacactgatatacattgtaactggatggcatagagactgtttacaagcaaaaaaagtcccataaaattgggactttctgtacttcaaacactcctattaaattgttaaggatgatgctattagttgatttatcgcatatctggagaaaatatcctgttaatatcgtatggaagccttcactactctgacctatctttaaaataaacgctccctatgagtacagcaatcattagataaccagttaatttaaaatattgcgtccaataaagctcacccagaaaaagaagatcataaccaatattaaagagcatcaacgccaaccatagtaaaaatcctccaagatatgtcttggctttattcttaacgtttaccaccccagaccgcattgtacggcataccatgccaatacggttgccataacagctgcattacgtttaataccctgagctgctactttagcaacgatagcctttgctgcttccaaccagagctttttgtcaatataagccacgatagtattgacattgaccatgcttcggatttcctcaccgagttttcccagcatgcaatttccaatatcggctagatcgcgttgaacaattcgatgctccgttggaaaaatacgagattcattctcagagataccgataaacctttctgtagcctgaatttcatcttttccatatttggcaatgagataatcaatgttaagattttcaatatcgccatctacaaacatcttttctagttccttggcgacggcttgctcttttggcgttgccgagtttacagtaatctcgtctgctttagttgctgcattgaccggtttggctccggttagcattagactaacaaacaatgtcgttgtgaatatcgctagcaatgcaagaaatttaggtgttcttttccacttcgactgaaattccatgtgaatccccccatttgttaagcgagttactcgctttttttgtcaacatccgccataatttatccaggaacaataataacgtcatcacccaccggataagtgtcattcaggatctctgttaaatccggcacacggattcccccctttctcctccaacctcctccgacatctacactgataatttaatcaaacttcagctaaaaaaattcaaaggtcgagtattttctacatgagaggtgaagaaatgtttgctgatcaatttacttgtggtaacttatttcgccaaattcgtgaacgtcgtcatcttaaaatctccgatgtacaaggacccttacacaagacttcagtttctttctttgagactaaagatgccaacatccgtctttttagcctgatggagatcttgaagccaacaatgacagaaccccaggaattctttgagttaattgatcaaacgcatagtcaattgcgtcgcttttttacagagctcaataccttatatgaaagtctggatttagcgggcttgcaaatgctcttgaccgattatcatggaattaaacgatctgaaacaccacagtatatgctcaagctaatcgttatgtcttgtattgctaaagttaaggaacaaagcccgattttctcggctgaggatgaagagtgcatccagcaatttttgttaacagaagggcgttggttccactttgagtatctggtatacgccaatttgtgtcactcgctctccaattgcgtcaatgaccgtttacttcgccatatggtcaacaaatatcaagaatttcacctatctcggtacgatcaagcttttgttggtactttttataatatttccgcgaggtacttaaaagatgccgattatgaccgtgccttatcaatgctagatatagttgccgactttcctgtcaaaaatacagccctgtatctgcggcatcatgtggcattcatccggctagctgtgccgattttaaagtgccaagatcaggaagccaaaaagaaactagctaccttactgatggccacagagatcattgacccgaagttatataagacgaatatggcgtggatgaagtctctgaatttagatcccgaggcaatcttaaataacatcacctgaagaagtgctgggtccccatggaagaagagaacgattaacctaatattctaaggtggaatatttgatgtcagcctaggattaaatagtttgcaaaaagcagcaagtccacccgtcttagcacagacggggcgaacttgctgctttgttaatttcatttattcaaggctgcacatcccaaacaaagtcaaaaaatgtatagcgctaaatctcattgattcactaaggttccaacataccaagttgcccaaataagcaacaaagacagtacgccgaccaggacaaatcgtttcaaactgaactttttatcaggaaccagccgtacgtaccctatataaccggccatggcaagcgttaacacgattagcactcgatgtaaaccttcaagaaatgtcataatttttctagattaatctatgcctctgccctttgtcaaactcaactagactaattgactcgcatttttaatctttaacaagaccgaatccaagccggcttgacacaattatccgtttcacattcaacaaatctttatgatcgtaaatcacactcacgctttttgaaatatcagcctaaactcatcagccaacgaaagcggcgcaacactatatggcacgtcatgagtcacgagtcctaaaacaagcttctcacgtgttcccttatccagttttgtcaaatcaataagcacccgatcacgatcagtatctaatatcgcatccgcactaacatcggttaacagctgggatgtctgccgcattttcaaaaagtttggctggctctcatgcatattgatttgtttgacaatcttgcctgctcgcagaaaaagaatgcgatcggccagactttgcaggttgtccagtaaatgcgagaccatgatgacgagcttgccatcttctcgcagttgctgaatttgacccgagatcagcgcaatattttccggatcaaggccgttcatggcttcatccagtaacataatcggcgtatccgaagccacgaccattgcaaaacataggcgctgtttcatcccgagcgaataggtgctgactttttgggtgatataactgcgcattttcaagccatcgattaaggcatcgagcgtgatctgactctgccacatgtttcggtacaatttcaaatgttcatagccagttaactcaccaaaaagctcgctttctaaagggaatgcgcaaattttttgataaatcgccttaatcgcttgattgctttcgtagcgcagcccgtccacctctacatagccacggtcaggctttagattattcatgatgacattcaaaagcgtggttttacctgtgccattcggagccacaagtccgacaatttctttctgattcaaagtgagcgtgacgtcatctaagacatgctttttgttggcaaaagacaatccgatatcatttagctttagcatgatgccacctctctctttttcgggtgccgtttgtgagtcaggcaaaatataacaacttcaagtacgactatcacactcagaatcatgatcaacccgaacacgaaggtcatttgggtcgtctcatacctgaagttttgaaagcccaccaccaaccggccgatattgaagtaactcggcaacaagtataacgagttgtgattaatggcgactaagccgggtagaaaataaagactttcgctaactatcaacaggattgtcaccgccaaactggcaaactcactttttaaaattacctgtaagacaacctgcagacgaatgatcatccatacgcttaacagtaaaagaataaaggcttccatcataaactggccaagtgaaatcgtgctgaaagtaagcccttcatacaccggtatcggtagggacaaactaccgaggccgaacttgatcatgttaaacggtaataagatggccaaaaagccaagtaacaagccgccactcatcagtaacgctgacagagacttgtcattgagcatggcccaagttgttaacgggaagtttttcaaaatcgattgtttcttgcgatctcttgtcactaaatctgtactgatcatcgccgtcacaagcaataacgacaacgccagtccataaaataacgcgcgttgcagctgctgtaaggctgtttgttgattaatcatcgctgccgtgacactattgtttggcatatgtgcatattgacgcaaccgagtccgcgcctctaaattccaataatggccattacggttctgattgcctgaacctgcatcgcggaccacagtcggatcactgtaatattgcagcggataactaagccacggttgcccttgtagcactaggcgatcggtaagcgctaattcatcagccattgatgctgccacctgattgtatttgccttgcccagccgctttcaactgcgcgcgttcatctttcataaactgagggacataggtaccagcgttggcaatggtcggatagttaggaaatgccggattgaaggatttcatgaatttcgcatttttctggtacttagcggtcacctcctggcgtgaaaagttttccaaggtgccatttgcaggtaagtactgatagcagaaccaaaaactccatagcaaaaaaattaagcacgcgccccaatttttcttactgaggagattttgtttgatttgaaaggctatgtatgaacgattacgactcattttttgcacgcccccaccttgaaatcacgaataaaatacccatcagccagattaacatcatccccaaacctgtcacccaaccaatgggcagatgatcgtttattagaaaatggcctgaatacacattagcaatgcttaaataaggtagcggtgttaaatagaagactgctggcaacgatggactgaatgtcacgatggttaacacgacaaccaaagcgaggagtgtcgcatagaaacttccgatcagtcgattcaaccaaatggctacaaccgacatcaatactgtgagcacaactgcatagaccgcaatcagtaagccggcaagccaactgggaaccgtggtgattttgtttatcaaggtaaaagcggttggatagttccagtccccgaaaccgataacgattcctaaaagtattaatcccacaaccggcagaacaaagaacagtccgatacttaattgaaagtttgctttgacgtgggccgccattttaccaagaaaatgaaccggcatgttcctcaaaacactttggtgctcaagttctactaaccatgaatctccgactaaataggcgattaaaaagggtgcgcacacagcgatggcctgaaataataaggcgccatagtcactggcagtcttgatggcaacccgcggcgaaccttgaacttgttgtaactttctggcaaccgcgagcttccccgtcacggcttctttggttgggattaatagtccgctagcaccggcaaaatcaagggaataacttttaagttgcgcctgagccaattcaacctgcccattaagaatcatgctggcatcatggacgagtaagccactatcaatcttgccggttcctgaaagttgctcattcaacgcctgcaccatttttccttgtttgctggttttcgaatagctttgggcatcatagcgtaaataactcgattgcaccgactgctgaatcctaaatgtctcaatctttaaatcggcaatctgctgaaatttagcaacccaaaacaagccaatcactagaaaaaccataaaaagttcgcctaccaggtttttctgattcagcatcacttgcttttgaaaaaaggcgcttaactgtttcatcttagatgcctctctgttcacccgtttttgctttctctggtcaaaactttactcaaagtaaaattctgtgagttgctttaacataccaaatcaataggtccacatattttgagtatattgataaaatatgagcccagcaaaaaccagctatttctttactagttcataccttctattctctttatccattgattagtacatgatgagctttacattacattaaaatgaggccgccatcaagtaagagctcaaattaatcgtgcatcacatccgccataacgcgctccccgacgcaggtccctacatgtaagggccttcctttactcctataacgcgctccccggcgcagggatctgcatgtaaggacctcaggcgcaatggccaagaccgggccatcatgcctgaggccacttacactccgatccctaaccgcgccggctcgcgcttaccaaaaaagccaaagcacctcagccttcaaaaaaactgggtaccttggcttattaaacccgcatcaatgagtgtgaacttttgcagcgatttgtttgccgaaatctgtttgatcaaaatgttcgataatatccttaagctcggcataccgcagactagcgccgaacaacggacttcccggttcggtcataatgccgtctgctaatcggttatgaacaaccgtgtcaaagcccattcgatcaacaaaggcagctacttgatcaacagcagcgggatcatcaccggtcacaaacagcgccttgcgttttggattccctttaggccgcgcttcttcttgcaggttatgatagcccatatggttgaaggttttgacaattttggcacctttaaaataggcttgaacctgttcactcgaggtggtcgttggatctaacacttcttcacgaataccgtctgtttcccaccagtaattcatcgcatcaatgactaaatgacctttgagtaagtctgcatcaatatttttataccggcttaacgggattgctaaaatgatcaagtcactgttagccaccacctcggcattttcggaagcaatcgcgtcggggacgagggttttgatggttaaggcgatttttttgactgcgcctgagccggaaatccggacagtataaccggcatctaaggctaaaccagcgagaacgatgccgactttaccagcaccaagaatgcctatacgttgaatcgccattatttcaccgccgccttttctgctagaatttctttaacccgcgggatgactttcgtgccatacaactcaatcatgcgttcacgctgagccgcagtttggttaccggcgccgtaaacaaggtcaaagcggcccaaatccagcagatcaattgtttctgccatgcgccgcgccacggtttccggattgccgacatagaaggagcccactttggtttcaccatcgaattgttcgcgactcatcggtgcccagccgcgagttaagccaatgcggtcaaaattggctttgatattcttaaaggcgacttcaattgcttcatcttcgtcatcggcaataaagccatgagagtggacggcgattgggaattcgggtttgccgagctcctttgcggcagcatggtacagctgaatatatggcttaaaccgactcgcctgaccgccaataatcgcgatgatcactttatagctgaagttaaccgcccgaatgacagattccggtgagccgccgataccaatgtatgtctccagtttgccgttttctgttttgggataaacttcctgattcttcaaagcagcgcggaattttcctgaccaggttaccgctttttcattgcgcaaggcatcgtacaagccaagtttttcgttgaacaagtcgtcatagtcggtcaaatcgtagccaaataacggaaaggattcggtgaatgatccgcggcccaacattacttgcgcgcgcccgttagacaaagcatctaaagttgcaaagcgctcataaacccgaaccggatcatcggaactgagcaccgtgaccgccgtggcaagcttaatttgcttggtaactgtcgaaattgctgccaaaaccgtttccggacttgaaacgctataatccgggcgatgatgttcgcccactccgaaaacctgaatgcctaattcgtcagccagttgaccttcacgcacaatctgtcgaatcgaggccgcagccgtttgtaaactgccatcttcattcgccacaatgtcaccaaacgtctccagcccaaactgtaaatgctcaatgtctaccatcaaaaatgcctcccaaacgataatacttactttttgtaagtcgataatcgtatcatagccttttttctggcgggtggcaagctttcacacagatattcatacgaggatgtgccaataaattgctcagagacgcaaaaaaagtccgatcatcgtgcgacggtcattagccaatattgacaatgacccgctgcgtaaccggactttttaaatgaagtcacatctgaaaacttattcttttggtttcggtcgacgttccaagtggcgccgcattttatcgagcaagaagagttgatcattattccatgggctattacggcgagctagatgcgccgcgtaactggacgtatcatggttgaattcacgttccgagcgttgcacttccttgagaaagtcgcgcgaactgatgcgtaaggcaccacgggaaaagaccgtccactgctctgcttgatcactggtgaccacgaccagctgcaccagcggcgagttcatctcctgagcgagtcgttcgatatagctgtcggcagtttcgtcttctttcgtgaaaaccacttgcaagtcccacttggcgtaacttttaccgattcccggaacatacatggcatcgaaaaccacaatcattttcgcattttcatgactgcggtattcagccagaatatccagtaagcgatcacgggcgacatcgaaatgatcttctgctttcaacttggcgagttcaggccagttaccgatgacgttatagccatccacaatcataatatgttcgcgcatttacttaccctcatggcgactggcaaaagcttgatacatcaagatgcccgccgcaacactcgcgttaaggctctgcacgtgaccgaccatgggaatggcaatggtggcatccatcaatttggcaattcccggcgaaatacctttgccttcattgccgatgactaacgccgtgctgccttttgcgtcccactggcgataatcctgcccgtccatggcggtgccaaaaatccacatgccgcgatctttcaagattttgatggtttgcgctaggttcgtgacccgcgcaaccggcacatattcgatcgccccagtgctgactttggccacggcactggtcaaaccgactgcccgatgctttgggataataatgccatgcaccccgctcgcatcagccgttcgcaaaatcgagccgagattgtgcggatcttccaagttatccagcaataagaagaacggatcttcccctttatctgccgcgtgcttaaacagatcgtccaatgttgcgtaagcatatggcgtcatcgccaagagaaccccttgatgattgccgtggtcactcatgagatcaagtttttgctttggagccgtggcgactaagatcttcttcttttgcgccatgccgacaagatgctgaatcggttcgctttttagatcggtctggacaaacagcttgttgatggtggctgcggttcccgccttgagtgcggcttcaactgcatggcgcccgaagacgaattcatctggctcgtgttcattatttggtgcttgcggctgttttgccatgacccgtcttcccttcttcaacgtattggatacaccatgcggctagctcggcaacgcgattatcgcggccttcaagatgcaagtaaccaaacagtgcttcaaatcctgtcgagatgcgatacgtgaccacatccgtatgtttggcatgggtgtaacttttggcattgcgcccatgcttgaaaacttctgtctcttcggcacttaacaaatccgccgtctgcatcccggcaatcaacgccgcttgtgccttggcggaaacaaaatccttggctgctcgttgcaaggctgccgggcgcaccagcccgcgtttgagtaagtgttcccgaatatagacttcataaactgcatcgcctagataggccagtgcaatcccgttcaattgttttggatcaaatgtcattttctgcgccaccgtgtcccttgaggagtgtcttccaaaataatcccttgtgctgccagctgatcgcgaatctcatcactcttggcaaaatccttcgccgcgcgcgccgcatcccgagccttcaccaaggcgtcaatatccgcatccagattggtcgggtcggtgaaaacaaccccgaaaatctgcagccaagcgtcatactgattcaggagatcattgacactttcctgtttgacggtatcttcattggcatattcattcaacaatttggcaagatcaaatagcacagtcaggccattttgcacgttcacatcatcgtccattgcagcaatgaaacggtcttttaaggttttaagctcagcagtgatctgtgcatcaacgccgtcagcagcattggcacggcgatagaccaagttttcccgggcaattttcaaacgatttaagctattagcagcattctttaaattcgcctctgaataccgaatcggcatccgatattgcgtccccgccatgaagaaacgtaaaacctggggatcgaccgttttgagaatatcatggaccgtaataaaattacccagcgacttgctcattttctggtcatcttcgccaatggtcacaaacccgttgtgcatccaataacgcacaaactgcttgccggttttggcctcactttgggcaatttcgttttcatggtgcggaaattcaagatcctgaccgccgccgtgaatatcaaatgtatccccaaggagttgggtactcataaccgagcattcgatgtgccaacctggccgccctttaccccatggtgagtcccaactgatttcaccgggtttagcagctttccacaaggcaaaatcgattggatcttctttcttgtccagctcttcttgtgtgatatgctgactggcaccttcttcgagttcatcaacattttgatgggataactcgccgtaatgtttgaatttacgggcgcgatagtaaacatccccatcaaccgcatatgcatagccttttgcaattaaatcctggacgaaatcgacaatatccgggatcatctgactggcacgcggatgcgccgtcgccggttcgatgccaagcgcagtggtatcctccatgaacgcatcaataaatcgttgtgccagatcaaggggggcttctccggttttgtgtgcagcggtgataattttatcatcgacatcagtgaaattcgaaacataggtgaccttaaatccgcgatattcaaaataacggcggattgtatcgaacgcaatggcactgcgcgcgttaccgatgtggatgtaattatagacagtcgggccgcagacatacattcggatttctccgggatgcaagggtttaaacggctctttttgtcgcgacatcgtattatatagcgttaacatcggctcatatccttcctgtagcgtcttacctgcattttacaggaaacagcagcgtttataaaggaacgtgacgcgttgtttcacagtttttcatcaaaaaacggcgtccggatatgatcaaccggcgcggctgcatttaatcaatcttccgctttggattcaaaatgtttaacggatcaaacaagtctttgatgcgatgttgaagctcgtcaacggcaaatccaagctcttcattgttccattgattcttgctcatccccacggcatgttcgccggaaattgttccgcctagtgcaagagctttgcgaaacatcaagcgaattgcctgcagggcttcttttggcggttcaacttgatcggctggccaaatgacggttgggtgaacattgccatcgcctgcgtgtccggcggtgtagatttcaacgtttaactctttggcgaccgccgcaatatagtccatcatttccggaagcttggaaagtggcacggccatgtcttccatgatgtgctgaccgtttgcaaacacagcaggcaacatgtcttggcgcagtttgatgatcgcggctgattcagcgggatcactggtcacctgaatgtttttagcgtggtcagcggttaatattttctcggcaattttcaagcttgcctcaccaccagtatccaggcggaaaatgagcatagcttcggcgccttctgcataatgcgtgccttcataacgatctagtgctgccaccgttaacccatccagcgcctccagtgtcaccggataaataccggacagccgcaaatcctcgacccctttggctaaagcggtcatattgtcaaaatacgccacgccgacaaccggagtgccaaccggaatcggatttaacttgacggtaatttccgtgatgatccccagcgttccttcagagccgacaaaaagatgggttaaatcataactgaaggcatgcttataagtacgcccgccaagcttgatttcacgtccatctgccagcaccacttttagtcctagcacgttgtcactggtagtgccatatttcaccgtgctcatgccacctgcattcgttgcaacattcccgccaatgcttgaaatcggcttggatcccgggtcaggcgcataaaataggccttgttttcgggcggcttgatccagatcgccattgatgacgccaggttccacaacggccaataagtcgcctttgctaatctctttaatccgcttcattcgcgccgtggacaaaatgatgctcccgtccagtccgtcagcaccaatcaccgtgctagtgtcagctccttgaggcacgaccggaatatgatattgccgtgccacctttaaaacgccctgaatatcaggcacgtcccccactgcaatgtatgccaaaatgtgcccggctatctcctgttgggcattgccattagcgctatgttcgcgggcaactttatcatctgtgtgaatctccgcatgcggcgcggcatcctgcaatgcggttaaaatctctgcatgatcgtaagctgtaaaaatcgccatgatctaaccccctgtcctgaccgtcaatcatgaaatgttactgatacgactatttcgcttttattatgactcaattcacaaaagaaggtcaggatttagtctcaggggcaaaccaagataaattaagctaggcgattggtatcgtcaagattgcgatacgacagtttaggatggacggtaatcaccgcttctcccaaccacgttaaatctcgggccattcttttcgtctgcaatggtcgccgcggatagccaacacccgtcactttcgtttgtgaggccacacaaatggtcaagacatccgtgtcggcgcaggcatccggctcatgccgaaaccgcagtgcattgaaaacttgcccgggcgctatttgcaagggctctgcgatttgcggataagcaacgcgcaccacatgccgaccatgagtatcaaaaccggtcaaaaccgcgacttcaggctgccccagcaagcagaaatgatgatcaaatccgtcaaaccggctaaatcgtggcaaaatgtaataaaaagtcggcaccaatagtttcagcatccgttgaccggtcagcattagcccagcctttccagcaaaacaaccggctgcggcagaaccgggaatatagcgcaacgcaaaggcaggatattttgaggaagtggtaaccgaattttccggggatgggggttggcgggaaggcaacatcaacattcactcctatcgcatcattagactataaataaaataatactcggttaactgctgaaaacgcacgcgataacccttcgccatgccatcaacctaaccttataaaaaacaggccgggtgtcagctgccgaatccgacgctgtccccctgcctgtcacctgaaacctaccccaaaaaatcaacatcacccagcttgttcgaaacgcacccgatcaagtccgtctcgttctcacaactcggtcatgccgcagtatccatcgcctttccgttcatcacgaaaagagccacccacttaacagacgaaaaagccctgtcgtaaccaaccctgtcacaatgcccgccaaaaaatagccgactttggacatactgcgtttacgtttcattttcgcttcacctcagatgatgttaccgcttacccgtcccaacaacttttattttaccctatcgagatgcacttgtgggttttcccaaataaacgtcggaaaatcaccgattaacgttgtgctgagtcgtcaagagttggattcaccgtccaagtaacgggtgaaaaaatgttttttctataacgcgccggctcgcgctcacacaaaaacccgcggcaaacgtatgcgcgcgggttttaaatttgcttaaagttgtgacgtgacaatctcaacattcttcaagacttgatcgcgtcccattaattcgatggtttcggctagttgtgggccatgcatccgtaatgttgcggcaattcggattggcatgtaaagcttgcgtcctttaacttgcgtctcctgcttgacctcgttgacgatgtgcccaatggaataagcatcaaacgtgtcgagtgcccgaatctttttggcaaaagcttcgatcactggcttagcgttatcatctgccagttccttgcgctcatcatcagtcaaatcagtggccttatcaaagaaaatatccgccaatttactaatctgagctgtataactcatttgatcagtgtaaaggctgatcagctgccgagcccattcaatcgtcttgggatccggatcgctttgaatcttgccatcttcaattaggttagccaatgacaggctcattaactcatttggattggtcttttgcttagccttgatgtactggttattgacccattccagtttcttttgatcaaaccgtgccggactcttggacaaacgcttaggatcaaactgcttgatgaattccttcttggtaaagatttcgtcttcgccaaccggagaccatcctaacagggtgataaagttgaacattgcgtctggcaggtagcctaattcacgatattgttcgatgaattgcaaaaccgtttcatcgcgtttggacaacttcttaccggttgcaccattgataatcaaggtcatatggccgaagatcggtagttcccagccgaacgcatcataaatcgctaattgctttggcgtgttggcaatgtggtcatccccgcgcagcacatgactaatttccatcaaatggtcatcgacaaccaccgcaaagttatacgtcggcatgccatcacgtttttgaatgacaaaatcgccgccaagcgtgttggcatcaattgaaattttgcctttaacgatatcgttccactcataagttttatcagtcggaatgtggaaccgaatgactggctgtaatcccttggccttggctgcagcaattgcatccgccttttctgcttcactcatgccttcatattcgtactcgtaatgtggcatttcgtgacgggccttttgggcttcgcgatcggctttcagttcctcttcggtccgatatgattcgtaagcaaagcccttatccacaagctgcttgatcaacttgtcataaatgtctttacgttcagactgacggtatgggccaaagtcgccacctttatcagggccttcatcccaatcaataccaagccagtgaaggttgtccatctgactcttttcaccgtctgcaacgttgcgtttcgtatcggtgtcttcaatccgcagcaccaacgtccctttgttgtgccgtgcgaataaataattgaacagcgccgtccgtgcattgccaatatgcaaatgcccagtcggacttggtgcataacgcacccgaattggtcgatctgccaatgtcttagcctccattttctgtaaacatgcactgatagtgtaccacagaagggcaaacgatggacgggtccgggtgcaattggcacctacttaattagctaattcgttgaccgtcaacgcaaaaatctttagactgttatcaggctcagaacaaggcttaattacccttgttctttgtttagcggattggatggcacacacccctcaacattctttgaacgcggaggtgatagccatgccaaaatcaggagacgaaagggtttcgccgcattggacgtggcgtcgattatcgtcgcgcttgccatactggttaccagaatggccaaagcttacgcgataatcaaaaaagctaaccgtagaggctagcttttacccaaagtcatctgtgaactgcgtcgaggtcatcagggcaccacctgatggcctcttttcaacgccattattataccttggatgttaacaaatcgtcaagaacgaccagacccttccttatcagacgtcagcttatcagattgaagccaattacagcactcgctgaacctgctcggctttagtcgctaacttgtcggttgcgcatcgtccgttgccatagccagtaaacaagtcccacgatcaaaagtgactggccaaccagcaggaattcttcaacggtcacactcaacgcacccacttgtgtcagtgccgcgggaaagtcgatgaaagcatgtaacccgatcggaaccaatagccagaaccattgcttccgtttaacgataagcaaccaaaccacaacggaaagggcaatctgtacggctaatgccatgatccgttccagcaacgacagcgaaactgtccacgcactcatacccgttaactgtttcactaccgcggtgatagcggaccgcgagttggcaggcgtttggcttaataccttctcaattgatccgctattgatcaacatggcaaaaagatagttactgagcactgtcatactcccaaccagaatcatctccaagccgccatgtcctaagccatacaggaatggcgtctcaggatcgttaattttatcgggaatacgcttttggataaacttgaagcccaaaaaccggccaacttcttcaaagacaccggccaaaagcgcgccataaagtgcataagcccaaggtgtgtgctgaaactgccgggcaattccacgaaacgggccttctagtacacccgcaaataggaagaagattcccatcccgatgaagaagattttagtcgccccttttttgggatgacttcgccgcttaataacccaaactgccagcccaatcggcaacgctaagcagatgagcatttgaatcaacatcatggtcacggctgattggctgaccatttgattattcacaactttttccattcgcttttacctctcaatcaaaccagaatgctaagagcataataccaaggatcaataccagtgttagtcccattaagacccaactgatcggccgagccatattcaatgtaaacccaatgccgatgcgcttctcgacaaaaatggctgggtcgccgggattgtagtaaaaaacaccaccgatccaatgctgattgtcgttcagtaccttgccttttgcatccagtttacgcgtgccagcaatataagccatgggcagtaacataaccgagaccagcgtcagggtcgcggtgagaatcacgttaagccactgccagtcgctagacattgccggtaacatcagctgtaagaccagcaggctttgtgagaggaagccaattaaaagcagatagtacaaaatagcgttacgcacgcgcccggatcgcggttcggcatccggattaccacgaaccgtaccacgtgctcgacgggtcaaataaaaagcggttaataagatcagcgtttcgatgcccaacgccattaaaagcacgatggtatctgcggaaggctggcggaaacccagaaaaatagccagcaagcattgtggcaacagaaccagacccgctgcggccgggaccagtgtttgcggctttaggtttgccaagtcaattgtcacttgatggttagtcaacgcctgatctgcatgtaattgctgcatcaattgtttacttttccggtgaccagcaatgattaatacaccattaaggctcactgtcgctaaagtagcggcaatttgaatccaggcaagggtcactgacgacaatgcccaaatagccacggccccgcctgccaaaacggcaatcaccactgcgcctaacgacgaagcaactagataacgccgtcgcaatgtcactgcttcaggacgttgccaaattgatgtgcgtgcgtaaacaacgccgaagagaacattgcggcgcgacagccatggcagcatcgcctgaatggcaacaagcacaagccaggttatgacaaggatcaaaatttctgctttcatctatcttcactccccgttaattggtcgtacagctgatcaatcattttatgcaccgtgctacggtcaaggttccgcgccactgcttcggcaacgactttttcaagtgctggccgcaaaacattctcgacagcttgttcaggggcgccgcgtgattggaccaccgcaccgcgtcctcgttgtatgactacgaagccttcttgttgcaacgcttgataggctttgttcactgtgtgcaagttgacacccagctcatttcccagtgcgcgaatagaaggcaacacggttccatttgcgagcgtgccagtcgcgataccattcacaatagcatcgcgaatttgttgataaagcggtactttagaagccaaatcaattgtcaaacgcacaaacccgccttcttcccgttacacttgttctacatcatgtataacactcgtgcaaaaaaaggtcaacgaattttggctaaattgccgccgctcgactttttttattataagtaccctaaacgacgccttttttaccgcattaaaatcggcgtaccaatttgtgcgagttgatcatcatgcgtaatcgcaatcaccaaccgcgtttttgccagctcctgcagcaagtgaatcacatccgctttgatttccgggtaaatattcgcggtaggttcatctaaaacataggtcgtggcgtgttccttgctcaaggcctttagaagtcgaaccagttgcaactcgccacttgaaagaatatcgacttttttatctagtaaattgaatatgttgaaattaggcgaatggaacacctgagtaaaatgcttcggttcttcatttaaaaatgccgccacattgcgacagtcatcggctaagtattcgccaactgtcagatgcgggctaggtacatcttgaaataaaaacccaatttgctcgcgccgcacttttgtcaagtcgacttgcgccgcattaagcccatttatcagcacatcgcccgtcatttcaggttggtaaattccggtaatggttcgaacaaaagtcgttttcccaatcccattgtcgccggaaataacataaagtccgggcgtccgaaatgaaacattcatgttcttggcataaaacatctcatcgttacttggctgctgggaaaaccttctgacattgaatccttttacctcaatggagtgaatcccattcacttgtccggtccctttttcatcaggcgcaatgcttagaatttgtcgcatgcgtgcaagcgaagcccggtatgcttccgtgcccattgctaccgtcagcagctggtcaaccgaatttaacaattgactgaaatattgcaaaataatcgagaaaaagccaatggtaatctgtccattgagcactgcaaatccgccgactaagaagaaacaggtttgaaagatcaactgaatactgatttgcgaagccgacatcgtaaaccgaatccagaaatctttgatataagtctggaatagccctgcttcaacccggttcaagcgctttgcttcgttctgaaaactaccagcacctttaatttcaatataacgaccgataaaatcattgcgcgccgtgaagtattcgttttgcttgttcttaactcgcaagctgatcgcgtagattttctggtggaagacaacgtaaatcacaaaataaatcgggacaaagattgccatcatgccaaaaattttagcatctgctttcatgacataaagagcaatggtcactgttgaaacgataatgccaatgagccgtaccatagtatccgcaaagaagccgacaatttcgttgacgtcatcgtttatgcaggaactcaaggtagtcggactccaggtcaggattgcgagggtcttcttagtaaacaagcacgccaaaatactgcgattcatcgctaggattgttcgccgtcgcgtcaggatctgaatacgattctgaaaataggaaacgatcagccgcgacagcccgattcctagaatgattagcaataaggtgacaaataaggtgcgatcgtgactgtacacaaggctatctaacaatttaccttctagataagtcccgccagtgattaaactggttccggccactgccagtaaaattaatgcgatgaaggaagccgtccgttttttcagaacatgtttaatgatgggtggcataggcgtacctctgtttcacgtttgacgtgtttcgactggttctgcaaaaaggtccgggttctgtccggaaaaaacatagcattgttacatcgtcctgacattctcgccgcatagacaactatttactgaaacagaactagcttgtcaggataatttgtttgtacctgtcttcatgtgattcgtcaacgatttacttaatactaatgccattatcaaatatttctttaattttataacttaatcttttgcttagtaactgaggcagcaatttttgtgatcgtgttctttttacgtttgccaatcaattatgaatcctaaccagttgtttctttttgcttgttgaccaggctgatattctcatggccgaattttagaatatgtaaagtcgttttttcatttcaatttgtcaacttttcgccaccaaaaaaatcggtcctcaaatactgagaaccgattttgcttaatctccatgtagctgatttagatttactttcaaccatcactggcgcttcgccttacgaaacagctgcgtcgaaccaaggcccataagtgataacaacgctaaacccactgctgcaataccgtactcgtgcttttcgttagtattaggtaaccgtcgctgagcacttggcgttatgacttcagttgtggcagactggctgctggttgatggtaccgttgatgtttccggcgttgttggcgtaactggaatagccggtttcgtatagacaaagctgacaaccaatccggtatctttaggaaaagttcctgatgctgcagcactatcagctgccaggcgcacataccggtaaccgttaatcgtgatcggaccggtcgtataagccgatccactctgacctgtcaacactttgttaggtgctaattcgttaccattttcgtcaacataacgaaccgtgaccgatccttgtgtggctggcacctgcttgtaaacaaaggtaacgatcacattgccgttgataaaggcattaccagccggcgcactgccttgggccacacgggaaaaggcatagtcgctaatctcaatgggccgggcttcatataaatcaccaacttgacccgtcagcgtcttatcaggggcgatgcgcttgccagcctcatccacaaatctttccgtcacgcttccttgcgctgccggtttttctgtataaacaaaagtcaccgtctgcggattagcagtaaagcttcctttttcaggcgcactgtttgcagccagatgcgcatattcataatttttgacgttcgctggcacggcagtatacgaaccaccgactgtccctatcagggttgtggctggtgcgatttcattgccatgttcatcaacatacttcacattcaccgttctttgagctacaggaacttttgtataaaccaaggtaactgtcaaagtgcctttactaaaggttccgttaattggcgcactgccattagccaactttgtatattgataattggcaatcgtcgctggtttaattgtgtacacttttccaacttcaccttgaagaatcatgtctttaacaagcgtgttcccagcatcatcaacacacttcaccacaacttcattgctgctcgttggcgaatcagcgttcattgtttgctgattatttaaattcaattcttgcccaagcgttgccggttgcacggccaatgtggctgtcctagtcgccattgagctcgccttaacttgattaggttgatgcccgatagccaacgcaaagacaccaattaaagctaccagccatagctttcctgacttatataatctataacgagtcttctcttctccaaataaacgcaatggtcttgcccctctttcgtgatccagccgaaaactttttcaactgaaaacaacaaaaacagctgctcatacattcacttgtattgtagcattaattagtttttaaagagttatcagctacaccttagcatgccaataaagccgctacgtcagcgtttcataaactttatcaataaaatatcggagttccaattttctttttgaatacacactgatatggcattcagcgttgattcatgcttctagatggttgacactgctttttgataccgttgttctgataattaatttgaattccgttttttaaaaatgaacaaaccggcgagtaagaagcaaccaatataaacgacatacccgacagtgatttgaccaagtgttaattgggtcatcctagacagctgttgattgccaatttgttctcctaaattcagcatgttgacgggattccattttagccatgggtgttgatcaatcatcatgaacattaactggttaaagatggaaatgacaaaataggcgctgatgccgacaataatcgctggtgttgagttttcaaacaatgtagcgataagttcgacaaagcataacaagaacaataaggtcaaaaacgtggcaacgatattcagtgaccatagctgccaaacgtgtgcatttaaggcaaactgattgttgagcactaaaattttgatgatgacactcatgcatgcgctactgacgtacaacaaaatgacaccaatcaataaagccagccacttactcagcaaaatttgcgcaaatgaatattgccgatacagcaatgttttcaatgtcccatactggatttccgaagagagttgcgtactccccactgcgatcatataaaacacgattaacactggtgcaaaaaaattactgacgaaagtggccttaatatttaataaatttggatacttcatagcaatcagggcaactgctaattgaaagcaaaaaagtaaaataataaaaactacaagtgagggacgtttcatgagtttgtagatctcttgcttaagtaaagttatcactttaaagcacctccgaatcaatgttctggtcttccagaaccgccaacaatgaactttctaaatcaccttgtgtctccgtgattcgattgattttcagttggtggtcccacaagattttgagtaacgcattgattgaagtagccgaatccaacttcacctttagagcaggtgccgtttgctgaacttcatagccgtgctgtttcaaggtacgctgagcaacatgatcgtgatcggtttgaattaacaagaaacgttgattggcggccaatatggcttccgtggtggcgttggcgacgatatgaccctgtttaataataaccacatcatccacgattttctgcagctcacttaagatatgactggaaatcaagaaactgaccccttgcgccttttgttgcaaaattaatttgcgcagtgtcatggttgcttccggatctaagccattcatcggttcatccaaaatcaccaattccggctgattaaggaaggctagcgcaatgcctagcttttgacgcatccccaatgaatattttttggctttgacgtccacaaattgttccagttgaagggctgcgacaatggcatcgacttttgcctttcgatttgtaccgtttgcaaaaagtgtcaactgctcgcgcccggtcagataaggataaagaccgggatattcaatcaacgcgcctacgtttaccaaaggcttatgttcattcatggatattggcgcatcattcaagctgatgtggccagcaaatgacgaaatgcccaagattgctttcataatcgttgttttaccggcaccatttgccccaatcaagcccaaaatatgtccgggttttatttcaaacgaaattttatgtaaaacttggtgtcgtccaaaccatttatctaactgttcgacttttagcatacttaacctcacaaacttttcgacaggagttgaggtaaagttatcacagatcagttaaaaagccgcaacttttgacgaaagaaaaaaattaacgatataatcgagtgagtttcgactttaagaaaaatgaggtgacagtctatgccgatccatactacaggccaattattcaaagaaattcgccttgaacgcggtcttaccttgaccgatgtcgccggtgatctgagcatcagtactgtctcaaaatttgaaaatgggcactccgagatttccgcagagaagttgatgctgttgcttcaaaagcttggcatggatgctacggagtttttcgaaatccttagttcaaaacaaagtagcaaaagttctcccgtaacactttcgcaaagggcttttgataaacatctgatgaagcttgctcttgaacaagacgttgatggtctaacacacttccgcaagcaatttactaactactttcaacaatcaggaatcaggctctacaaattgcgcgaaataatcgtttctgcagttttgattgatacgcgagacactcatactttactgacacaggcagattcaaagtttgttaacgactatttaatggcaagagatgtttggtacgaactagagtacagtctttatggtgactgtgtctcttttctacaaccccaggactttgatcagttgtacactaaatttttaaccattcatttctcgttccgtcaacggcgagattacatcaatctctttttccagtcgttttataatactgctgtcgcgctattctaccgacaagaatataagaaggcaattcaaactcttaatcatcttcaagatcagcagttgccagacaacctcttctttatccgtttgcaattaaggcttcttaagacagtatgccaatacaagctcaccaacagtaccgaaacggccgatgaattatcagagctcgtaaaagtaattttcaaaatcagtcccgcattcgggcgtcgctggaaatcagaatttcaatttcacgaacctgtaagtgaccatacttaatcaatataagccaacaaaaaaggacagttccggtattcccccgctttctagagaaataccgaaactgcccttttattttttcttaatccaattacctttccttgtcgcgaatagccttttgctgatgagccggcttggcaaagatcatgcgtcctgccgctgtttgtaaagcactggtgacaattacttccagcggtttgttcatgtagaatttaccgtcttccaccacgaccatggtgccgtcgtctaagtaagcaacaccttgctgtcgttcggagccggatttaatcacggtcacggtcatgttttcgccggggatgacgtctggtttgagtgcgtttgccaaggcgttgatgttgagaaccgggacattttgaaattgggcgactttgttgagattaaagtcattggtcatgacaatcccatccagtagttttgccagtttaagcagcttgctgtcgacttcggtcatatcgtcaaaatcgccttcgtacatctcaatatgaatgtccttgtctttttgcatggcatttagaatgtctaagccgcggcggccgcgcattcttttcattgagtcagccgagtccgagatcagttgcagttcatgcaagacaaaattcggtactaacatggttccttcgatgaagccggttttggcaatggcttgaacccggccatcgataatcacactggtgtctagcaatttgtatttgcgaaaatgatcgccaactttgcgctcgagcacctgatcattttccgtttccgtattccgccggttgcgaaagctcagaagccggcgccattcttcgctgcgtgtcgtacccacccgaaaacccaagtaaccgaataatagcatgatgatgagtggtaggaagatattcagcggcgcgatgaagccataaaacggaatggaaataatagcggccaggatcaacccgataatcgtcgacaaactgccaaacagtagatagcttggcgatttagtgtttaacgttttttccaataccttcaagcgcttaagaatccagttcacactgagactcgccaagagcaagaagataatggcaccgattaagccgtcaatgagcaagttatttaagaagtgattggcgctccaaccaataagatcccaaagtgatggtaatgcgcccatgccgacgccgatcccaatgagaccaaagatcaaataaataattcgtttcttcatgatatacctcctttctaagtttaattaaaaaccttatgcagcgcttcggcaatgcttgtgacgccaataacctgaatatctttaggtgcacgccagccttgcaggttatttcgcggcacaaaaattcgtttaaaccctaacttagccgcctctttcacccggtcttcaatgcgattcacccgccgcacttcaccggttaagccaatttcaccgacaaaacaatcagtcggcgggatttccttgtcgcggtatgacgaggcaattgccactgccattgccaagtcaatcgccggctcatccagcttaacgccccccgttgctttcaagtaagcgtcctgattttgcaacatcaaattggcacgtttttccagcacggccataatcaggctgacgcggttgtgatccaagccgctgctcgtacgtttggcattgccatacatggtcggactgataagcgcttgaatttcaaccagaatcggacgggtaccctccatcgaaaccaccaccgctgatcctgtcgcgccggccagtcgctcttctaagaaaatttccgagggattggcgacttcctgtaagccattttgatgcatttcaaaaatgccgatttcgttagtagagccgaaccgattcttgaccgaccttaaaatgcgataagtatgatgcatatcgccttcaaaataaagcacggtgtccaccatatgctcaagaatcttgggcccggcaatggcgccttccttcgtcacgtggccaacgataaaaatcgtcacgccttttgacttggcaatgcgcatcaattcggcggtgacttcccgaatctgggcaaccgagccgactgccgaattcatgtccggtacattcatggtttgaaccgagtcaatcaccacataatccggttgcatctggtcaatcacgttttcgatgctgggcatgtcggtttcgggatataaatacatgccagagttggcaacccctaaccgccctgcccgcattttaatctggctggcgctttcttcacctgaaacatacaacaccgtaccgcctgtgctagctagttggccagacacctgcagcagcaaggttgatttgccaatcccgggatcgccgccaatcagaaccaacgagcccggaaccacaccgccaccaagcacgcgattcaactcggccaagcctgttttaacccgggtttctttggtcaccgtgacctcatccatgcgtgtgggcttaaccttgctaccggtgcgcgtttgtcgcggcgccgatttagtggaactaacggtttcttcgacgagcgtattccacccgccgcagtttggacaacggcctaaataagtcgccgaaatataaccgcaattttgacatacatattgtgtttttgctttcgccatactatcccttcaatatctgctagtgatcggttgagccaaaaccgctttgtcgttgcgccaagccgccttggtcaccgtctgccaatagaaatggcataaaaataccctgaccgatgcgatcaccttttttgatcatcacatcccgcgggaagaaattcaggagctgaatatagatttcgccttcatttgccggattgttatagtagtcggcatcaatgaccccaataccgttgggcagcgtcaggccgtgcttaagcggactgctggaacgattggccaaaatcaacacttcattaggctgcatataggctttaatgccagtgggaaccaagtaaggctttaaaatcttcttcgcccgttcaaagtccttattcgtcagcgggtgctcatttttaatcaaccgaaaaagccgaatgaagtcataacgccaaatactccgcaacagaaaatcttcgcgcgcataaaaatcatacccagccgcctgcttagtctggcgggtcggcaaggttaagttgtcatcttgatactttgaaacaatttcaaatccgcgggtcttcatgaaaatagcctccaaaaaaagtgtgagcgtgaaccagcccgcttagaaaccggagtgtaagtggccttgggcgtgatggccgctctttggccattgcgaccaaggtccttacacgcaggtttctgggctggcgaacgcgttatggtgagcgcgagccggcgcgtttagaagtcggagtgtaagtggccacagacgtgatggccgggctttggccattgcggctgtggtccttacacgcagacttctgcgccggggagcgcgttatagaaagtgagcgtgaaccagcccgcttagaaaccggagtgtaagcggcctcgagcgtgatggcccgggtttggccattgcgttcgaggtccttacacgcaggtttctgggctggtgaacgcgttatgacgagcgcaaaccagcttgtgcgccagaaagcacgccaacacgtccaaagtatcataccacgcggagacaatcgaaggccacggtgtaagggcttcccttcttgtaattataccgttttcctgataaatttggcttataaaagtcattcatgaattgggttaacgacggatgggtcatcagacgaactgtgccagttacgcgcctcgattcttaataggatgaccatcattcaatttgccaaggaggctgctatggaatttcaacgtgaaccaggacgaatttttaatacggattgggacggccgactgatggcggaagtcactttccaatcaatcgatgacggtcaggcgtgggcagtggatcacacctttgtcgatgaaagccttcgcggtcaaggcattgccgctcagctcatcgaagccgtagttgcagcagcgcgcaaagaaggcaaaaccatcgagccgctatgttcctatgccgtgcatgcattccataatcatccggaatatgcagacgttttgcgaccagttaaagatcagtaaaaatcctccgcaaaagctgccgaaccttggcagcttttttgatgcctttatagtcttggctccttttttaataaaacgccaacttttacccaaaagctttccagtttcatctttaaatctaaattaaattggggtaaggtttctttaatgcaatttgaaaaggaggacgttatgtcagaaattacatttgatcaaattaaagcctttcaagatcagcttgatcagcatccggcatcgggtgcacttggccgagctgtccaaaatgtcgggccacaagccgcaagccgtgaaaccatggacggcgaagatatgaagccggttttctcaattgatctggacaccggcagcgttgccaaccagaagaaaagcggtcggtgctggctctttgcgacattgaatacagtccgccacgggattgcggatgaatttggcatcaaggatttcgaattctcacaaaactacaatgccttctttgatcgcttggaaaaagccaatttattttatgaaaatattctggcaaccgcggacaaacccctggatgaccgagaagtcgccacttacttaagcggtccagatgaagatggtggccactacgatcaagcggccgccttaattgaaaagtacgggttggtgcctaagtcggtcatgccggaaacttataacagcgacaaaaccgctgaactcaacagtgtgttgaacgagaagttacgtaaagatgccaaggtgttgcggaccctcaagcaagataacgccagcgaagaagccatcgccaagcaaaaacgcgaatttctcagtgttgtttatcgcattttggcttacacctttggcaatccgccgacaacgtttgatttcgagtaccgtgatgacaagaagcaataccatcgcgatactaacttgaccccgcagtcattcttcaaaaagtacgtcaaatggcatttcgacgattacgtggtgattgccggcgatcccgaaccaaccaaaaagtatcagcaattgtataccatcaattcagccaacacagttgttgaaggccatccgctgacaattttaaatctccctccggaacgcttgaagcagctggcattagcgcaactgcaagcaggtgaagctgtctggtttggcaatgatgtactagccgacatggatcggaaatccggcacgcttaaaggcggattgttcaattacagtgatttgtttggtgtcgatttccatgtgaacaaaaccgaccgtatcgtgaccaccgaagcagaaatgtcccacgccatgaccctaaccggcgccgatgtcgttgatggcacggtcaccaaatggaaagtcgaaaattcatggggcaaggaaaatggccacgatggttattttgtggccgatgccagctggtttgaccagtacgtttatgaagtcgtggttcgcaaggatcttttaactgacgcggaacaagcgctccttcaaaccgagccgatcaacttgcctgtatgggattttctaaattaagattaactgatatgctaaactaagtgagtcacaaaacggtgtcggcttatgacgaaatcttcgccgccttttcgaacgaccatgattttcattaccagccgcatggtgactcagctcatgcacataaaaaggagtgtttatttaatgtctgcagaaattacttcaggcgatttggatcagttcaaacaggatcttcaagccacacctggcgccaacgccttacaaaaagcggtcatgaacaatggtattaatgcaaccgccgagaatacggacagcaaagttgccatgacaccaacgttctcaattgaacttgataccggtgctgtgtcaaaccaaaagcaaagcggtcgttgctggatgttcgccgccttgaatactatgcgtcatggcattcaggcacagtttaagatcaaggattttgaactgtcccaaaactacaccttcttctgggacaagtttgaaaagtccaactatttttatgaaaatgtcttaaaaaccgccgatcaaccactcgacagccgtaaagttgcctttcttttggctaccccgcaacaagatggcggccaatgggatatgctgtcagccttaatcgaaaagtatggtattgtgccgaagtcagtaatgcctgaaacctacagttctagcaagagtaacgaattaaacggcttgctcaacttgaaactgcgtaaagacgccgtcaccctacgtaagttagttgctgacaaagctagcgatgccgacattgaagcagccaagcaaaaaatgctggctgaagactatcgcatcttggcatacacgttaggcaacccgccaaccaaatttgactttgaataccgcgatgatgataagaattatcacattgatcgcgaattgacgccgcaaaccttcttcaagaagtatgtcggctggaatctcgatgactatcaaagtatcatcaacgccccaaccgctgacaagccttacaagcacctttacaccgttgaaatgctgggcaatgtcgtaggtggtcgtgaagttcgccacttgaatcttgacattgataccttcaaagacttggcaatcaagcaactcaaggccggcgaatcagtttggttcggttccgatgttggtcaaagctccgatcgtcaacttggcattttggacaccaacatttacaagaaagatgacctgttcaacaccgacttcaccatgactaaagctgaacgccttgactatggcgaaagcttgatgactcacgcaatggtcttgaccggcgttgatcttgtagacggcaagccaaccaagtggaaagttgaaaactcttggggtgaaaaagtcggcgaaaaaggctactttgtcgcaagtgatgcgtggtttgaccaattcgtctaccaagttgttatttccaagaagtatctcccagctgaactacaggatgtcatcaagaacgaatacgacaagccaaccgttcttgcaccttgggatccaatgggtgctttggcatcaagataagcttgatctgaaaacactaagataactggaaaagtctcgtaattttgatctaaagttacgaggctttttgtataccgccgtaagcgattcaaaccaatgcggctgactgagtgacttaacgctcataacgcgttttccagcgcagaagtctttgagtctgataaaattgtggtattctggttgcaactggattaaatcaaatgaggagatcgggccatggggacacaattagcttttgattggcgccaaatcattcattcacgcaaaaacattgccttattggggttgttctttgcggcattcatcatcgcattcttcgcactagtctggacgcaccgccttgatattcaacagacttccgaggccactgccaatgccgccgtggctaactatgcagaatataacttggacacactgagcaagacgcaaaaaccgctattggcgaatctagatgaccaaaattcggcgactggtgttattgacttgggcatccagcttgatcaacccgatacgacccgtaacgggctgcttagtttgcgcactgctcaacttgaaatgcggcaacggcattataaagcacttaacaccatgccgctgccgccgctgcaccaacttaaaggtgacgttctagcgcttactacgttaaaaaagcagcaaaaacctgccgtcacagcggtttccactagcgtggcgtatctcgtcaccatcctgccttatctcagctggttaaccggcgcggctgccgtgctgctagcctgtgatagctgggttgaacgacgacgccaccaaacgctgattagcgcgcgtcctttatctgtcggcgttgcgggtagcagtcgcttgctcactttaattggtttttacatattgatccttgttgcgggtggcgcggctgcagtcggcttacctgcgctattaaaaggctttggtgacttcgactaccccatggccatcatgggacaaacattactgccattgtgggaatatttactcattttcatggctctcacattactggccggcatttggatcattagctttagtatgctgattaacacgtggataaccaatgcttacctcacgacctttattgtgaccgccactgctttattgccgcttatactgccgcagcttttccggtttgtgtggtttctgccattctcctatctcgacgttgccgcaatgatgcgtggaacattaattgatcgactgaatcagcccttagccagtatttggatcggtacaggcgctttattcatctggtcggtgcttaatctgggactctttggttatcgggccagaaaggaggcagcatgatgcgatatttccgatttcaactccatcaactgcttaccaatcgtaaaaacttggctgtcattggcatcgcactcgttgccttgatttgccagttcgtcttttttccgccaaatcaggtgccacctgaacttccgacaagtacggtgttgacacgtgatcgcgataaaaatgtggcatttatcaatgagccacatggaccgcatacagcgatgtgggtccctgtcacccgtcaactcgtcaaaattgaaaaccgcatgttaacggcgcaaaagcagcagcattcgcaggcctatgtgcaggcaactttggattatctggcttttgtacgaaaaaatgccgccaatcctgaggctcaaagtagcccattccactatccgctaacatattattttgaaaatcggcaataccctgatgccgatgctgcttttgccaatatcaccctgacgcgctcgctgatgactttagccgatcagcgcgatcccgacatgactgcggttcatcagcaaactttctggcagacgcttttccgtggcgcgttaggcgggtggctcactgcgctactgctgatcacgatcttatttgctaatgatttgctgacgagcgaacaacgccatcgcagcatcgttcggtcatcgcctctaagtccctggcatgccatcaacaccaaaaccttgaccgtgctaacagccttagccggtgtacttctgctatcagcgcttgttgttgccggcttcgtcatccctactcacggactaggatcgctaacaactgcgatcgcctactttgccaaagatgggatgacagttaccgttgatccgatcgcgctcagcattgctctccccatcatcctcggcttgacaatcctactgatgtggctctttattcggttaaatctactgtgtcagttacttttccacaacgaactggttggactggtactcagtgcactcttgctattcggcgaaccactctacttcatgcatggcctggctttttcggttccgcaaaccgcgtactacctgcccgggtacatgaatccggcggcgattgtcagcaggttgcaaaactttcgctatgataccagccgcatgagtccgctcgctgctttgattgtggtcggcagtgtgattatcgtgcttgaagtgatcctattcatcatcacgcatcgacgccgggcagcaatcgttaaataaaggaggccccatgatggaattacaattacaaaatctcgttttgggtttcaaaaataaacccaatgtcattcatgatatcagcctaacgatgacgagcggctcaattgtcggcattgtggcgcccaatggtactggtaaaacaaccttgctgcgattgattcttaatgatctcaaaccacaatccggcaaagtggtattagatggacaaacatacggcagccaaaagcataccctcgccatgcatcggcaaatgtgccttttcccggttcaagatgatctttatcctgacttatcgggcaaggcgcacctggcatattacgcccgactttggcataaccaaacgaaaagtgttaagcaaattatcagcgcactcgacatgcaggattatgtcaatcagccggtgcgaacttattcaatgggcatgaagcagcgtctttgctttggcatggtgatggcggccaacaccccgattatgctattagatgaattcatgaacggtttggacacgatcaacgttgcgcgcatgtcgcagattctgcgcggattgcgggcagaaggcaaattgattattacagtgtcgcatctattgaataatctgcaaggatatgctgatttcatctacttcatgcgcgatggcaaaatcatcaaaacgattgatcagcatgaacaacaacctttgtatattcaagtggcagccgaagaagccaaccggttaccgcgcatgccttggcagcactatcccaatggcatgttggtattgccaattaacaacctccccggcgaacattttaaccagttgctgctaggactggctgcgcatcacattgtgtttaaattagcaccactggatcttgaaacttacttcaatgaattttatgatgccgattaatcaccaaggccactcaaagtcgcttgaacagcagctttttatgaaagtttttctggatgcaagatattgggcaaaataaattaagagccttcccttacaatgacactcggttctgctacaatgacgttattacttttcaggaggcacaaatatggcgtcaggcttgactgctaataaaaaactgcggcataagattaccgcggcggctttactcgtaacccttggtgttgtctatggcgatatcgggacatcaccactttacgttatgaagtcaattatcgctggaaatggcgggatgggacatttcgataccgattttctagtcgggtcggtttcgctgatcttctggacgttgctgattatcacgaccctcaaatatgttctcattgcgttgcgagcggataacaacggtgaaggtggtatctttgcactttacaccttggttcggcagcgggcgcggtggcttgtactgccagcgatgattggcggtgcggcgttattagctgacgggatgttgacgccagccgtgacggtcacaaccgcaattgaaggtttaaaaggggtccatattaacggcaacattttgatcgacaatcaacaacaggttatttgggtcacgattttgatcattaccttcctgttcttcatccagcgttttgggactgacctcattggcaaggcgtttgggccgatcatgtttgtgtggtttaccttcttaggcgttgccggctttattgctttatcaaaagactggtccatgttgcgtgctttgaacccttactatgcattgcgtttgctggtcagtccggataacaaaatgggtctctttattctagggagtattttcctggcaacgactggggcggaagcgttgtattcggatatgggccatgtgggacgtggcaatatttacgtcagctggccatacgttaacctatgcttagtgttgaattattttggtcaggcagtctggcttgatcgccatgctaatgtgagtgcttataatcagattagcgatttcaacccattcttccaaatgttaccggaaagcattcgcctaggcgcaattattctagcgacattggctgcgattattgcctcgcaggcgttgatctccggttcttacacgctggtttctgaagcaattaaactgcgctttttgccgcggctgcacattgtctatccgacacggcttaaaggacagctctacatccccatggtgaacacgattttgtggctcgcctgcttggctattattgcttacttcaaaaccagtgccgaaatggaaggcgcttacggtctagccattaccatcacgatgttaatgacgaccttgttgctttatcaatatctgcgcgctcgccacgccccaaccttgatcgccttgggtaccttgatcttctttagcgcgatcgaaaccgtcttcttcatttccagcgccgtcaagtttctccatggcggctatgtcacggccatgatcgcgtttgtcattctggccattatgtacgtttggcaatacggcggccggattcgcgatgataacacctaccgcgctgaaatggcctcactgtttgcgtataaaaagcagctatccgaacttcgcagtgatccggaatatccaacctacaccaccaacttggtttatatgacgcagattgccgatgatcactacattaaaaaagaaatcctgtactccattttggataaacgaccaaagcgcgcccgtgtctactggtttgtcaccgttaacgtcacggatgaaccatacacggcacaatatacaactgatacgtatggcactgattatatggtcaacgtgcagctgtatctaggctttcggatggagcagcaggtcaatgttttcctccgccagattgtgaatgacatgatgcgcgaaggtgaattgccaacccaaccgcaaaaatacaccaccattccggatcgacaggttggtgattggacgtttgtcttgctgcatgaagaattgtcaccgcaaactcagatcaaaggttttcagaagacgattatccaggcgcggctatggcttcagcgcgtgacagttacacctgctcaatggttcggtttggaatatgctgacaccttggacgaaaccgtcccgcttgtacttggtaagattccgatcaccaagttaacccgcctaagtcgttcgcaagttgatgcccaagccgaggatgaagacgactagctattttagtcagatcacaacacattcactagcttaggcggtggcgcacacataatgcgctccccggcgccggctcgcgctcacagaaaaaagtgtcccaaaagtcatgcatgtcttcatcgactgctgactttttgggacactttttaagtacaggtattgttgaaaatacagcctcacactgcttgacggctcacaccaaatctgtccgtctgcaatctaggcaccggctttaacttttttcatggcgcgcaaggctgcttgagccgctgcgagtcgggcaaccggcacccggtaaggcgagcaggagacgtagctgatgccaatttgatcaaagaacgccactgaatccggatcgccgccaacttcgccgcagactccgatcggcagttgcggatttgtttgacgaccgtttgtaatcgccatggccatcaatgcgcctacgccttctgtatcaactgtttggaaaggatcattcggaagaattttctgctccagatatgcgggtaagaaggatcccacatcgtcacgcgaatagccaaaagttaactgggtaagatcgttcgtcccgaaactgaagaagtcggcggcgtgagcaattttgtccgcggagacgcaagcgcgcggggtttcgatcatggtaccaacttcatagctcacctgcatcccttttgcggcggccagctgttcaatttgccgaacaaccaattgccgcacccaacgcaactcggtttccgaattggtcaaaggaatcatgatgtgcggtgtcacctgcatcccttcgtcggctaaccggaataccgcatgcatcagcgcccgcacttgcatggcgtaaatatccggataggtcacggctaggcgatccccgcgatggcctagcatcggattgacttctttcaaggctgccatccgttcgcgtaactgattttgctccaaccccagctcatgcgcgacttgcccgatttcacgctggtcatgtggcaaaaattcatgcagcggtggatcaagcagacgaatcgtgacggttttaccagctgccaagcgatatagctcgtaaaagtcctgctcctgcattttctctaatgcggccaagggtgccttgcgtccggctgcatcttttgcgagaatcaaccgacgcatttgtaacaatcgttctggttggaaaaacatgtgctcggtgcgcgtcaagccgatgccatcagcgccaaaagccaaggcctgctgcagatccttaggtgtgtcggcattcgtaaacacgcccatgcggctggcttcctttgcccatgctaacagtgtcgccagactatccttgaccaaggcagcagtggtcgggatttggccgcgatacaaattgccggttgtcccatcaacggatacccaatcgccttcatgcagcaccgtatcgccaacagtcgcggttttggcatgttcatcaacggttaaggcatgcatccccacgacaccggttgcccccatgccgcgcgcgaccacagctgcatgtgacgtcatcccgccgcgcgcagtcacaatggcctgactgacaatcatcccttcaatgtcttccggcgaagtgtcttgacgcatcaaaatcacttgatggcccgcttcatgagccgctttggcttctgccgccgtaaaataaacctccccagttgccgcccctggtgatgccggtaaaccggtagccaaaatcgtatgtgcctgcaacgcctgcggatcaaactccggatgcaacatgtcactcaatgattgcggttcaatacgcaacaacgcggtctggcgatcaatcaagccttcgttaaccaaatctatcgcaattttaacagcggccgccggtgtccgtttaccattacgcgcttgtaggagataaagttggccatgttcaatcgtgaattcaagatcctgcatgtcgcgataatgctgctccaacgtggtcgcgatcgctgccagctgattataaacttcaggcatttgatcgtgtaaaaccgcgactgactgaggcgtccgcactcctgacaccacatcttcaccttgggcattcaaaagatattcgccaaacagcgcgcgttccccagtcgccggatcacgggtgaaggccacgccggttccggaatcagcgccagcattaccaaaaaccatcgtctgaacgttcaccgcggttcccaagtcttcgggaatgcgattttcgcgtcgataaacgactgcccgccgattattccatgattcaaatactgccgtcactgccgccagcatttgcgctttgggcgattgtggaaatgacttgcctgcttcaatataaagctgcttaaatgccagaatgatttgctgcaggtcagcggttgtcaacgccaagtcagagtcatacccattttggcgtttcacggtggttaaaatgtcatcgaatcctttttccgacaagccgtaaaccacgttaccaaacatcgccagtaagcggcgataactgtcatacgcaaaccggggatcggcagtttcccgggcgagtgcctgaccggtttgatcatttaagccgatgttcaaaatggtatccatcatgcctggcattgaaatcggtgcaccggaacgaaccgacaccagtaatggcgcaaccggatcatcgaatcgtttcccggtcgctttttctaacgcctgtatgtgttgatccagctcggttaacaacgcttctgaaagcccgtgatgctgttgataatcgtggcacgcagcagttgtgagcgtaaaacccggaggcaccggcaggccaagattggtcatttcggccagattggcacctttgccacccaataatgcccgcatctccatattaccttccgcaaacgcatagatttgtttcatgataaagccttcccttcgctaaatatgacgttatatatgttcgctatataatgtattatttagcccgcgaaaatgcaagcgtttacacttagaaattggtctaattcggaaaaagttcaatttcataacgctatataatacacaaaaatctttttgcaagtgcggcgatgcgcggttaatataacaacccatgtcacaacaagaaacttgcctataaggaatgtaaaaagtgtcctatttctcgccaaaatcgagaaataggacacctttaatttgaagctgcaaatgaaagcccagcctcatggtgcaagtgtttcaattaagtatttaaagatccggtttttagtgatcttgccaatcacatgagtgtccccatgtttttggatcacagggagtgaatcgacattgtgtttcaacaacaacttgctggccgccataatggtcgtatccgccgtcaccgtcacgacattgggcatccgcgtcatgacaatgctggccggtaaagtggtgtcacgatctgtaaagctggcgcgcaataagtcctttcgcgagatgaggccgaccaaggcgccatcatcatctaacacgtataaggagccgacatccgccaagaacagcttggttaccgcttcttccatcgaggttgtcagcttaatttcagtcggcggcaataatattttggcaatcggggtattaaacagcgcatcgttatcgactgataaaacactcgctccttggtaggcatatccaactttaggccgggcatctaaaattccaaccgttgtcagcaagcgtaagtcagcgcgaatcgtggccaaactaatctttaattgcgtcgccagcatttccccagtcatcggactttttgcttttagtaactgaacaattttttgttgacgtttagtaagttgcgtaagcgctcctcctcatgattgctaatcaacagtataacattttcagggaaatatgacgtgatatttaatcgttaatcacaacttaatcccaaatcttggtaaaataaatccggcatgtagctaaactaccttgccggaaagtcttcacagtgtttgtttattgagaatggttaaatgctgatcaagcgtgtagacgataggttgggcattgccaatttcaactttgttaataccagcatcgctaatagcttccatgtacttgactaatgcccgtaacgttgagccgtgcgccacgataagctgattcttgccggccatcaaccgcggcgccagttcggcactccaatacggcaacaggcgctcactcgcatcggcaagactttcaccgcgcggaataatcgtcgccgggtacgcgtgatagcgccgtgaacgactgggatgtgccaacaacggcggatgcgcataaaagcttcgccgccagctggcaacttgatccgggccaaaaagtttccgggtcagatctttgttaattccgcgtaaggcgccataatgccgttcgttcagacgccaacttttagtgatcggcaggtaattctggccgattgcgtcctgaacgatgtaggcagtcataatggcccgcgataacacgctggtatgcacatgctcaaataagatcccggtcgccgcaatctttttgccggcagctgctgcttgagctttcccttgcgccgttaatccgacatcggaccagccagtataagtattttgttgattagcaatgctttcgccatgtcttaaaaggactaatttgaccacatcacggcctccttaacccaactagtataacaatctcaacgggtttagggtagtctgctcggcaggtcttttttgctgccaaggcgtgaaaatgataggctactattattgaactaagcaaggcacactgccttagcttatagaaagaaggatgctcatggccaagtcgcatcaatctgtcaccatggtcgagcttttctatgatttgatttttgcctatgccgttgggcgaatggcgcagactctggcagtgccggtgcatgggatgatcgcgccacaagtactggttgaatttctattgatgctgctggttttctggaccatctggacttttcagacagtcttaatcgatcgtttttcacatcatgaagtgacccacaacctgtttacgttgttcaacatgttttgggtgattgtcttaagcaccgcgattaaccctgattttgctaaaactaagtggccatttcaattaagtgctgcgattctcttcttgagtcttgcgagccaatacggtctgctttggcggcgaaaacactcgcaactcgccaaaacatttggcatcacgctggcagcttgcagttttgtgattttaatttcgctatttataaagccatacaccctttcatttgcggtcttctttggcggtgttttagccgctggattgatgccattgctattgcggaacgtactcaaagccacgccagccgacttaggcaatctcagcacccgttattctctattggttttactgatatttggcgaatcgatcattggtgtggcggaaaccatttatgctggtctatctttgcaagcaggtcttttcttcttggtagtcatcttattgtttattgcctaccaacttgtttatgacaacggtctcgatcgccggcaaaaaaccgcgggcttggctgttatctatttacaacttccattactggcggccattctcagtctcagtacgttcattcactcgtggctggccgggctgcttgatcctcaatggtttgcgcttgccatcacggtgacgttggcagtttattattttagcttaatcggatatcttagcgcctaccctgtcaagcacattgacatcggcttcaagcgctggttttaccttggtttttccgtgttgatttttggtatttttagcttcatgacaaccattatgccattacccttcatgttcggactcaccgcttatctattagccaatacgctttatctttggcaatttattctccatcccaatgacgcgatgtataataaacttggttaaatgaaaggggagctccacatgacaacttatgatgtcacattcaacactgtcgatggcaagtcactcatcaagcgcaacgtccaaagcgatcacgaaaatgctcgggtttgggaggacgcggttgaacgttttgatgccgaccacctttacatcaaaatgaatgacaaaacaatggtcagcctgttgcggcgtgccgttgttcgcattgatatgaccgaactgccaagcgatgttgaaaaacgggcaaatcgccgcgacgagttccgcaatgccatgtacacgctgagccagattggcctgtagcaatcctgttacgggtatcaaaatggatcagcacatttaggacatcagcctctaacccacgtcatcaaaatcctatcgattcatacatatcgtagtttcttgatgtcaatacggtcatgctgatgtacagaatctatgtatcaaaaaagaatcccttcagccttaaaaactgacagggattcttttttcggtcgaatcatgtgtctgtacaacaaacaccgagtttaattcatcaatgctgcaacttagtcagcgtagttaaagtgggttaacggtgcatgcttaacatcttcaatcgtcttggtgccggccagctgcatgataatttccaactcgtgatcaatctgttcgaacacgctttgaacaccttgtgcaccacctaaagcaagccatagataaccgggcggccaaacgcaaccaaatctgcaccggctgccaatgctttgaagacatgactgccacgacgaatgccggagtcaaagatgatcggaacctgcttgttaacggccttggcaatggcaggcaaaacatcaaatgatgctgggccaccgtttaactgacggccaccatggttagaaacatagattgccgcagcaccggcgccaattgcccgcaatgcgtcttcaggagactgaatacctttaacaataaccggcaagtcggtatattcagcaatccggcgaacgtcatcttcattaatcttttgagcagcagaagcataaatttcgccgatgcctttacccttgccatcgccttcagaatacttttccaggttcggcattggaatcgggaattggaagttgttgataatatcttcttctcgataaccatcaacagtggcatcaacggtcagaataatccccttgacgccagcctttttagcttcgtcaagcaagctcttattgaagtcccaatccttgctcatgtacagctggaacaattgcggtgctccgttgccggccgcagcagtatccgcgattgaggttgagctatacgtgctctgcgccatcaaaccaccgactgctgccaagccgcgagcggtatccttttcaccttggctgtgggccaatccctgagccgcagttggcgccatcataaccggcgtcttcagatcaatgcccaaaaagttggtcgacaagtctggagaatcaatgttcgacaaggcctcgggaacaatctgtgcgtggttaaatgccttggtattctcggcaagcgtccattcatcttcggatccgccaacgatatagccaaatccacctgttggaataatcttcttggcttcaccttctaatgacggcaagttcaaaatatccaatttcttctctgcatcgctttgttcgtaaccattaacaactgtcatgtgtcaaaagcctcctgaattgcttacttattagaacacttataagtgtagcacttataaatagtaagtaaaggcattttgctaattttttgtaagcaaaaaggagaacctgcaaaacgaggccctcctttgttagccaaacaccgaatcaccattggcggtttagcgttctttcttctccttggacttgtcaaccacgtcattgaacttctccgcgattttgtccttggcatcactgagcttttccttagcattgccgaccatctgttcagccttgccttttgcttcggttgattcatcgccggtaagtttgcctgcgccttcttttaccttgccgctgaccttatccttagttgcatcaaaatctgccatacgatcatgcctccttatttttgcttaacttaaggataccaagttgacggttcgtatcaccagcaataagctcatataaatacaattaattttatgatttatgatctctaatcaggtgatcacacaactataatttgctaagaaagcttgcgccaatattttgctttgattttaaattaaagttttcaagaacagttgctccaaggtcactgaaggtctctcttatcccaagatctccattagtaaggtttggagaataagcaatcagcggcacatactcacgcgtgtggtcgtgcccacaaaatgttgggtcatttccatgatcagccgttataagtaatagatcagattcagatatttttgctatcacgctttgaagtaaatgatctacccgttctaattctttaccataacctcttggatcacgccgatgcccatactgtgaatcaaaatcaacgaggttagcaaaaataaacctatacttcttgtcttcgagaatattaataacttggtatagcccatcctgattacttgttgtgtgaattttacgatcaatgcctcgacccgagaaaatatcgttaaccttaccaataccacaaacagaaatattattcgtgcttagtatgtctaacaccgtttcgtggcctggtactatagtataatcgcgacgatttgctgtacgacgaaaactcccggagtccattcttataaatggtcgtgcaataactctaccgatttgccacccgctatcatccagagtaaatcgaataaatcgacaaatgcgatatagctcttcaactgggaccacggtttcacatgcggccacttgcagaactgaatcacctgatgtgtaaacgatcagagcgccctctgcgatttgttcttcaccgtaatcttcaattgcccgagttccagaataaacctgatttaaaatgacccgtcgatttgagaattgttctatttgttcaactaaccgttgtggaaagccgttcgggaaagtgtctaaagcagaatcaacaggaacacccatcatttcccaatgtccgtctaaactgtctttcccagcagaaacttctctcatctttccaactgcgctagatgtaccgctctttgctttaattccctttagcggtgttgctcgcagaatccgacctattcccaaatcttccagttgaggtattgctagttttccattccaataagaacaaagatgcccgagcgtgtctgccccttggtcgttgaagcttttagcatccggagcttcaccaatgccaactgagtccaatacaattgtaatgattcgctcaaatcttttcattcaacaacacgcccttgactatcagagtttctccgttttactgggttggggattagattaactatgactaatgatattaagtaaaaggatcctaaaaccaacaacgccactgaaaagcccttctcatcgataatatagccaattaaaattggcgacagtccaccaatcgcacgaccggtattaaatattgcattatttgctaagctccgtatttctgttgggtaaaagctgctgatgagcgcaccgtagcctgcattcataccgttagcaaaaaagccaacaatcgcgccgataattaacatcagaaaagcactgtgtacgaacgcatagagagttaccgacatgccagacatgattaaaaagacagaataggtcaatcgagagccaaatttatcaaacaatttaccaaacgacaacatccctagtgacataccgataatagtcgaaatcatccacaaagacgacccggagacagacagaccttgctgcttttcaagtaacgatggtaaccagttcatcagtccatagtagcctgcaacctgaattgctgacataattgttaatcctacagtaatcaatgcgatcttgggttgattgaatagcagactaattcgaggatggtcggatttttctgcacctgatttatgtgctagctgccaacttttagtttcgggaagatgtcggcgcacaaagtaagccaaaaaaactggaataaccccaaaaataaacgctgcacgccagccagctaaagggatcactgttgccgcaatcaatgcagcaatcagcgttcccatttgaccaccgactgtaatccaagaagacatctgccctcttcgttcttttggaaatgcctctgcaaccaaagccatcccaataccatactcaccaccagcacctaaaccgaccacaaacctcaatatatatatttcccctatgctgcgtgcaaacgccatcaacagcgttgcaatagcaaaaataaaaatagtataggtgaaaattttaatcctgcctttcttgtccgcccagtacccaaaaatcacaccgccaaccaacattccaatgttcgtgactgacggtaaaactccgcccgcagcagatgaaatatgaaattcattgataattgagcttaatgcaaatgacagcagcaagatatccataccttcaagtcctaatcccagcatagaagatactaatatctttttccgatatgactcggcttcttgcatcttatcattcctccctacagcttatctttaccctaaaactgattctagaactgactcggcagatctttgatgaatacgattatagtcttcgggcttttcccacttatatgttgcacgactaaggtggacaaccaaacagtttgccacgggaatattgtaaagagagcccagcaaaaacaaaaccgcagactccatttcagcattgataatgccacggtcttgccagaacttcatttttgccccatcaactttgagagctgtctccgagatgtccggttgccggtattggccaaaaaaatacgtctcagttgttaaccctataccggtataaaccctaaacccattttttaccgctcctgtataaatcttgtttactaaaagcggatcagctacggccggataactatcgggaacataatcgcccattaatcctgatgttcgcgccattgcacgattaataatgatatcaccggggttaatatcatctcgccatgctccacagccaccacatcgaataatttgtttcgcaccgttctcgataagttctacaacacaaatctcagtcgatccaactcccatccccgtcgaacagacagaaacatgatggccccgaaacataccaactaccaggacgaattctcgactatcttctatttttcgtttagactcccaatctttagaaatcaacgcaaccctatcaggatcaccaacaattaaagttacttcaccaagatcccctttttggatatgtgctaaatgctcactactcataagaatcacccttctttaccttcaatgtcaaaactgttaataatgagataatataaagaaccgataagaagctcatggttataaccaaagacgagtgatccaataaaaagcctatgatcactgatgaaaatccgcctattgcccgacccacattgaagatcagattgtttgctgaggcacgaattcttgtttcataaagattggcgacgatagcaccgtaccccgcattcattccgttagcaaaaaatcccactattgctccaccaaccaataatgtaatctgtgtgtccgcaaaactatacatgaaaaccgaaatggccgaggcaatcaagaaaaaagaataggcaactttactgccaattctatccataatttgtccaaagacaagcatgccaagcgacatacccaaaattgtagcaatcatccatatagacgatccagaaacagacaaacccgatttttgttgtaagatcgacggaagccaattcatcagaccaaaatatcccgctatttgtacagtcgccataatgatcaatttaattgtattactggctcgaccgtctcgaaataaatctagcagggttatcttcgaatttctttgatttattagctcattttttgactctaaccactgtttcgattcaggcatcttgaagtaaacatagaatcccaaaagaatcggtagagcaccaaaaacaaaaagacctcgccatcccaaaatcggaataataattgcggcagctaatgccgcaataatactgccaatttggcctaatattgttacataagaagtaattcgaccacgttgatcgtttctgaaaacatcagcaaccattgacataatggcgccataaacaccacctccgcccacgcccactagaaatctaaatagatataccatttgaatattttttgctattgccatcagccctgttgcactcgcgtaaataatagtggttaccgcaaaaatcttcatacgaccatttcgatctgccataggtccaaatatcagcccacctgccaacatcccaatattggttattgttgagataaaaccaccagcagccccattgacatgaaagcttgtcatcatacttgctaggacaaatgacaaaagcattgtgcttgctgattgagaaaacaatccgctaccactgacaaatagagccttgcgctgttcgcggctaaaacttctcgcgctttgttccatcagaagaacctcctccaaactatttaatagttgaagcctatcacatatgtaaacgtttgcttttgtggtatactacaaaaacgatttttttaatttgtccttcatcacaaaaaagggggtcctcaatcatgatttatctcgaatcagttttaaaaacgcaatctcgccgactcaagcctgttaattcagcaaatctttccggtcacgttgttagcgcaattacgattatggataacacaaatgttcggcagtggctacggggtggcgaaattgtgctttcaggatcgcacactttgccaaccgagcagaatcagttacaggaactcttatctcaactaaaaatcagccaggcttgctgcttgattattaaatgtgttacttccccaatttcatcacaaaaattttcaaatattcttttagaagaggatgttcttccaatttttaaaatgtcatcaaacatcacatatttagaattgatgaatgacgttaatatgatgctttttaaagaccgtcaagttaatcgtttggctgaactagaccttgaacatctcctaagaacagacaaaccacgcgatagtgattttgactacatttcaagcgtaaaaagtattgatttatataagcaaaatgcttgtgttattcaaatcactctcacatctcagacaaatcttaatcatcgaattcatgatttatttacactaagtcggcaactccacgccatctttagcagttttattactaatcgaatactttcgagctattttgttcttgagaattcagacggtgcgactatgatattatttacaggctcaaaacttgaatcggacgtttctttgttgcatcacttacaactgtcatctcaagtaaagatctcaaatcaggcgctgtatattggaatctcaacccttcacccagctagagaacttcacaaatgctatcaggaggctgtatttagtatcaaaatggctcaaattttcaactacaaaaataccgttacaaaatttaatgatgtagctgtttggtcacttattgaaggtatacaagaatcagcttctttagaactaacaacacaacgattgaaagaagttttaaaaaaccaagatctattcaaaacattgaagctgttttttcagaataatgagtcaatcaaaaaaacaagccagcaaatgttcacgcatccaaatactattagatatcgtttaaaggagattaaatcgcaaacggggcttgattatcaaaaaactgatgataaattcaggttatatattgcggttatcactcaaacattagcgcatgcgaacaattaactaaaagagtcaatacatcgtcaaagatacttatgtactcttgtccatcatgtcgctaatcaacattttcaaccacccaatatcatgtcatctcatttgcggatgccaatatggatactgcagttcatacaaaaggacccctaaacaccgaaatgttcggcattcaagggtccttcttttaatgactaatgatgcgcctttagtgccgtgcaccgggacgtttttcctcaggcgctggcggaataaccgctttgccgccttttttaatatgcttgtagttcacaactgtcttattcttcatatcttcaaccattgacgcatcttcgggtgaaaaactgtcaatcgtcaacatggctgcattggcataaagcttttcgaccgtgcctttgaagctcaatggcacatctttggtctttcgtaccgagaccttatcgcctacaacgatttcttgtgacacacaaaaacctccttcaacgcatcttccgccacattcccgtcaccatcgtaacacgagccgtcatcatcggaaaatgaaggcgcgttatgacaattattgaaacggaatcgtgacgcactgcatttcgactgggatagacgcactatctttgcgctgttgccaacgccattttcatcaatagttaagagcttacttggcgacctggactttaaccttaatcggtgcattcaggtcaaccgaatcactgtaatgttgcaacaaataccgctgcatcgcatcacgcgcttctttcttggtcatctggtgacagacccgcgaagaatcgtgccggtgtccccacttatccgtatattgaccaacgacttcataatcacgaagatgtgctgcaaataacatgattcctcttaaccacctttactaattgtaccatgacttggcacttgtttttgtatcacaagaagcatttatacacccttattggtcccgtttcaaccacacgagcaaaaaaaggtatcagaacttcccagactaacgttcattcccggcatatcaacgctaaagctttctcaccgtttcaacacttaccattgatatgttagccaacatctctttgcattggctgatcaaagtcagactcaagccggtcacggttactctgcttcatccgcttaaacgcaatcaccgtccggcccaccaagtcctgaacattaaacttatctcgggggtcataatccaaaatcgtcaccaaagctgaattctcataacatttctcgatccggccaataaaatcatattccatattgccattagcctggcacaaaacagtcattcctgattttgcatgtttcatcaccaaaacctccttgtatagtgagcgtgagcagggccgcttagaaaccggagtgtaagtggcctcaggcgtgatggcccgggtttggccattgcgactgaggtccttacacgcaggtttctggccctgcgaacgcgttatggagcgtgagcagggctgcttagaaaccggagtgtaagtggtcttaagcgtaatggcccgagtttgaccattgcaccaaggtccttacacacaggtttctcgccctgtgaacgcgtctcggaaagcgcaacccagcacaaccaatattccacctgctcctgctgggttgatattagattatcaaggtgaatattttatcgtcaacataaacgatcaattatacaaattttctaatattttgttcataatgcccactcctgcaagctcgttcgttccctgtctccagactaaaaattgcgccaacccaaacgccatttatactttctatgattttaagaattcctagtcattaatatttctattgacatcattctaagaaagactaacgcttaagaagcatttaagtctcaaggcaaggtgatgatcaaatgaaccgacacgttttcgcagcaaccttttcttcgctgcgttcaaagaactttcgtcgattttggacgggccaatgtatttccgttatgggaacctggattcagcgaacaacgcaaacctggcttgtctatcaaatgacaaaatccgcttttctagttggtttgctagcggcggcacagtttgttccgatcatggcgctgactttggtcgccggaacattgattgatcgctaccccaagcgacaaattcttttgtttacccaattcggctttttactgttgggtgctacgatgacgttgatcacctatttgaagatcgtccagtattggcagattctcgcgattgccttgggctatggcatccttcagagtttcgatacgccaacgcggcaatcatatgttattgaacttgtaggcaaaaaagatttaattaatggcatttcgctaaactcatccattttcaatttggctaaaattgccggtccgtcactggcaggtatcttaatggtgacgctgggcgtggcaccgtgttttctgattgatacgcttagttatgtggcgattattgccggtttgttaatgattcaccaagatcatcctattgccagtcatcgttcacgccacatcttattagatattcgggaagggttaagttatatcttgcatcatgcagacgtgaaactcagtgctgaattgatgctggtcatctgtacattaaacttcaacaataacgtcatcatcccgatctatgccgaggaggttttgcaccgcggcgctcaaggttatgctagccttttgtctgctactggtgtcggctcactggtagcagcttttctcatgagttatcttgccagcttcggcctgcgccgggatctttatttggccgtagcagttggcacggccttgattcagtcgtccatgctgttcattcatgtctactggcttgccatgctgctcatggttctcatcggcttttgtaacatggttttcctgaaccagtccaacgcctcgtttcaatttggcattcccaatcaactgcgcgggcggattatgagtgtttacgttttgctcaatcaaggatcaaccccgattggcagtctatacgccggcagtgtcatggatgctgctggcggtttatggggatttcctgcatgtggcgtgttagccctcatgttaacgatggtcatcttcggttttcaccagtctacgataaaaaagtgggtatcgcggtaacaccaaaaaacgcaggcaagcacgttgaaaagacactgtgcttgcctgcgttttcgctaatttttgaactaaccttcgcgtacctgtccgttacccagcacctgatacttaatcgtcgtcaacgccgctaaccccattggtccgcgtgcgtgtaatttttgcgtactaataccgatctccgcgccgaaaccaaactcgaagccgtctgtaaaccgagttgaggcattcacatagacaacagccgcatctacctgttggaggaattgctgactattttggtagttatctgtaatgatggcctcgctgtgcttcgtgttgtgtgcgttgatatgcgcaatcgcttcttcctcggaatccaccaccttgaccgccataattaagtcgttatattcggtatcccagtcttcttccgtggcgacctgcatgttcggcacaattgcccgcgcccgttcatcaccgcgcaattcgacaccatgcgcttgcagtgccgcagcaattaaaggcagctgctcgtttgcaacatcagcgtggattaaaagtttctcggccgcattgcaaacagacggccgctgaactttggcgttgacaacaatgtcgattgccatctgggcttgcgcatgcgcatcaacataaatgtgacaattgcccgccccggtttcaatgaccggtacggtggcctgttcaacgactgctttaattaacccccggccaccacgcggaatcagtacatcaatatagccattcaggtgcatcatctgattcgcgacttctcgcttcgggtccgtgattaattgaatcgcgtcttttggcaatccttgtgcggtcaatgcagcctgtaaaacagtcgccaaggccaaattgctgtgcagcgcctctttaccgccacggagaatgaccgcattgccacttttaaaagttaacgcagcagcatcaacggttacatttggccgagcctcataaatcatcccgaccacccctaaaggtacccgtttttgcgcaatattcagtcctgcgtgattcacccaggccttatccgtctgggcggttggatcaggtaaggcggcaacttggcgaacccctgctgccatgtcagcaattcgctcggcggtcagcaccagtcgatccgtgaacttagccggcaagcttgctgccgcttttagatcttcatgattagcttccaaaattgtttccgtatgcgtttcaagagccgtagccatggccaacaacccggcatttttctgtgcggtcgtcaactggctcaagacagtcgccgcggcctttgctgctcggcccatttgttccagatcaatcgtggtgacatccatttttaatcgtcctccttgtaccctgacaggcgcaaccgttcattttttaaagactgttcgttcagcaacctcgttaaacatcagttagccgcgtgaacttcagatggcacaggctcaagttctgccccgaaccatgtccccactgactcgccggcaacgactcgcaaaataatgcgtgggtcacgcccactcgttaaaaccatgtgcttccctgctcgcatcatcacttgcgccgccttaagcttcgtcaccattcccccggttccaaaccgggttgaactgccccctgcaccagccaaaattttagcggacacatgagtgatttccgggatcaaggcggcgtttgcatggcgattaggatcgcgatcataaagcccgtcaatatcggaaagcaccaccagtaagtctgctccgatttgcttcgcgaccaaggcggaaagttggtcattgtcgccaaaagtcgtacgatgatccaattcatcaaccgcgacgctatcattttcattaatgattggaatcacctgccgcttcagcaaagcatcgatggtatccaaaacatgctgccgagtttgcggataatcaaaaacgtcatgtgttaacaacaactggccaattttagcgccataatcgctaaacctttgcgtatacaacgtcattaactctgattgaccaatcgccgccaacgcctgctgctgagcaatttcggcaggccgcaccgtcacaccaagcttggccatgcccaccccaatcgcaccagacgtgactaaaaccagctcatagccttgattcgtcaaagccgccaacgtatacgccagccgatctatggtctgcaaattaaccttgccattttgatgaatcaaactactcgtccctattttgacaactaaccgtttacaatgcagcatccgcttcaccatcgctacctccacttaccgccgattaccagaatattaaaaaagcaccgccttgatcgagacacccgttaaggcggtaccattctcgttcaaagccgtgctttgcgcttttttactatttaatttcgtcaatcttcagttcaagcttggattcgcgagccattcagaactttcagcaaacgtcctgatctctgtgagccgctactatgacttgatgaagtgattgtatgcggggtgtcgggaaaagtcaagcgggttattcggttctggtaacatctatacagggtgtatttttaaacaagtctgcccattcatcagatgttggcaatgcgcggagaacaatggcatcatcaacaatttttacaaagagctctctcgtttcgtcaaggttaagttgtctacgcattttaattggtatgacaagccgatgtttaattactgactcttaactttaagcagcgtgcttatgtttacgctttgctttgcgtgtgacgaacaaccattctccgaggaaggagccacagacaccgccaacgtaaatccaccacttaaaaggaatgttcgataacttggcaaggataaatcccacactcattgctcctgcaagagcggttgcgaagttacggtgttgtttcatgtcgcttcaacttctttcaatatttagtctttgttgaacccgtaatttgaatagatgtcattctttctactggttaaccaaatagctttccaaagaagctacaatgatgcctattccaagctgcctacgcggtgcttaccttgccgcgtgaccaccacagttcttgaacaattatcgttgcacgctttctaacagccgctatagcatcatcgtgtccccagacttcaagaccgcatcaattgttagcttaaaaaagatacgcttctcgaatacggctttgctccgcgtttatcaattgttttataaaatgctatctaagcctttgttgatgcagattatacatgattcgcattttgtgtcaaaaagcatgcacggaatttttgccaaatacagattacataacgtttgatatataacgaaaataagaacccggactcattcatcaaaacaaacagtgagaaaaatagaacgcctgtaaggaatcagaacgttttttcaatttctgatatatttagcgatcaaaaatgcgttgcactgcttcccctcgtaaattccgctcaacaaataccttattgcctctccaccgccacccgtaaggcatagattcgcggcaatgctctattttggcccaccggttgaccgttaacagtaacatgtccctgattgacgtgaactttaaccggcagcggcaatttgactgcgtatctttctggcagacgcagccgttcactgtaaaaatgcccatttgtcagctttcccgttacgccaaccacacccaaatgatcggcttgcgcaagataaacgcccttagttgtcagcggattgccaataagccgccactgcccatttttcatgcgatattgcttccgtccccgtatgtcaaaacggtaaaaagcaaaaacgccgccagcaagtgggcgttggctgccatccggaaagacggccatttgttgaaataatgcgatggtcttctgtgccgcgtgtgtttgaattgtttgccgagctgaaagcgacatcgtttttggcttaacctgacctcttggcagtcccactactgctgtcatcgcaagactcgcaatcagaatcttcataatcagttgttttacccgcatccccatgcctccaaatattactttttaaatatcgtcacaataagtttatcatttcaactaagatgactgctaacaatacacatgttattaaaatggagacaattagttttgcaaaagctttaaagaaatacaatcaactaagcatttatagtcattaaaccatttttattctgtagccaaccaaaaatccgccaactaatcggcgtactacctgataattggcggaagcttatgcacagcgttcataatcacgagcgataagtattcctgttcctcaaatgtatccattaaaaggcaccggtttacgatcaaatcgaacccatccaagacaatggacaacttagatctttctcgcaatcaatagactggtctcatttatttttgtttaatagactacaaaagagaaatacaactgaaactagtaaatactggataattaacgttgaggtgatggcacttatatttggattaaccctaattatagagccttcttcaattaccgcctgccaaggaaatatcatagaaaatggaagactaataatagtgcttgttgctgcaactacaaaagtgttaaaaaatgaaaacttgtcgttgtaatgaaataacacacgtcctcccaaaaaggccattaggactaaggggattaagatgactaaaaaaaccagcatcactaaacttagcgaatcgcgcagtaagaatgtggccagcatctcgatcaaagtcaatgccaatataaaccaatcactttttctcatttcatttacagcaaggttaatagcttaataatcgcttaccttgccctcctttcagttttaagagctcatcctagatcctatttttttatccgacaaatagctctcattgcaacccgcgccatcaacctaaatgaaaatccgtaaataaatcaaagtacaatttttattcaattctgcatcttcccaatcattaaagaatttacattacgccaacggttgccacggatactattgaattttctactttggtaaaattaatagctcgttacctcaatagatctaacacattcttttttgaagctgacatagccggaaaaaaggtgaaaatcatcccgataatattgggtattagcaccgctactaacatgttattccaagtaatgataatggggatgcccaacgatcgccccaacattaaactagcggctttaactaatacaacagagataatggatgcggtgatcgtcataagcaacccttccgccatgaattggtttctgatatcttttcgcttggctccaaaagcacgtcgaaggccgatttcattttttcgttcggcaatagaagaatacgttgaacccatgatgccaaaccccgcaacgattagcgatataccggcaacccctgcaatcaaatctgtagccaaagaagtatttctatttaactgactgactatttgttgcacattcaatagctgatatcttcccatcgaactgttgtcaccgtatttgttcaaataattcataaccgccctttcagtccttaatctactggagcgataagtgaccttaatccggtttgactgatctttcaatcctctagtcattaaatacgcttgtcgcgacatcaaaacatctggagtctccacaacgccttcataaatcgatgcgatatcataatttgttccgtttacgctaacttgttttccgagtatatttccagcgtgcatgagcttactggctagctccttttttatggcaattgttctcacgccatttttagtcaaagatgttaattttcgccccgcaattaatgaaatatccttagttgtacttagagttttttctgaaatctgatcatacgtgatttgctcgtgcttaccagtaccattaaatttcaaaatggcatcgttgaccgtagcatcgttcttcaacgagacctttttgacagaagtaagcccttccagtcgttcttgatctttttccgtgaatccataaccatcttgctttgaaatgaagctgacgatgaaccctttttctcctccagtcacatcagcaatctgcctagatattgaatcctgaacgccatttcccagaccgagcacaagcaatatgctcatgattccaatcatcagcgatcccattgtcaataaagtttgccgtttatttgcacataaggaatttactagttccttcagtaaaaacttgattttcacatttctaccctcatatttccgtcagtacaccgtcaacaatcttgacttgacgactggcaaaactggcagcttctggtgaatgggtgaccataataacagttcttccctggccactgacttttaacagtatctgcaatatttttttggacatggtggtatccaaagctcctgttggctcatcggctatgataaggctagggttcaaaatgagtgatcgcgctattgccactctttgctgctgcccaccggatagactagctggatactcgtcaattttatcctggagtccaaccatctccagaagttctaaaacgtgattatctggatcatcgcgatcttttccataaagtaaaggcagcttgatattttcgccaacagtatatctggcaagcagttcaaagttttggaaaataaaaccaacccgatgattacgaatttcggaaacaatatcgtcactcagatcgccgatgatttgtttgttaaattgataagtgccggtgtattcattatccaacatgccaataattcgtagcagtgtcgatttaccggaaccggacggaccaactatggctaaaaattcaccgtcatcaacgtccagattgatatttcgaagtacttgttgtcctcgaccttttttcttcaaaaaatatgtcttattgatattctgaagtgaaatcattttgcgacctccttcaaaacggatccaaccggcacctccgcgattgaagcatattttagtcccatcgttcttatgatattgatctttcgctttttgaaggctttggaattggatttcttgatgaggatttgccccttatcttcgaattttccagggatcaagacgctgctataaggaatattgatatccatgtgtacgccaacattaactccttgaatgggtacctgaagtcgatacttggtgatgctttcttcacttgacggtaaaacgtcaactttttttacgacacaatcatactttttagacccatcaatgttggccacttttacctgcataccttgcaaaattaagtggcggtctagctcggttacggaggcatcgatatacttcgcgtcacttgcaacagcatatgagccatcttccttaacgataaatgtgccagaaattggcgtagtataccctgtttggtaaatcacttgtccttttgtaatatgctccccatttttgatcttcacattttcggggcttgtcgagtccaagaccttgatttcctctgctctaacaacgccgcttaacaccaaatccttttgcctgacaactttatattcttttgctgtcgcttttgccgttgttgttgtcgccgattgataactagttaacaaagcatacaagccgacaaaacttaacaaaattgatcccaaaataaccagtctttttctcatcttaccctctccacaaaacttacgatatcaaaaatccggaggcacaagttaagcagcccctgcacactccggattttgtttagacttcaattaaggcaataggattttgtagattcaaccaagatttcttatgggccaaaaatcaatccaccaaaagcgttattcgttaaacctgttgacttcctcccacatcaagatagcagatgaactcgctcatttgcccaataaaaaattaacgtcgcaaatcgcttaaaaaccgttagttattttttaagattgacgattatttgcattttcacgacgtttacattcgaccgggttgcactgattaagcttaggcacataatgctcataaatgttttcaacaatgtcgtacctacattcatatatctgagctcattgcttgcctttttatgtacgtttatcaccccttcaccaagacaatttgcaaccggatagttagcaactcttagttgtttgcaagctctgccaacccgatacatcccccttgctcgaaacacaaaaaagcccgccgtccacagaactatccctgcacaacggcgaacttccttatttctaacattctcttttctgattacgcccgcggccggcgaagatagcgccgagccagatagaaactcagcaatgccagtcccagcactccgacgacaaccgcgatacttaaccacaagcgccagtgatcagcagactcggcggcgtgctcaagtgattcggtataaggtacccgtttgccggtcactagtatgcggtgggagttgatcatatacggggtacaggtcattaacgtggccaaatcgcgtcccggttcaatgcgtaggctctgggtttcatccggccgcacggttttgatccgaaagacctgatacgccatctttttgccgttgacttggaggaagaacttctgcccccgtttcaacttgtttagatcggtgaaaaagcgtttagtgggtaagccgccgtgtgccgaaacaactgtatgcgtgttcttgcctccccgcggatagctagtacctggtaacaccactgccccttgatctaacaacgtgttgttggtggtgtcaaaaaggggcaggtccaccgctaatttcgggataaccactcgcccgatcagatgccgtttcacataggcttggttaaacttttgcctgctttgaaacggatcctgtcccgggcgcaaaccagtctgggcaagtgcacggttctcctctgcccgttgctcatcttggacagcggcattttgcttggcttcttgctgtgctgctgctcggcgactggttagtagcaattcattaatcgccgttgccgcgaacggatagcagaaacacgcggcccccgcagtgaaaagtaagatgacgaaccagcgtaacaatcggcttgtccccgacgctttttttgtcataggctattagactttcttgctggtctttttcttcattaggtgaccgccacccattaagatggccccgatcatcaggaaggcgaagagtccgattccgcctgtcattggcaataattgattcaccggcgtgttggcgatgcgaatcgttttcgtaccccaagtaccggcaatgacttcaaaatctgttgtcggatcgagaatttcatagccttctggtgccgcggtttcaaccaaggtatatcgccctggcaacagcccttgaatggttaagttggctgtctcggctccactggtcttgagtttcgttgccgcgtcttgattcgttgtccaggtaatcttggtcggttggtaggttccgaccataccgttaacgccttcaagaactgcatattcgcgcacattgccgttcattcgctgtaagatgaaagtcgcgttggccaaactcttggaagatccggcttcgtgtttgaagaaccgaatcccgccagtctggatttccggaccatcgacggtaatcttgctgttaggatcaaagctcacttcagccgtgttactgactttttggtctgggaccattttctcattgacgattccggtgtaggcaacggtcacgcgtttgccggcatattgggtcaacaggtttcgtaccgcatcgggatcgaccccgcctagaaagtccagttcaaacccgaatggatagttgtgtgtgtgttgccaagctgcatcattggaagtcatgaaggccatttttccggttaatgcctttaaaatgtcctgaccgtcaaccgtgattgccgtcaatgccttaaaagtaaggccttccttggtcatataatccagcactttaaattggttgtacttaaaagtgtcttgactgtgatcagccagcgcgccaatatcatgcggaatctggaactgaacctgatacgtgagcacatcgccaaccgcgacatcatggagatcttttgttgccaccgcttgttcattgatttccgtcagatttttggtaacaagactgtctttaggataaagatgaatgttggtcagatctgtcccgtcatcatgccgcactggcagactcacgatcatatctgctgctttttgatacggttgcggggtcacggcttcgtgaaatgcgtacacgctatgccggccattggttttggcggctaatcctttgaatgccgccaagccgtctgcatcagtcgtgacagctgcggcattaggatcctggagattcacatattgacccaggttttgcgatatcatgctcgcagcggttgtcttatcatgattttccaataattggtaaaaagcatccgtcacgttgaaaattttaaattgggcgccttgcaccggtttgcgtccggtcagtccaaggtcgtgcccggtattttgaatctgttcgtcactggtttgttcgattttgtgcagcgtgaaatccacagttgttgtcgcggcatgtacggttttgccggcactgagcagcggcagaaggaagctcatgagcatcagtgctgccaagagactgtgcccgatctttttaaacgttacttgcatgcgtggtgcctcgctttcttatttttaatgaagaagtaagtggccagtagtagtaacagactccctaaaaggacaaagcgtaaattgcgccaatcggacatagccggtaaataaccggattgacgcttagacggatgcgttccggtgccgttcgtatcctgcccgtgattgccaagctgggtcgttgatggccccgcggtttgatcaccggttgtcggcgcctgcttatcggcatagttataaactcgtgggtagccgctactgatcatttccggtgtcaccaccccgccaaagttttcctgcatcggctggccgtcaattaacacaaagcgccggttgccctcttcgtcttcccatgaatcaggaatctcgattttgatcgcgcggcttttagcatccacttcatagccgggaacgccttgcaattcttcaaagaaatattctccggcgggtaaaaagcgttcgcctgtattgactagcccatcttgatcggaaacaaatttgttcacgcggtcatcatgcaacggatcagtagtgctcacccatttgttgcgcaagtcggttactggcgacatatcgagataaagcttcttaccattctcaattcggtaaatagcaaagatcgcaccggctaaccgtttactcgtaccatcagggtgcacgccgaacttgaagaaatacggatcgcggacataaccgacatttttcggatacagatgaacagtccggagcgggttgtcactgataggatctgtgacgggaaaaacaactaacatcggcgaacttttgcgctctaagtccacattgagttcggttgaaggatccggtgccacctcgatcatcagataagctttagtcggtgcctgttgatcgacagaaacggttattcggctgatcccatcttcaccgagtgttggatcggtttttgtattcatcaggccgatgcctttgttcccttgaccggctaatttcaggttggcccgggcaaatttcagtgcttgcttacgcgtcatattctgataacgatcaactaaagcccgaattgcttcaggggtcatattcggtttcaataaggagctggcatcatagacctcaaagttagcgccattcagcccgctggttttgcttaataatttgtagccatctttatccgggttattcgggtcaatccgatgaccgtcattttcataccaaacgtcttccggttggcgaatatcccgataaattcgcttatggatcacaatctcggcagtttgatcagccgcgtgaacccattgtggtgtgttgccaagcacgataccaatcaatagaagcaacggggcaagccaccaataaaatcgtcgcatcttaatgggcctcctttcgcttcaaatacaggtaaagcagccagccgccgccacacgcactgattgcgaccatgacaaacagtaagataccgctacccccggtttttggtaggagtgtttccaacgaatggttcgtcagtgtgaagcgaatccgattcaacttgtcccctgcatcagggataaattcaaacccatactcatcactgctcaaatcgctgccactatacgcaagatctaccattgtgccatgcgcgttaatcttgaaggtaaacgatccgttcagccgatcaaatccggcaggcgctttggtttccgttaagcgataagttcccggggtcaactgatgtgtgaatcgcagctggccattttcatcggtcgttccttgtgcaacaggggtggtttgattgccgcggtataaggcaaaacttgcattggcgagtttgtttttacctttttcaattttgatcaactcaagttcggtgggtttcagttggttgatcaccgtggtgtctggccaaatctcgccgttgcggccgactgtcacagtaccgtcagctgccacttttaaatcaaattcggtctgtaactcgtgaccggcagcggcgatttcgcttacctgatagtcgccgggttttagcgttccaaatgagactttcccctgcgaatcggcagttgctgtttgcagttgagtgtctccttgcttcaagacaaaccgactacccggcaccactgcgccatactggtttttcttggtaaattcagctggaaacctgcctgccggatcaagatgaacctgcaccgcgttggtttccttgctgtaacgttcctcagtgtcgaaaaatttaacggtcgcttgattgaccagcgtaagccgttttgtcagtgtgtccggatcctttgttggccgcaccttcaatcgaagcgagaaaaagccgctatgaaaatgaattttctgcacatcctcacgtccgattgtcagcgtgattcgctgccgatcgccttcttgcgtcacgacaaaatccgacacgtcctcagtcagcgccattttccgatcttggctaaccgcatccggatcagttgcattaaagagctggaacgctttttgataagttgggggactgttgttattgtccggaatcaactcgacatgctccggtagcaggtccgtcacaacaattttggtcggcttcaccacgtaatcgcccatactgtagacttcctggttaatgtagtagtaaaatggctcgccgttgtaatgctgattgaccacctgatcgtctaaatcatttgcggtccagatggtgccggtcttatcttcctcggccccgccaccggcttcggcatttgcgctcacgcttttgttgttggtgacatttgggtcaatcaactcgatttgtccactcccattggcaacccaagtgccgccgccgttggaataagtgccgcgtctaaaggtgtggctggtaccgtttaaagtaaacgcaacggcaccacgcccaaatgttggcgcacctagtcgatcttcccattccgtcatattctcgtgatcaattggatcgacccagtttccccaggtctgtgaggtatagccgcgctgttcatctccgcgagcgcccagtttttgggtttcaaatgtcgctttatctgaggtgatccaggttccttcctcaaattgccaatccgtgataaaccgatcgtcataagtgggcgtcatccccgcctgctccgtccagacaaactcaccaggattcaacgaggtaaacgtcagggtcgaattttgattggcctcactttgcgggataaagttcaaccgctgtctagttgccttgtcataaaaaatcacgcgccagtcatagtacaaaacattggcaaatgacatcccggaaaagaagttgttggaaaagtcgatgccgacgtcctgaggagtatccctccattcgactggacggacgcgaatacctgttagttcaacataagcaccaatctcaaagcggttcccatcaagatcgcttgctgagccgacatgatcaatatccactttgatcttggcatctagcaggttagaggggccattggaattttgaaccgcatctttaaaaataatggcggtggcatcagaacgcgacacataatctgatgaaacgccattctccatcgcccaacgtgatccgtattttgaacgagtactactactctgtttgcgataaatttgcgcctcttcatccgatagtgcggcgccatcagctttggttgcgtgaattttaatcgtcccaagtgcagacggcggtaaaatcagactgtgcgcatctttgctgagtgcagccggttcctgcacatcatcgttaaccagacgcgcaggcagctgcaagtcgacatcaagcgctaatacctgagcagcgtcattaaatccatccagactgagtttcacactagctgcttgctgcttcgtatctggcagctttttggttaaaaggtactcacctttttctgccgttttctctgcaagccggcgcgttatttcaccgttagtatgtgcaggctgggacgtgaatccttgggcattagcgaacttgacgacttgctgccccgtttgatcctgtggcttggctaaaatcaacttaacctgaatttcagaccgttgaacgtcaaagttgtaagttaacgtgtgaccatcgccatgccaggattttcctgcttctagctggatgtgctgccgatcttttgtagtcgcttgcttggcggccgcgctggttgatggcgcactagccgctgcttccaaatcaaactcagcagcttcggatgcggcagaacgagtgctcggctgcactgacgcatcccggacatcgtgcttcggattagtctgagcgctttcagctaccgggaccgcggtactgccaatttgcgtgaccagcatcagcagtatcatcagcatatgaatccatttcctaggcaatcgggtgcctcctttcatgttacgtttttcacttgttgctgaattaagcgtaacaagatgaactgcgtaaacggaactataataattgttattttataaataaagttttctccggtatattacttcttaaatgataattattagcgaatatatgaacgaccattcagtaattgctagggattggaatttacaccacaaaaaatcccgatctgactaagctggaaacgctcagacagatcgggaacaacctacgttattaaattatattttgctactaagcgcggacaattttacccacggcaattggcaatgttacgtgtgcatcatagttcatgacggttcctttaaccgtatctggaagttccaaactgtccggaaccccatgaatgtaaacaacccgtttatccaattgcaaatcttcactaccaaatgctgccttgaacgccttctgcagctcttttaaatccacgagcttgtcataagcatagtgcccgtcagcatcggctactggatagctgtcattgggtacgtgcattttagcaggctcggcatcaaacgggaccatcgttgtaccggaaaccggttccgtttcaggtaaatcaacaaagccgtcaccattagcatcttgggccgcggtggctatttcagccggcttgccatccggaaaaccatggaagtgttcccaatgctggacgtttgcaggtgtatcaaacatctcaatatgaatacgcaactgcgccccgtcaacagtgaactcggcagtaccatgggccttagtaccgatcttctctgcattcaatggcacaatttctgctgtatacttttcagccatgtcaaccactcctattttgagatttgaaccacctttagaataacgtaaagtctttaattgctcaattagtttaataattatttttatagccttttccacgttctcctagcgatggcgccaacggtttcattcagtatttaagcagttacatatctctccgaagcaactttattctcttcctaaatcatgcgcttgaagtagtcgctgccgtaacgccggatctgcagcatataaatacaagccatacttagcccgtttcagcaaaatattaatagcattcatgacaatcgcaattttagcggcttgcgtatccgctaaatcagggcgttttttgaatgcttctttgtcctgatattggctaaggttgacggtcaaacgatccttctctgcattgtagccaagactcggccctaaaataaccccggcataattcaaatcgaacccttgaatcgtgtaaatcgagccaacttcatgtaaggtctccggtcgttgtgcccatggccgatcggtaaaattaattttatcccacggcagccgcaatgaaccagccgtgacataccaggtcttcttatccagcaccgtaaacggataatcagctgttgcaatcaatcgtgacaacccaacttccgcatcacgttgctggattaggcgatacattggctgaccatcggcgaaaacccgaaaatcaaacttctccggatgcggcagcggggtgatgcgcccgcgaacaaactgatcaatccaattattgaccgcagcatcccccacccgcatttgttcagttagttgaaaatgcgccaccgaatagccgctggtgattcgcttcagcaaagcctgcgtccaaaagcttttaagtttaactagttgatgaaaatcaaacaccagcacaaccaatcgcgccaattgtaaaatgtcagtcaattgattagcatcccgaaaattgttgtacgggtctggcgctgtcagcaacaagtgtccttcgtcaataaaaacaatatcggcacgcttgccggcttttcgataggcattaataaaaggtgtcggcttcataaagtcctttttgcgaaaataggacttggcaccggctatttctttgtaaatcttcaacatttcattatggttcacaagcagtttattatcagtgcctgccagcggtccgactcctgcacgcgcggcttgttgcagttgtgcaaaggccgcgtctaacaccacgcttttcccggaaccggcatcgcctgaaacgatgagcaaatgcgttttgtcggcttgataattagccatgataaaattatgaattttttgcttcaatgctgcttgtgcgatggtcaatgtcgcgtcttgcggcaaaatgaatgttgactgagctagatctggcatgtcgacacctccgtcatcaatatagcatgatcaaagctagtgaccatacgcagcttagttagttaactataacaactttaaaaataaccttaaaaaaaccaaagtcaatgcaaattacatacgttattcacgtaaaccggttacacttaggatagtgactaaaaatgttattcaagaactaggagtattgccatgccttcaattgctgattacccgcaacgcctcaatttagcgccttttcaacagacacgattaactgagttggatgccggtctttttgcacaactgggttatttgaattttaactacctcatcggccaaccttacgcgcgttttgctgatctgaatgatagcagccgactgaacaaggcaactttaacgacttgggcaattccgacgcatcaagcaatgttacaagcgatgcggcaaagtgcacggtttgcgcgggtgacttggaccaattggcttgagacctgcagtcaccgtaatgaagaagattttggtgccatcaccttcaccttggcgccgcatgtttactgcgtgagttttcgcggaaccaccaacaagttagtcggctggaaggaagatcttaacatgagcttcatgcccaccattcctgcccagcgccgtgctctgagctacttgacccggcaaattagccgccatcccggcacctactatctgaccggacattctaaaggcggcagtctcgccatttacgcttttgacaacttgccgcaaccgcttgctgatcaaatcgcgcatgtatacagcttcgatgggccaagtggcgtcccactcgatcccaaccaccgtgatcgcgtcaccaaactcgttccccaaagttcactcattggggtcagtctcgatccggcaactaactttgaagttgttaaaagtcacgtcaaacttttcggccagcatgacgtcctcacctggaatatcgctgaccatactttcgcccggctgccaacgaccacttggatatcgcgctattttcagaaaacttttgcgctatggttggcgggtttggacaccaaagcgaccgccatcaccgttgacgccttatacaccatgcttcgaagcggcaacgccatcaccttagacgatttagccaaaaccaaaaaccactggcgccactatctacatgcctttcacgaattagacaagcatcatcgccagcagctaggcaaatcgttccgctgtttgctcggagcgatggcaggatcgctggtaaaaacgcattaaaaatttccatgtcaacttgggcttgttagcaataaacttcaaaatgtctcttttaactcgaagcgagaacggcaaaaacctgccgaactcacttcgagttttttgcactactgtgacaaaaagttcaaactaacctacatgccgtcagttcgcggcccacaaaaagacaaactagcatccgcccagaatcccgtcatatcaacaactctacgaatcttagagtcttcctgagtaaaaaatccttgtacctttttagatctgctttaacaatgagaacaggtggtgaagagaaaatgcaatttagtgacaaactgaaacaggctcgccagcaacatcatttaacccagatgcaggttggtacgcaattacatgtttcagccaaaaccatttccagctgggagaatgggcgtagttttcctgatattagcaccttggttagtatcagtgatttatatcaaatttcgttggatcaattacttagggaggatcaagatatcgtgcaacattatgagaccatcagcaaacaagcacagcgttaccaaaagtacttccaaattacatactttttgaatatcttactgattttggccatttgggcagtacagatcacatcgagcaattctaagactattggatggctatttttggcactattaattaatttagtcgtgatggcaacgcattatcctgattaccatacttggatcaaaggtacggcacaccgactgctattaattctgttagctgttggattaagcacagttttactcgtcttgagtttcgatggtgcagcgtcattaaacaccgccagagcagcatcaaaccgatctgttgtttctttaatcggcttttatataggtctgctcataaaaccactaactgaggcgttcagcattatctttgccatctttggttttgccgaactaaaagaacagccgtaagctcttttgactcatcatcccgctaagtcagccatttgcgctggcttttttaaaatctgataacttgctttacaaggtacaggctgctgggtatactatgcttaacaaggtatcaaaaggaggccagtgcatgcaaccttcatcccaaatgctcaagggcatcctcgaaggcgccattttacggatcattcagcaaggtgacatttacggctacggcttgcatgaaaaactgggcacattgggctttggcaacatcccggaaggcaccatctacccgttattgcttaaactacaaaaaaacaagctcatcgttggcgttcgccgtcctaccggcaatggccccgatcgcaaatattatcacctcactgatgccggtcaagacgctttggctgactttcagcaacagtggcaacaacttgcccaagcaatggcacagcttaaccaaggaggtaccgaatcatgaaaaaattaaatcggctgcgaacggcaaatgaccaactgctgaaaaatattcacggcactgattacacttacacggaaactgttatccaatatttacgcggtgctttgttcaaggatccatacgccattgaacacgccattagtgacttacttgcaaccctaatcgatgcgcaacaggccggccatcgcgttgccagcttcttcagtgacgatccccaaacagcagcggataacatcttagccgagttgccacgcgtctcttggtggtacttgtttgatcaatactggccgatcctcatgtttcttttttcctccagtatttttacgatgttagtcagtcaagacaatcagttatctttaagtaataccattgcgccgcttactgttgtcttcgcctttttagggttgccatttgcacgcggcgcctcattcaataagctctcggccaaaacaatctttggtctgctgctggttgtcacccttcttgttatcgtccctttaatactgggttacttaaccgtcagtcattctgaatttgccttttcgcatacgaccctcaccatcatttgcggcagttgtgccgtgctcaacttggcggtggctttgagttttcggcaaatcgctaaactatttttaggttggtcaacgatttggctactggcacttgccggactacttttgccaatttcagcattcacggtcggcattgccatcgccggcgttgtcctcgcagcactcttattgttctatcatcccgaaccccgctccggattaatcgcctaaggccgcgattgatcacaaaccatacacaggagaagcattcgccatgaaaaagttaatgaaactgcgtgccgctaatgaccaactgcttaagcaaatccacggtctcgatcataactacacggaaacggttgttcaatatttacgcggtgctttgtccaaagacccttacgcagttgaacatgccatcagcgatctgctgacaacgctcattgatgcctaccaagctggtcatcgcgtttccagtttcttcagcgacgatccccaaactgctgcagataacattttaaaagaactaccgcgcgcttcggtgagttatcatttcgccatcttctggccgttgatcatgttcctgttgattgaaagtatttttctcatgtttatcagccaagatcgtcagcttacggccggcaacattgcattagccggcgcgaatgtctttattatgattcctatttcttacggacgtggcatcttctttaacaagatagcacgtaaaactgttttaacttggctcgcagctctagtcgccatcttctttgcgcctgcgctgatcgattatttttcacacggtctgctagacttggctatctctcggccatcacttctgggattcagcctcgtcttaggtgccttcaatctagggatggcgctgtggtttcggtatgctgcccttgtgtatctagcatggaccggcatctggctgatagccgcactcggactttccctccccgtctctcagataacggtcatctttggcatcatcggaatcgtgggggccgttgcatcgtcgttttttcgtttcgagccacctgaagtatgacgccaaagatgccgttgacgcgttgctttatctaaacagctgaccaaagaacgttgcttccccaaaataacgatcgccggttgccccaatcgttgtgtacaattggcttaacgcggcaggtgactgtaagtgattgagtaacacataccgggaaatggtccgtctgagtttgagggccaccatttgataagggacatcacggtttaggtctttggccgcctctaaaagctgttgccgaatttctggatgtttcgccatttctggatcgttataagctatatcaatcgcctgaaataattgttgggttttcttactcatctcttcacctcatccatccttctactagctggtatatactcaactcagtcattattatcaacgtagaaagtaactaacacgagtcgtccgaacactgacacgctttttgtgctgtgctagactattcatgcagtataccgatcttgtgctcatcctaatatccgtgaaccgggagccaaagatcaattttctatttgcagcttatcatgtcacttatgaaaggatctttcaattgaaatatcgtttattgggcaaaaccggctacaaaattagtgaagtttcgcttggcacctggcaactagggggcaaatggggtgcgccattcgatgcaaatgtcgcccgcgaaaccttggacgaagcctatgatcgtggcgttaacttctttgataccgctgatggctatcaaggcggtgaaagcgaaaagatggtaggagcattcgttaaagagcatcccgatgtgcatttcaccactaagattggccgcaaagaagagccattgaccgccgagcattttgatccggatcatattcgccgttatgttgacgaatcgcgccagaatatgggcttagacagtcttgatgttgtcttgttacactgcccgcccatgcaagtctactatcagcctgaaactttctttacactggatgccttgcaaaaagccggtaagattcggcattatggcgtcagcattgaacgggccgaagaaggcattaaagcgctcgactatgacactgcggttgttgaagtgattttcaatatgttccgcctgcgcccggccgacaccttcttcccgctggctaaacaacacaatgtcggcattctcgcgcgggtacccttggcaagcggcctcctgaccggaaagttcgatgaaaagacccaatttgcccccacagatcagcgcgccaacaaccgccatggcgaacacttcagcaaaggcgaaactttctccggcgttgactatttaaccggcgtcaaagcagcccgcgaactaaaagagcggttaggatctgacaatctggccgcaacggcactacggtttattctaatgtacgatgccgtttcagcggtcattcccggtgccagcaacccgacccagatcgaacgtaacaccgacgcagccgaaatgcctgccttaacccctgatcagatggcagtcgttaaagatgtttacgagcgcatgatcaagaatccggttggttacgagtggtagtcaactaataatcagtgagcggttgtcaaatgaaccccctcaccgatttatctaagtgtaagctgactgtacaagccatctgagtgtgatgacgatcacgcttgccaagttggtttgatgcttgcgttaactcgttgctgccggcagctttcttctgcaacagcgctgttgctacataacaactaacgagttcaccaaaaagcacccacacttccagttgacgattcaagtcataaccatcacaaaaacccactccgatttgaagtggggttatttgtgttgctaaaaagtcatattaattaatcactttgccgccagcgagaatccataatcaagcgagcggtaaacaagcccagcggtaaaaacataatgataagtgcggcacgcgtcatccattcggcaccgacgccaatattattcaatccaatattgtaaactgcccggtaaatatacaagccaggcaccatgatgacgattgatggcactgttagcgaaatccgcggatagccatcaacgcgattaatcgccgatgcaatcagcccagccaccagtgcgccgataaatgccgccgcagcagggggaatcgtattgagatccaccaattcaagccgcaacgtattcgccactgccccaatcaacccggcctggattgccattcggcgggggctgttaaacatcaccgagaatccgaagaccccacaaaagctggcaatgaggcgataaatcaaaagaaggaccggactcaagcctaagtcgacaaagttttccgggcgtaaatggacaaccatcgcgaccagccaaccaaccagcgaagccacaatggtaatcatcaacgcatacagtagtcgttccattcccgagcgcatatcctgcttcgaaatatccagcatactggtgataaacgggaagcccggaatcacaaacaacatggcgccgatataccccgcttcatgccgcgctgcaatgcccagtcccatttccaatccgcgaaaagcgataaaataaaccaaacaggcaaccgccacactgacaccgatacaagccagcagtgtccagttacgccgaatcatgatttcacgcagccaattaccgatccctgcaccaacaaaacaacaaaccatttcgataggaccgccgcctaacaaaaagacgaaagcgcaacacgccaaggctgctgccaatccggcgcgcaacggatcgtaattgccagacattttttgaatttgatcaagtcgatggtgaatatcccggacggtttgagtcgcatactctttgtcaaaatgacgcacaaaacgttccaacgcatccaacttatcagtattcacaccgctttttggcagtgaaagcacctcagaataggcatggttattgctaaagcaggtatacgataaggaaattaggccaatatctgctgaacatgacatccgcaatgctcgagcaacggtgttcatcgcctcacgcacgcgccacgccccggtaccacacgccagcaacatgatcccgactcggccgacgagtgacgcgcgctcttcaagggtggcatgatccgcttgccgctcttcgctgacaatcacgtcataccacggaatctgcatatgatgtttttctgaaagcggttggtctccccgatccgcttggttatcttttgccttcataactcgtgctaatccttcttcttatagggattgtcttttccaaaaaaattgaaaataaacattcactattctagcacaattcataacagggtgtatttttgactttttgaaactaacggatttgaccgccttattcatgacaagcacgcacaaactagcaatcatttctcggtctcaacttattgcatatgatgttggaatcgctgcgccagaaaatgccggattcgcaaaaagcgacggggatcttccttcttctgtccattggcgatccttcgtagctcatcaatcgcatctcgtccttcttgactcaaccgtacactttcagtcgtgaggataaaatcaattcttagtatcatccgaaaaacatgccgtcgtaattcatagccatggaaaccatcgcggataatctcttccttggttctttccacaacttcttcaatattcgtttggcggatgagctgcggttgttcatgtaattcatgcaacaggcagtcgatatagccttttgtttctaattcttcctcgtaatccatacgccgatcaccgcctttcatttgattaacttgatccgtatcgttttttatggtcattttcttaaataatgggcatcgccttttcgctactaaacgacaaaagcggtaaataccgatttatcgatggttaaacatcttatctgcaaagtaatcccaataagtctttgtgccggtgataacagatgcttggccggctaatccataataaagggactgccgctgcgatttagataatttcacccgcgccttgaccgtaaagaagttaccaactttcggatcgcgtgttggggcgacgtcaatcgcataaacccggccatctaatatggtaggggtcggcacattctcagcaattcgcaggcgtactttctgcccacgcttgatgctcatgatctctgtcggcgaaacgcctaattttatgtcagcaaccgtttgttccgttaaatccggcagaattcgtgccaacacgcttcctgaagggacgtattgattccctgccaaggcagtttctaaatgcaaaacgccactggcacttgctttgacatgatagttttgagtttcatcattcaaggtagctaacttagcctcgtctgcttggacctgttgctgaaccttcgtctgttccgcaacggctgtttgctgcaaccgactttgtaatgcggttagattagcctgagtctctcccgctttttgagccgatacatctgcttgtttttgaccggcccgttgctgctctaaagacgtcaaattggtttgttcctcatccaactgtgtctgtaattgagcaaggtactggcgtttaaggttcgcctgtgcctccgcgtcggtattttttatctcactttcatattgttgataaaggtagtgataggcgtggcgactggccaagggtttgttcgcctgaatcgccgcttttgcctcggagatagcggccatttttgcttggctcgtttggatactggcgcttagtaaccgatcaatctctttgtttttttcactagcgacggtttgggttgcctgctcagcctctgctgtcagtgtcagcactcgccgttgactcagataatcttgcacctgttgttgatagccgaatcggtctgcctttgaaaaaagatctttgttttcggtaacactttgtttcaaaacatccaattgctgctgttgctcttttagcgttgccagttgctgcttgagtaatttgatttgtgttggattggcgacatcgtggtaaacaagtaaggtctcgcctttcttcacgcgcttgccttctttcatgcggttcgagacgatccgattggcggccgtcgcctgaactgtcacggctgcctttaccggttcaatttcggcagctgtcagcacagttacctcgcgccgagcaaagatcagaaacaatagcaagcctaagaaaagaatcgtactaggcataataatcatcgttgaaaaattgcgaaagcggtgctggtaatattcggtcgttgcaagttttttgggatccatcatctaaagctcacctcactcatgaaccaggcgcgcgtaataaccgtcttgggctaacaacgttgcatggtcaccttgttccacaattttgccatgatccatcaccacaatttgttcggttttagccgcaatagttaagcgatgggcaacaaaaataatggtccgatccgtcattgccagcaagcgatcgacaatttttcgctctgtaatggtatccagactgctggtcgattcgtcaaaaatcagtacttttgccggtgacaacaaggcccgtgcaatcgccagccgctgcttctgaccgcctgataaaatgctgccgctttctgacaatttggtctgccactgctgcggtaagtttgcgatgtctgcggcaatttccgcagccaaacacgcctgcgtcaaatcttgttccgaaacatccgaacggctacctaacgtcaaattctccaacaccgtgcccgaaaaaataaacggatcctgaggtacatattcaatatattgccgtaatgttgtcaggttaatgtctttgaccggaatgccattaaacgtaatggttcctttatcggcatcaaccgggtaaaagccaactaataattttgctaatgtcgacttaccagaaccgctcataccgacaatggtatatttagcattttccggcacttcaaggttgatgttttttaacacatcttggccaaaaccatatttaaacgagacatcccgaacgcgtatcggaccttcgattaaatgccgctccgtcaagtgccgctgttctttgaattccgattcgaccagataaacttcattcaggcgattgttagcaacccgcgccatttgtaactttggctgtaggttgatgatgctttcaagcggattcgtaaagtatgacagcagcgcattaaaggtcagcatctgccccaaactcattcgattggcaatcaccaaacttgccccaatccacaacgttcaacgccagcttcaacaggcctttaatcgcttgctgtaactgatctgccttggtgtaactaaacgacctcttcaaataggttagaaattcccgatcaacccgttcatagctaactcgttcgccggtcaaggacttgatggtttcaatgccattcaaatcttcaataatcgatgaactcaagattgcgttactttccatcgtctcttggttcaaccgatcaaacggccgctgaaatgcaaaaacaatcaccaaataacacggcacggcaatcaatgacactaaaaacaaagtcccattttggatccctagaacaatgcctaatattaggacaatccagacatccaaaaacaacgtcataatcgtattcgccagcgcgtcaataattttattggcatccgcaaaccgcgacacaatctctccggtccgccgagttgaaaaaaacgacatcggcaattcatataagtggcgcacataccctaaaatgacatcaatcgcaagccgctgccccaacaccgccatcaaaaaattctggccataagtcaacacagcttgcagcaagtaagccaccaaaaggccactagcaatcatccccatcgtcgtccgcatggcattcggtatatacgtatcaataatagactgcaaaaaatacgacccaacgatactaatgaccgtaatcaataccgcggccagaataatgttcgcgataatacctttttgcttagccagcatgggtacaaacgcaaacaaactgcctttgtcctccttacgcggctgatactgcggcgccggtgcaataaagatggccacacccgaccattctttttcaaacacctctcgcgaaagccaggtcatgcgcactgacgggtcaggatcgccaatcagaatactcgtgcgcgttgctttaaaaacaacatagtaatgaagcaattcaccgcgcttcagcacatgggcaataaacggataaggcacatcctcaagatcaaacaactgcatatccgcctgtaccggttttgtctcaaacgctagtgcttcagcggcccgaacgattcccaaagccgtcgtgccatcctgatttgtcttcgctaactcgcgcaggtgggctaacgaatagtccgacccattgtatttaagcagcatgtttaacgcagccacaccacagtcacgctcgtcaacttgtgcggtgtagaagcgtttgtagtaggtgatctggcctagtttgggggtgtgtttaaacatgtaattatctccactttaaaaattgaattgccaattgacatcagcctctccagaacaaaaaataagtaaaagcactatattgactaggtaaattgtgctatcatgcattttatcgagggccatagcagttatattaatataaaaattataaatatatgcaaatttaataatttttatattgtgtagctcgcaatacgagattatttgtaacctcttttacgagtgttcttctcccacacgtaagaaaactagccaaagatactcgttagccagttcttaaacttgttaaacgtaaaaccttcatctcggagcattccgccaacaaaacttgaaagttcaagatctgtcatcattggcatttcctcatctttaaattttttcattacctttttctcccttcgttttgtctttcgttcaaagtgatcgtaccagatctttaaaaattttggttaggcaaaaaataaacgtagctttttcgccatttaacgcagattttcgagcaccttggcaatttttaggaagttaaccgcctacaaacagaaaggtaaagattatagcatgattatttctacagacttgtattacttcttgtttcacttaccgatctttttgattgatcttactttcctttcgtatatttactttaacgacttcaaactcaggcatattttcttatggtcactcgccgcaggaacgctctccacatttctttcatcagttggtgaaataacatttggtattttatatgcaacaaatatttcaaaaaaatatcagcgttttgatatcttctgggttttcttatttctagaacttaacttaattgttattaaccttcaattactagtcactaaaatcgtatttctgtttctatctgtccaatcatccactatctcaaatagcatcaagctgatcattgatgtcatatttgcaattgtcatgtctcaggtgttaatgaaaaagaagctattcattaattctatccgtgaacaaatccaaaaaaaaatagctatttggagaccggcagttatttatttaatagtgacctgcgtttcgctttactgtttagagtttgctttttcatttcttgaaatcaccgatatcctaacacttcttattttgttaaccttaattctttttatggttatcaatgtattctcgttattcttcatcgtaaaatcatatcagtattctttggagttgttagttatcaagcacgcggaagcttcaaaacgcgcgtactattcagcccttgagcagcaacgtatcaataccagtaggattcttcatgattacaaaaacttacttgcaacgttacagcttagcttgcagaaatcatcaccacaccactcatcagacgttcgaacgattgtcactcaagcacaggatgcacttcaaaaagctgagataggcaaagatgccttagctttgatcgaaagtgatccgctcaggagtttgctgtatctcaaatggtccgaatctgcaaaccgtggcataacaatgtacatgcataccaaagatacagtccgatccctggaaagtgatgtcggatttgcaattatcagaatcttgggcattttaattgataatgctattgacgaaactgccacacttaaacttaagtctttcagagttctcttattacccgcccgcgatcacttagaaattgttgttgcaaacccgattcctgacggctttgatttaactcgacttaaccaaaaaggatttacaacaaagggctcaggccacgggcaaggcatgtccattatcaatgacctaatccaacaaaatcccaatatcagcatgcgtaaagcaattatcaacaatgatcaattaaagatcacgctatttataggaggaaaagcccatgcctaaaaacaaaacaatcctaaacatttatattctcgaagacaaccctgactatctaacctttatccaagaaactgtgcagcagtaccttctgattgaagaactacccgccaagatccggctggcaacaacgtcagcaactgaactgcttgcagctgtcgattggtcagccatcaatgatagtatcttcctccttgatatcgagctgggagattcagcgacaagcggcgtagatgtagccacagccattcggagaaagtcatattatgtcgatatcctcttcatcaccagccatgtagatgaagctttaaggattttagagcacaaaatcgcaccgttggacatgatcaacaagaactcaccttcgaagacagaaaagaaaattcgaaataacattctttatgcaataaaacgtttaaaggcgcgtcaggtcgcatctcccagattgtttagctacagcatcaactccagcattttttcacttgaaatggatgagctcatctatattcaaactgctcccggcgtctcagggacactggagcttcatgcagaaaatgaaattacaacctttcctggcaaccttaaggaactggcaaccaaatataccaacttgtgtcgatgccataagagtatcctgattaatcccgcacatgttatgcgtctggacatcacaaaccgattcgtttatatggacaatcaagataaacttgaggtcagtattcggagaatgggcgagttgcgcaacatcttaacaggcacacgagctttatcttaagaagagtgtgactgggcaatcatcctagatttctgttaatcaacacagctgaacgcacaaataacgcatcctcaatatcaaggatgcgttatttggttggtttatacaggttggaaatactattcctcctgaaaggttttatgccaatcaattaaaattactgcactaacgatgagcagtataaggactgctgaaggccaatcagtgtgatttgtgacaaagaaaagccctaaaagagccaaccatatgacagttctgataccaaatactaaacttccatcatctaaaatcgcggaaatcattcttttaacaaatttgcgatctttgaaaacaaacaaagttgccaaaaagataagccatgttgcgtaataaagattcacagtgctacccttcatcagctctacttcaaccaacgtgctatcgactgacccgtttgataaccagcgtcataaatcccctttaaaattcccggtgaaaagtaccaaaacgccattattaaaaccccaatggcaacaagcaacgacactttctgttggaatgataatcttgcaaattgatcgattacgctcacctcgtttacgagcagacttatttttacttctttcagtaatccattagtaacctgttctttatgttctcccgccttctaagaaaaaggcaatatactaatggccaactgcgtcaattgggaatatttctcccaaaaagatgttcgcggatgaagccgatgtcttaagaggtctatcatctgccagccgatcgcagttacaaatacgaatgtgaagaaaaatgccagaatcaaaagtatagaatatatcacaactgtcataagcaaagctccttgagtcttcctttaaatttacattgaagcggcaaattagcgagcacaggttcggagatactatacgttctgctaaggtcatcatacaagtaagaagtcacaaaaatgaagccattttacctatttaatattgtttccgaaaggccttttactgtcaggaagaaaaaacaatcgtgggttttgaaagctcatcttatttagcatcagttctgccatactcacgcgcaagatctcctgatttgtatttttgtttcaatacaaatcaggagacttttgcgttttttggctgatcgaacatagtgtaacaagattctgacactaaaaacagttcccaaatatcagtagtgtcacctaaaatctcatttgccgtcatgaacagccgatattgcattattatagcctggcagatggctgtgtcacaatagttgctgtctccttgagatgacaggcttcccactgacaataacactgccaccttaccaatactttgaaatcaaacaaagaaaatttgttatttagagcgtttacggtctttaacctttgaagatgtgacacttaatttagagaaaagaatcaaaacaatgaagattgaaagcatctctatgaacgcccggacgatgaaaaaatcaaaacccaagcaatcgacaatcagcttgtttaagacatcactgagcgaaaacccgccgaaacagatacaaacgataatccagaaagaagcttcattaagctatgtgcgcatagttttaagaatcgtcatcgtaccttcgctttgctcatcactaaatcatttatcgaccgatcagttttggctctgtctttttaagttagaccgttatattcgaaactagtttgcctacgtcgccgttataaaatggacaaccttttaggcatcatccattgacaacaggcccataccaaccagcatcgcaatcggagtttgatctgcaccaaatgaatcagtgagcctaaccataatcaagcgcactcaccgttttaggagtggcctctagtacccatatctgatattcgccagcgaagaaagctgctcgaatttgtcagattgttgcttggttaacaagatattgttttgcaacagggcattagagatttctagattcatgcggcttaaaataaatggaaccgctgcttgcttgtaaattaaggcctctctattgttccttagcactgtccgtaagcgatcactatgggaagaactgtcatcgaagtcgcgaagcagttcatcgataagctgtatcgcttgttcagcccgttcattcccaccagaaaaccatttcaatttcttcatctttcactccaaaaaagttgcgctagtgcaccttcacttgtaacacgtttggcgccgtgcattgccagatctgccgtagcaatgacagaaagaacatgctcgcccacagataaaaggcttgttctgggcagagatacttttacaacggcgacaacgcttaagaattaacgcaccgttattacgatcgttcccatccttgcttgactcccgccaccagctcatcagcatggctccacgcatctgttgccaggaatccaagaatagcagcgacagggattgcgagcggtccgataccgccggaaatcttactcaattcagcttcattcaacttagtcattaaaattacctccttgtatttgtaagaaactactcgccagttgatccaaaagtctttgttatggatattgtggcgataaaatgctcatctaccgcacaactttttgcaaatacaaccatggagtcatcagcggcatgcctggattaaagtcacttgaccttcaccatcgaaattctgctacttggtttgtacggcagcattacagcgtacagcttaggcattgaacggaacactcaaagtttaagcgtaggtaataaaccagatggcattcaaaatataagcacgtttaaaggctatctgatgctcactgtcgagatatttatcattccaaacgcgatagtgaccatcttttttacagcacgtatataccaaaacacctaatagatataccaagataaacgtagctaacattaaaagatttatcttattcatacgtttgcccgttcgagtgcctattcatcccggatactaattgccgttaagtttgtcaacaatctctttggcaggaccaatggctggcgcaaacatggcgccttcagcccaagaacgcgcggttgaaccaatggccttcccgataaaggtccacagattaccattatcgccaccagaaatacttgccaaatcagccgtgtttaaagtttttaaatgatccatgttcttcctcctttttcctttatgagcctttcaatctatctatcagcctaaattatcacttaagtcgccaccttaattggatgaacaatcggcagtttatacttaaatgccgattcgtaagctggcggatggcgttcgtttggtggatccacactgcaattggataaaggaacattcccaccgctcgtcaattcaagcatttttcccgagatttccttcaaagctagtcctgttcgcatggtcatcccattttcctcctttccctttgttagaaggacttcccttcttccccatcaatataaagtagacagccaggtttgtgggaatgaattttttaacgtcgatttttgcaagaaaatcgtcgtaaaaaacctaattttgacgtttatcgttaaaaacccggcgattatttgatattgccgccttctcttcaaaactcaagcaactgcaactgtatttacttttacccatgtctttttcgccactgtgagcatccagtcttaagccaacttagaaaggcgattaggctcgcggccagcatgtgcatccattcgccggggaaatgatgacaaactgcacacatataaccgacaataaatgttaataagcagcgccaaaatcttttttgattcacgcgctcttctgcttttcctcccgctcgcttaacagcattaacaacgtcatcaaaatcaacattggcgtcacaaaactcccatgattggtccacccaattgccgatgtgaccgtataaatggcaaaaataatggtagcgattatcaacccataatcgactagtttagtcagtcgcgtagacatcgtttttctccttaaactcgttctatcataattgatacatacagccagtttacgaatgcgacaatcgtgccagaaacttttcattgttttggccacggcgaaaaagtcgcagtgcaatcgccaggtaaatcccggcaataaggaatgcgtgaacaatcgtcatcgttatagcgttgggatcactaggcgcttctttcggatacggtccactaaccaaagtgataacaaaatcaatcaaaaagtggatcaatattggcataagcaacgatccgtaacgaatataaagtgctgcaaaaatagcccccatgccaaatgcctggatcacttgggcaattgttatcacaagcccttgagcaggcaaattactcaggtgagccaatgaaaaaacaagactgcttaaccctatgcaaaataagagttggtatttggcatggcgatgatgggcaacataaaacgcccgaatcaacccgccaagcatgacgccacgaaacaaatactcttcgggaacagcggcaatagtaccaatcacagctgcttgcaagacgtcaatcggtgttcgatttgtaaccgtgaaccaagcgataagtataaagagcagtccccaaatgataactggcttcaatcgtggtcgactaagtgtcacttttaagacgataacttgtttcagtaacagccaattaagtgcgatcatcaccagtaaaatgatggctttaaataagatattcccagcccagaagtccaatttcagcgtgtaaactgctggaattaaaagcagctggctgattagcacaaccaaaagcaagatatataaaacgcaaaatcctggcgacaatagcaaatgacgttttctttccatttatccaccttcactcgcacgtttcaatgcaacgcagcttcgatatcgctacccacaatataccgaggctgcgcatgttacggatcattaacttttaaacgtcgggttttcgccgataatcgttgtattttgaaacttgacaacgcgttaatcgtccccatttccgaaaaggtttgccaatggaggcgcacttgctgactatttactgactgccccacagttgcacgatcctgaaaatgccgtaagcaaaatcgcctcatccaataccaacgcgccaacgttagtcttgaatgaggcgatgaaaagttagatttcgatttttacgcttctgcggcttcagccaaatcagcaatgctcgtctgctttagcacttgcaccatagcatcttcggctcggtttagaacgttggtgcttgctgttaaccaactcgtgacgcgctcgccgttgacaaacgcggccggatcgatttcctgatgaagcttaaataacggcgccgtcccttcaattgccgttaagatctcataaactgtaatcgtttgtggcgttttggctaatcgcaaaccgccattgagaccggttttcgacgttaaaataccactttttttaagtgtggacgaaatttttttaatgctaggaaccggaatgtttagcatttcggaaatcttttgaatcgataaatagtcttcatgttgtgcttgggactttgcgttgacgtaggccgtgatttcaagtgcttgcgaaaatgcgactgaaaaagccatcgaatatacctcccattaaacgattgtgtatattctattataccaatgataccgttacttggcggctttttctgccggaataatgagcgtgacgacaagtatcaggccaacaatggtcatgccgacgccaatcaacattgcctgtccgaatacatccgcaatcttagttaagctgctagttgacgccgcaaagattgccagtcctaaagcgccgccaaattgtcgggcggtgttgtagacgcctgatgcagctcccgaaatttccggccgaattctagccaaacctgaagtagcgagtgtggcaaatgccagcgcgaatcctaccgcaaatccgagtgtcccaagtaacaaaaaccagtaattggcaaaccgtgatgccactgccagttcagccaatgaaagtagcaccgtgacaaatccgaagatcatgacctttgaattacgccaccgatcaacgaaggtccgggccttgactgccacaatgaagagtaagatggccattggcaccatgcctaatgcagtcataaatggcgttaatcctaagacgccttgcataaactgaggtgtgtagaaccaaaagccgattgcagcggcactaaacaacagagaactgacataagaagccatccgttccctatccgtaaagatttccagtggcattgtcgggtgggcaacgcgaccttgactagcaatgaatgcaacccaaagaactgctgaaatcagcaacgtggggattggccatggactgccatctaacccatatgagattgaagtcatcgctaatactgacaagatcgtaccaatccagtcaatctttccggtttggcgttttgcactaggtaaatatcttgccgcaataccaaccatgattaatgcgatcggaccattcatgtagaaaccgacccgccatgacgcaaacgttgcaaagaagccgccaatgactaaaccaaccgctgcaccggctccaatgacggaagcatagtagccgattgcccgctgtcgtgcttttccttgaaaggtgtctgttaacaaagccaaacagttcggtgcaagaatggccgcgcccacgccttgaacagcgcgaaagctaatcatgacaagcgcattggtagctgccccgactgccagactgccaactccgaaaatagctaaactcgcaatgaataatggtttgcgtccgtaaatatcgcctaatttaccgcctactagcatcagcccagcataagttagcgcataggccacctgcacccaagacaacgcgccagcattcaaatgcaattgtgccgccattttaacggtacccgtgtaaacaatcgatgtgtcaagcacacctagaaaagccccaatcagtgccagccctaaaataatgatttgagtcgctgacatgcgctgcgattgggtgattgccgcatctgtttcctcaatgacggtgtcgtcagccaggccatcattgattaattccttgtcttcttctttgctcatatgagatgcccctttctatggttcacttagtatattccgtttatactaatatggcaaatcttttttaagcaaaaaaaccacgtgttccttaattctatggaaacacgcggctacaagcgaattcttttcgggccggttactggaatcagaccatggcttgggcaacaactgtctaaataataaagtgcggcccgcctacctgactcaattcgccatgaatgtcattttccataaagtcttttaccgcctgccaccactgattggcctccgctgaaagtttcattccttgcaagccgattaatcgcgtaaaccgtgcgtatagtcgcgacaaggcgtaatctgcggctcgattcttgagcacattaggccgctttaaaatatctaaggcctcatctacaacttcctgtgcttctgtctccatcaggccaccactagccgcttgtttcagactcaggtttaatccggtcaaaataaacagaatctgatttcgttgcaccatattcatgagtgatcctccatgtctggtcgataagtgtttgcattaagatagcgttttcttgaattgctaactgcaatataccaaatttatcaagcttcaggtcaaactttcgataaacgtagccttttcgccgattaacgttattgcggacatgaatcgcccggtccaaagcgcatagaaaaagccgtggcgcattaaccacgactaatcggaagcgcgtatttcagcatagtcgtaaaaaggccgaaatgacacagttcatcagcatcgaacaagctcatatcccatgcggctaattaatgcccgccaccccagacaatcggaatagcaatcagcccagcagccagcgcctgatcgcgataacgcttggcattgacttgatctgctggcacatccgccttgatcgcattgaaaacggcgatcatctcggctggaatcgtgtgatgaatgagataatacttggaaatatcatgcgatagctgggtcacgactgcgacataagctgttttgtcctctgcatcttccagttgtttcgcgttggattcgattatttgctttaatttggcatcagctttcacggccggactgctataggctttactcaacatttcgaataacgcttgtttcttgtctgacatgacagtgcctcctaaaacgatagaccctgctaccattgtacagttgcatcaaggaatttttccagagtatgcacctgaacgagtcaaaaatcaagcgccatctattgccacctgaattaggaacgcaaccaaaaagggcgcctacaggaagtgcccctctgtcttgaccattacggcaaatcgttgccagccgcgaagtaaatgtcataccattcctgccgcgtcaaggtaatatcggcaccttctgcactttctttgatgtgttcaggattcattgaaccgagaataacctgaacgcccaccggatgccgcagtaaccacgcaacagcgatcgcatttttattcgtgtgataatgatcggcaactttttgcagctcgtcatttaatgctttgaacttgggactgtcaatgaaggtaccttcaaacatcccgtactggaacggcgaccatgcctgcagggtcatatgtttgcgttgcagatatggcagcaagctcccatcatgatcaacagaccggtcatcggccatgttggtatgcatgcccgcatcaaccatgccagtgtgggccacggagaactgaacttgatcaatcaaaagttgttgatgcaggttctcttgcaacagcgcaatttgttcaggattgaagttagaaaccccaaaatgccgcaccttaccgctttgctgcaattcatcaaaagcagccgccacatcatcaacttccatcaatggatccggacgatgcagtaaaaccgaatccagatagtcgatttgcaagcgctgcagaatgctatcaaccgctgacaataggtgttctttggaaaagtcataccgtttgccgaaaaccaagctgccgtgtgaacgttttggatctaccacaatcccgattttagactgaatatacaactggtcacggttaactttagcttgcttcaaagcctcgccaaaaacctcttccgacttacctttaccataaatatccgccgaatcgatgaaatcaatcccatcgtcataggcgctatccaaaaccgaagccgctttttccggagacaaaacattcatccgcataattcccaatgcaacactggaagctttccaattagaaccacctaattgcacttgtttcatgacagcaaaactcctttcttagtgagcgtgagccagcgcgcttaggggccggagtgtaagcggccttgggcgtgatggccgggctttggccattgcgaccaaggtccttacacgcaggcccctgcgctggcgaacgcgttatagcgtgagcgcgagccggcgcgcttagaagtcggagtgtaagtggcctcaggcgtgatggccgggctttggccattgcgactaaggtcctaacacgcagacttctgcgccggggagcgcgttatggtgagtgtgcgccggccacaacccccagcgcccacactccaatgccacctcaattctatcccctaaagcccacttaaggtcaagataatatgagaatttcaataaaacgacttgtcagctgcttttgagcgcgttaatttaaaggtgataacacttatttttaattagcagaaactatcaggagggttcaaaatgactgttaaagataaagtcgtcgtgattaccggcgcatcaagcggtattggcgctgcaaccacgcaggtattggcgcaagccggtgcaaagttagtgattggcgcgcggcgtgaggatcgccttgccaagttggcggaaccttttggaaacgatcagattcgttaccaagcaaccgacgtcacgaatcaagaccaagtcaaatccctagtcgacttagccattaagacatttggacacgttgacgttttgttcaataatgccggtcttatgccgctttcagaaatggctgagttgaaagttaatgagtgggaacggatggttgatgtgaatatcaagggcgtcctttatggtatcgccgccgttttaccgcatatgattgaacggcacagtgcccaaatcattacgactgattctgtggccggtcatatcgtgcatcccggaactgctgtctattccggcactaaatgggcaattcaggcaattatggacggtttgcgtcaggaacaggcagccaaccacattaaaacaaccatgatttccccgggcgctgtgaatactgagttgttcagtaccatcagtgatccgaagcgccgcgcagcagtagaagccgatgagaaaaataacggactcaccgctaccgatgtcgccaacgcggttttgtacgccattgatcaaccagacaatgtagcggttaacgaagtgctgttgcgtccggtcactcagcagcgttaaacgcgttgaatcttttcaaaggagtttatatgtctgattatacttttctaaaaccttttacattcaaaaatcagcccatcaccctgaagaaccgcattgtcattccgccgatgacgactcggctttcttttgaagatggtacggtcacgcaagacgaaattgaatattatcaaaagcgcgctggaggcgttggccttttcattaccggaaccgccaatgttaatccgcttgggaaggggtttgaaggcgagttaagtgtggccgatgatcggttcattcccggcctaagtcgtctggcaactgcgatgaaaacaggcggctctaaagcggttttgcagatttttagtgctggtcgtatgagcaatagcaagattttgcgcgggcagcaacccgtcagtgccagtgcggttgccgcgcctcgttctggttatgaaacgccgcgagccctcacaactgaagaaattaaagcaaccattcacgatttcggtcaggcagtgcgccgggcaatcgaagccggttttgacggcgtggagctgcacggcgctaacacctatctgattcagcaattctactccccgcattctaaccggcgaaccgacgaatggggcggcacacgagacaagcggatgcgtttccccttagccgtggtgcatgaagcggaaaaagtcattgccgaaactgccgatcgccccttcctgttgggctaccgtatttcaccggaagagttagaacagcccggcatcactttagacgacacattagcgctcattgatgctttaaaagccaccaaaatcgactacctgcacgtctcccagtctgacgtatggcggacatcattgcgtgatccggataatcctgccatcatcaatgacgttattcgcgatcatgtcgccggcgccttgccgatcattgtggttggcggcattaagacccctgaagaggccgaaaaagccgcggcagcatttgatctggttgctatcggccatgaaatgattcgcgagccacattgggtgcaaaaaattcttgcccacgacgaaaaggcgatccgctatcagatcgcccctgaagaccttgacgagttgggaattgcgccaactttcctcgattttatcgaaagtatttccggcggtgctaaaggcgttccgttaactaccgcaaccaatgacgaacattaaacccttaagttattggccaccgttttaaaatttaagttcttcatgtgagtcgagccgtaacagctcggcttttttgtgattgtaatcttcctgcgtgatggctccggtatctaacagatctttgtatgcttttagcctggcaatagtcgcctgctccgctgcttgggcttgagccgttttggctgcctgggctgcaatggcttgttggcgccgatagtagtacaaataagccgcaccgccaaggacaaggactgcgacaaagatataccaatattgtaccaacatggcaatgataaagatgatgatcaaaaacccgaagaatcccattttttgatttttcatgtcgctcgctccaatcgtgactttcgctattgaccagtggtgtctggctttaaattccagtcattttagccgggtcaacccaagcatcaaactccgcctcagtcacgtaaccggtttgaattgccgcatccttgagatccgttcccgtgcgttcagctagctgagcgatggcagcacttttttcatagccgatatgcggcgtaagggcagtcaccgtcattaaggaatgcgcaacgagtgcctgcatgcgcggggcattgacggtcaaatctgccaccagtttttgcgtgaagctggtaatcgtctgtgtcagtaacgtcgtcgattcaagaaacgtactgatgatcactggtttatagacattcagctcaaagttaccttgggaggcggcaacggtgatggtggtatcattgcccatcacccgtacagttgccatggtaagtgcctctgcttgcgttgggttcaccttcccaggcatgatcgagcttcccggttcattggctggaatccgcaattcaccgtaacctgctcgtggaccacttgccagaaaccgaatatcattggcaattttcaacagatcggcggctaatgtcttaatacccccgtgaacattgctgatttcagaatgggctgccaatgccgcaaatttatttgtttgggcggtcagtggcaagtgatagacatcactcaaacgcccggccacaatccgcccaaagtttggcgctgcgtttaatccggtaccaaccgccgtaccgccaatggccaagcgaaaaagtgccggttgcaattgttcaatcgccgttcgatcgtgcgctaacatcgcaatccaaccgctgacttcctggccaaaagttaacggtgtggcatcctgcaaatgtgtccgcccaattttaacggtatggtcatattgcttggctttcgtttgcaatgccgcgatcaagccatcaacagcagccagcaagtgattgacagcaatcgcggccgtaatgttcatcgcggtcggaaatgtatcgtttgaactttgactatggttaacatcgtcattaggtaaaatgggtaagtcaggattgagtttggctgcctgatgactgacaacctcattcacattcatgtttgtttgggtgccggatcctgtttggtaaacatgcagcggaaaatcagcttgtaatttttcatcaggcaaagccaataacgtgtctacagcccgcgtgatcagttggcctttgggagcaggcaaaatatcagctgccacattcgcccgcgccgccgcttttttgatttgcagcagcgctttgatgagcggcaacggcataagcggtccggcttgaaaattatgacggctgcgttcagtctgcggtccccataaagccgtttccggaatttcaaccggtcccaaagtatctgattcaatccgtgtattcgtcgtcatcgctacctccatcttaatcacatgtgctgcgattgcttgttaatgatagtcctattttacacgatcgcactgccaagcaaaccaaaagcataaaaaaacagccttagcacctaatgatcgctaaggccgataccccaaacgctacaccttgtcgatgcagtcttgagatcaaagttcagtaaagcattgccgcaaccagccgtgccgcttctttttgaaattgaagcgatgaagatgataaagccgctaaatattggtgaatcggatcggcttgcggggtgggtaggccagcgtgcagccagccgctaatcaatgccggatcaattgaccaagcctgaacgttaaccagtcgctgacgggtgtctggtaccgttgttttcatccttgcttcggctttggtcaaccggtgataagttgctggcgaaacagcatacatcaagggttgttcactgccaaaagtatcagtttgcagcataactgccccttccgtattcaatggaaagtttttatgggcaagactgctgcgctttaatagctcgctaaaggatttaacatcataggttcgactcacttgaaccggggaggccatcatcccgttgaactgtttaaaaatctgccatggcgtctgcgttaattgataggacttatcccctggttgcgcacaatccaaggcgccattcagttcaagctcccgccgtgcttttttcaatttaccccgatgctctacccctgcaatttgtccatagcgctcaaaaaatggtcgaccaccacgaaatattttccgcttcttggtgttactctcagaatccagccgatccgcatacatgagtccgatcagcaaatcagtcgcatgctgcgataatccggtcgctgtttcagttggtacagcttgagtcataacctcacttaaatgtgccatctcatccccactttcatcgctgatgaccgtcacgcgtttgctggagcagaagtctgcgtgtaaggaccttaagcgcaatggccaaagcccagccatcacgcttaaggccgcttatgttctggcttatgcccataacgcactccccggcgcagaagtctgcgtgtaaggaccttaagcgcaatggccaagtgcgggccatcacgcttaaggccacttatgttctggcttatgcccataacgcgctccccggcgcagggatctgcgtgtaaggacctcaggcgcaatggccaaacctgggccatcacgcttaaggccgcttatgttctggcttacgcccataacgcgctccccggcgcagaagtctgcgtgtaaggaccttaagcgcaatggccaaagaccggccatcacgcccaaggccacttacactccgatccctaaccgcgccggctcgcgcttacaaaaaagtcgccttgatcatgttgagctgatcaaagcggcttttttaacatatacaacaatggccaacaattatcttacttgttttggcgtaccttagattgctcattttccaatccaagaattgcgaataaccacggatcgtagccttctgactcctcgatcccatcgcaactcatcaccaaagacgcgacaagactattgtacgtcatcatttgctttcgcctcttcttcatcggctacagcttcaagatgagcttcataacgcttattacctttatacagatcccaaattgtccatgccaagagggccaaaacagctgcaatcagaacgtaagcgatcatattagcaatgttggtttgtgcggccgttggattatcaccgaagaatccggcgattgaatctggcagacctttcaggttcagataagttaaaccgataacggaaacccaaccgagcactttaacccagccagtgttcttgaaccgatcgcccatttcaaccttactattcgtaaacattagcagcggtaacattgagaatggcaacgcgaaggccaagaagacctgtgagttgttcattaatgtattgagcgcctcatgttgctgaatcggcgtttcccgagcagtcaacataacgcagacgataaccgggataacggagataacacgagtaaccaagcgccgcgcccacagcggcatcttcatatgaatgaagccttccatgataacctgccctgttaacgtacctgtaatggttgagttttgacctgatgccaacaacgcaaccgcaaataggatggataaaataccggacttggcaaccgcaatcaaaacaccgttactcagtgtggaagaatcagacaatgcctggaacaaaccgaagaaggaaggatctttaactgcaccgctcttgaagaccgcaacccccataacgagtagcaagcagttaacaacaaaggcaaaagtcaactgaatgttggagtcccatgctgaaaacttaacggcttgagcaacatcttccggatctttatgatcaattttacgagtttgagaaatcgcactatgcagatacaggttatgtggcataaccgtcgccccgatgattcccaaagccccttgaattggactcataccgttgactgacggtgaacttgcaaatgtttcgccagttggaatgaagcctttaagcaaagcccccatattaggatccgacaaagcaacttgataaacgaagaccagtaaaatgacaagaataagagcaacaacaatagcttcgatttttcggaacccaatcttggtcaacaacagtaataccagaacatcgaggaccgtgaccagcaccgcaataacaagtggaatatggaacagaagataaagcgcaatagcggcaccgataacttcggcaatatcagtcgccataatcgctaactcagtcaaaatccacaagacaatcccaagcttcttcgacgttcttgcacgaatcgcttgggcaagatccatttgactcacaatgccaagtttagctgccatgtactgcaacagcatcgcaatcaaacttgacattagaataacggaaatcagtaagtactggaagttttgaccaccggtgatggacgtggaccaattccctggatccatgtaaccaacggcaaccaatgctcctggtccggaataagcaaatagcgttcgccaaaagcctttcccgtgtggcacctcaactgtaccgttaatttcttccaatgacggcccgttcgcgtattgaatgagcttcatggaatgtttcttcttgtgatcatcactcacaatatgtctcccctttcatcttgaaaaaagttaagtccctggggaacaaggccttttaggtttccctaacttaatcctttcttaggatatgccttgaagctgatatcgtcaactattttatgaaaattaattgtattttcagtgactaatttgtaaagtgtccattgtttcaaaatgcctaagcagtgcccgattcacggcaatagctaatcacgcttacagccgattgctttcagaaaaccgtttcaaagcattaggtcatcataatcccgatataaaagataaacgcttttttagctcgcattaaattgaaatcgcaaattgattgcaaccggtttaggcataccatatgataaagatagtaccaaaaaatttatatcacgaaatgaggaatcacttatggaagaagttcccgactcgcaaccgccagcaacagcgcacagtatcaaggatctgcagcaaatgttgcaggtcccgtcccttgaccacggtctctctaaaacagaggccgctaaacgcttagaagccaatggcccgaatgccatcgaatcgcatccaacgccaaagtggctgatctttctgcggcagttcaacaatttaatcatttatatcctgatcattgccgcaatcctaaccaccgtcattggcgatgtcactgatacctcggttattgttttagtgattatcgtcaatgcgattattggatactatcaggaaagcaacgccagcgattcacttgaaaaaatcaaaaaaatgctggcccctgaagcaactgtttatcgtgacggtgagcgtcttgatattcccagtgccgatttggttgtcggcgatgttgtttttctggaggccggcgataatgttccctccgatttacgcctcgttgatattgacaacttaacgattcaagaagctgtcctgaccggggaagcaaattcggtcatcaaaacgactgatatcctgccagcagacacaccacttgccgatcaaagcaatatggcgtttgcctcgacagcggttgcaggcggaagtggtattggcatcgtggttgcaaccggccacgatactgagttcggtaagatttcccaggcggtttcggacgtacgtaaaggccgctcgccgatgatgcgcgaaattgacggtatcggtaaaggaatttcgtacgccattatcgcagcagcggtcttactatttatcttcggcatgatcatcggtaaatacagtctgcctgtcttagcccttgccatcgtcaccatggtcgttggctcaatgccagaaggtctgccagccaccacatccgttatcttggcaatgggtgtttccaatatggcaaagaaacaacacgtcattgtcaaaaccttgccagctgcggaaactttaggctcagtcgatgttatctgtaccgacaaaaccggtacgctaaccaaaaacgagatgaccattaccaccgtcatcacccctcaggccacttatcaggtaagcggctcaggctacacccctaaagggcagttcacccttgccggaaaaaccatcgaaccggctaaccatccggatttaaccgctttgctaaccgctggatttgaagccaatgacactgaattgcaccaagaagacggccgctatgtcatcaacggtgaacctactgatggtgctttcctcactgcctactacaaagccttcaaggacgaacccgctaacaccgaacgcgacttgatgccatttgattccaacaatcgttacatggccaaattagcaaaatgcgcggatggccacacctgtctgtttgtaaaaggttctccggataagttgttaccgcttgttgcggcggctcatcccgactttgatcagtcccactatttaatgttaacgagtcagttcagtacggaagggcaacgcgtcattgccgttgcccagaaaatcgttccggatgacactagcgaaatcacgccagcattattaaagcaagggctcgattttctaggactcaccgcgattattgatccgccacgcgagtcagtgatttcggcgatcaagcaaatgcggcgcgccggtgtcaaagtcaaaatgatcaccggcgatcaccccgagacggctcttgccatcgccaaaaagctaggcatggccgattcgcctacagccgtcaccggcacgcaactagcagcactgccggaagaaaagcaacgccagatgatcctcaatgccgacgtctttgcccggaccacaccaaaagacaaactgacgattgtctctgtcttacaagatgccggcaacgtcaccgccatggtcggcgatggcgtcaatgatgcaccagcacttaaaaagtccgacgtcggagttgccatgggtcaatccgggaccgatgttgccaaagatgcagccgacatggtgctgaccgatgaccgctttgcccgcatggaaacggccatcgctcaaggacgccgcatttaccaaaacatcaaaaaaagcattttgttcctattaccgacctcttttgccgaaggactggttatcgtattcaccatcctgacccaacaagcgatgccattacgtgccagtcagctgttgtggattaacatggtcagcgccatcaccattcaattcgccttcatcttcgaacctgccgaagccggcacgatggagcgcccaccacgtaagaaaaatgcgtcaatgatgcacaaacatgatgtctttcaaattgcttatgtagccatgatgatcgccggtatcgggttgtgggcgttcgattggttgacagccaaccacttaacagaccgcgtcaccgcaagcaccatgatggtgaacatgattgtcttaggaaaaatcttctatctctttaacatccgtacaaacacactggcactttcaaaaaatctctttagtaatcccatggcgtttgcgattatcggcatcatgcttgcactgcaatgtttcctgacctatgtaccttttatgcaggaaatcttccaaactgcttcgatgtcgtggcgtgaatggggcattgctgttctagccggttctgtgattttgatcgtgactgaaatcgacaaaatcatccgcctgcgctggcaacggcttcacggccacgatgcgtttcaatccaccacaaaaatcagtaaataatgtttggacagcctaaactttttcttttcttttggcattaacaatggtaagactataagtaaggtttccctaacaaaccttatgcgtatacaaaaagtccgataaactggttcatcatccaccagtttatcgggctttttgggctttcgaaggcgatctctgaattaatgttccgtgatgctgtgccgattatttcgccttaaaatatttcaggcaatcctaaaatttctcttttaaataagccgacaactggtatactggaagtgaaaagaagaggagctgatcgttttgaaattgtatcaaggtctcacacaagtccaaattaatgaagaatttgccggcgaagcaaatggctataagattaccaccacccttgagaaaccgctgaactacgagccggcaatcttgtatcagtacttggatgccgtcttaaaaccgggcagtcgtcatgaccaaaataatttgcgttatgtcaccgaccccggattcatcggtgaaaattacgattatcaaagtgttcctttcacctcacatatgactgatttcgatgagaaaatggcttttgcacgcaaactggttgccgacctcaaccgtcatttgtcagtcaatgtcaaaccggctgattccgaaattgaactgattttcgttgactgagcaaccgcgttacctcctttcctagtcgcgatgctgctcctctcccgatcagttgcggctaagtcatccagtcaagcagcttagttgcagcaaaacgccgcctatccgaagaaaagataggcggcgttttggtgtcgctggaattactaaaacccctgccgttacactgttgacactatttatttttgggtaatgatgaataatctgatcaaacgacagcctgcaattcttttcggttcttctatgagaattacttgcaaaatacataaaaaagcgagccattgttgtgacgttttcacccaatgacccgttcttttaatgcttttgttcaaccgcttttggcaatgtcaaggccagcaatagcccaactaagcccacgccggcaaagacagcaaaggtaactgcaaagccgccagcgtggctatttaacgtcacctgcatgttgtccaacaatactgtcgcaaacatcacgccggctgagccaaataactgtcgggccgttgtggtaaccgcggttccatcggccaccagttcatttggcaaggcattcgcgccagccgtcacagaaggcatcatcacaaaggcattccctgcttctgttgccatcgctaacacaatcgcacctagcaacggcagatgacgagcaaaaatcgccagtaaaccaaaaccgcctgtgatcagaaccatcccgatcatcgcgaccagccgcggaccaaagcgatcaagcaagcgtccactaaccggattaagtaaactcagtaagacggctgctggcacaagtgacaggccggaaactaacggcgaaagtcctagcaaggtttgaaaatacaacggcatcagaatcgtcgtaacaatcaagccgatgtaagaaataccggttaagaagactgccttggtaaacatgccagttgcaaaaacccgcatttgcagcatcggtggttggcgattcaactgccgaatcacaaagataccgcctgccaagactccgacgatcaacaaactaatcaccccaacgcgcaggccttgttttgaccacgcacttaaggcatatagcaaaatcggaaagctcgccgacaagataaacgaaacccagtctaaccgggtctgttccagcggcatcaccgaggcaatcgtgacagtcgaaactgccagtacaagcactgaaacaattaggaagaataggaataacgcttgccatggaaaccacgtcaacaagacccctgaaataatcgggcccaccgccagcgccgatcccattaccaagccggctgttcccatcactttaccgcgttcactgtgcggcgtaatcgtcagcagcactgtctggaaactagggaaaataatcccgacggcaaccgcctcaagtaaccgaccaatcatcaaaaccgcaaagcttggcgcccagatacataaagccgtcccaactgcaaaaatcagctcaattgcctgaaaaagccgctgaaacgggacattatgcaacagccacggactcaccggaatcatcagcgtcatgaccagcataaatcccgtcgtcagccacgcgaccgtatccgcgcccaaaccaaatgccttcataaaagccggataggccgtactcaaagaagattgcgaaattgacatcgaaaacgttcctgtcagcaaagttgcgacaaaagcgccgcgatgtttaatcgttgtaccattcataacatcatcgatttctatttgatttttggtgcctcacattttcatacccattttttcatacgactgcataccgcccatccataattcagatggtttgaccccacgttccttcgctaaggctgtcatcaatgtatccatgtccatcaatttgtattcctgtttaggttttgtcggatcaaacgtttcgatttgcgccatcataccaccgtcttcatgttcaataatatgacagtgatacatgtaaacccctggcaaatcaaagcgcactaacaaccgaactgtttcacccggattaacaccaaccgtatccttaaatccgtgctcgtttggatatggcgcatgcccgttacgggacaaaatcaaaaattgcgtgccgtgcacatgaaacggatgaaccatcccgggcgcagcattactgttggtaacatcccaatactgagctttgccaatcggttgagtcgcatcaattcgctgcatggcaaactttttaccgtcaatcgcgacactttcatccattccttgcatcaccacatggcgaactggcaaagcaggatcaactgcaggtgctttcaccgtaaagagcttgtccggcaattgcgtgtgatccggcttgaaagtatgaatccgaaacttcaacaaaggcacattatcggtgtaaagcgtgaccacatcgccttcatgatactgaccaaaatcgacaatgacttctgcccgttcagcacacgtcagcatcaaatgcgtcaaggccaccggttccggcaacaacgaaccatcaccgccgatttgggtaaacggcaaatcatcggaaaaatgcagccgccactcccggcgattagcgccatctaaaaaccgtaaccgaactttctgggtggtcacatcgaaataaggattaatggtgccattaatcatcgcggtcggaccagcaacgccatccggatcataatcagcccgataattccactgattctgctcatgaaaccggcgatcctgcaaaatcaccggaatgtcgtcaactccgtaattgcgtggtaatggcaagctttcttcatgctgatccttaacaatgaccattgccgccaagccatgccagacctgttcggcagttgaaggacacgggtgggcatgcagccacaatgttgccgccggttgatccaaggtgaaatcaatttgcttactttcgcccggataaaccggcgcatggcacccaccatccacataagggccacttacattagcgccatgccaatggaaagttgtcagttcaggcaaggtgtttttcagtgtcacatgaacatgctggccgcggcgatagacaatcgtttgcccaagcaagctagcattataaccccatgtttttgtctttgcgccgggaagcaactgtgtctcccctgcttgtgccgtgacggtgtaatacacatcggttgccgtttctttatcaggttttagcaacggcggcacatttaagggtttggctggcgcatcgcttacttcaagtggcacataaccgccatcatgcaagtcaaacgccggctcatcaaagaaatagtcggtataggttttcatcatcgttcccccctcgcttcaaattctagcactttttagggttgccataaacgtaatttggaattaatctaaagtaggtgcttcgtaaaaagaagggaggaagatgaaaatgatgtcaaaatccatgggctggttgatgttggcactgaatgttgtgttactggtattaattgccaccatgcataacatggctgccatgtggctgatgggcattatcatgtcacttgatgcaatctcgggattggtaaatgcgtatcaagctgaccatgaaacgcatcaccatgccacgcagcattgatctttaagcagacttgatgctgattgtctggctacctcacctttattttatgttgacattaacatatgtttgcaatatcatatgttagcaaataaataaagagtgaggcagcaagatgaaaccatttgtcatcgccaaaaacgctgatatgacaaccgccattcgagttgaatatttttctactggctggatggcgtttgaatttttgatcggcttctggtcaggatttcaagcagggtcaattctgttaattgcgtttgggctggatagttttctggaaattatttccggtgccactttaatctggcgactgaaaaaagaaagtaacggtgcaagtgcttcggcggtcgcccgtgcagaacaacgctcaagtcttgtggtcggctgtgtgctgttgctgctgagcttatacgtcatcggggtttcaggtttcaatcttgtgacgcacgcagccgctgaaagtagtatgagcggtatcggcattgccatcgcgtctattattgtgatgccatttttgacacttagaaaacgtcatcttggtcacaagcttaattctccagcacttatcgaagacggcatgtgcaatatcacctgtgcctacatggcggctactgttttgatcggtagcttgttaacttggctatttaattggtggtgggccgattcggttgcagcgttgattttagtttattttgttgccagtgaaggctgggaagcactgcaaaccggcttgagccacagcgaaaacgaggaataaatctttccggaaaaatgaccttagagcaaagcgccttgaatgaaaagacgtcttgctttaaggtcatttgtatcactttgattgttattcgttcatcaatggaaaagaggaacccgttaatgactgctacgacgctaaggttggttgaatcggccaagcttgccgaagctgagcgtattttcaaactgctcagtaatccgactcgattgcagatgctgaaattactcgaacaacaagtgctcaacgtcagcaagcttagtgaattattgggcgttgagcaatccgttgtctcccaccagttagcgctcttacgcaagcaccaactcgttagtgcaaaacgtgtcggcaaagctaattattatcaactcgatgacccccacattattgcggtcattgatgccatgctcgcccacgcagatcatgtcgcccgaggtaagcaacacggtcaatgactcattttcgagaaaaaaacaaggtatattcctttacacttcaatgtgtatcaggatataccttgtttctttttcatactgatccttaaagctaacctgccaatccatcgtgaatcttatcaaggttccatttcatcatcgtataatacgtatcgccttgagtacccttagccgccagcgagtccgtgaaaatcttcgagtaaatcgacaacccggtctctttggccactttattcatggacttcggtgagaccgaggtttccacgaatagatgtttcacttcggatgcacgaatcttagctagaaccgtctgcatttgttctggtgttccttgagattcggtgttgatttcccaaatgtatgccggggtcacatgataagccttggaaaagtacttaaaggccccttctgacgtcactaacacgcgttgcttttccggaatatcgaggaagcgtgacagcgcggtttcatgtagtttttgcaacttggcaacgtaacgatcgctattcttctggtaataagcagcgtttttggcatctttttgtttaagcaccttggtaatcgtcttaacatactggatgccgttagctaagtctagccaagcatgcggatcctgttccttggtgttcgttgttaagtgttgggcggtcacgcctttacttgcagcgaaaacatccttatcaaattccttgtgcgacgtcttaaccaacttcttaaaccagccattcccaccggtttcaaggttcaaaccattatgaaacacaacatcggcttcactggttgccgccacatcggttgggcgcggttcatactcatgcggatccgtgccgcgtttaacaatactgtacagcttgatccgctcgccgccgacattttgaaccatatcctccaaaatcgaattggttgtgaccacccgcaacgtttgattcgtgcttgctgaatctttttgagccgtgctccgactgttgatgaaccaaaagacaccgccaatcatcacaattaaggcgcccaccgtaattaaaatcttcttcatcgaataacttcctccgcggtttgagtcgtcgcggctgttttggtccgctgacgcttactgaaactaaagaatgcctgttttggtgaaaagacgaacgagatggcgaacaataccgccgctacgagcacaattgccggaccggatgcccagttaaaggtgaagctgaaatacaacccggtgatagacgaaatgaccccgacgcttgctgccatcacgagcatggtttcaagccgatccgtccataagaaagcagtggcagcaggcgtgatcagcatagcaacgaccaaaatgatccccaccgtctgcaaggccgaaacagttaccaaggttaaaaccagcatcaacgcgtaatgaatcgcagtggtattcaacccataagttttagcaaaggtattatcaaacgatgtgatcaacaattccttatagaacaacaccacgaataaaatgacaatccctaacacaaccgcggtggtcataatatcactatcgctgaccgccaaaatattaccaaacagaatatgatgcaagttcgtagcgctttctgccatcgaaatcaaaatgaatccgagcgcataaaacgcactgaacaccacgccgatggaggtatcggttttgatcttactatttgccgcaacaaaaccgatcaacagcgcggcgataatgccaaacaccgaagccccaatcatgacgttgacacccagcatataagcaacggcaacgcccggaagcaccgcatgggaaattgcatcccccatcaacgacatgccgcgcaaaataatgaagctaccaatcaaaccggacatgatccctaccatgatggcagtaattaacgcactttggaggaaatcatattttcctaacgcggtgaaaaattcagctaatgaactcatacgctcgccccttccttggttgcaaacagcacgttggaaagatcggccgaaaatgcccgttcgatattttgagccgtatacacttcttcgaccggtccttcagcaataatgccgtggttcatcaccacaagttcatcaaaataatttgaaactttatttaaatcgtgatgaacgacaatcagtgtttttccggcatcgcgccactgattcaaaatggccatgatttcctgctcgctcttcatgtcaataccgacaaatggctcgtccaggatcatgatgtcagcctgctgcacaatggcacgcgccacaaacacgcgctgtagctggccgcctgatagctgactgatctggcgtttggtgaaatccgccaacccgacttgttccagcgcttcaagtgccgcctgacgctcttttttaccggggctcttcaacaaccccagacgtccataggtgccagtcagcacaagatctaacacgttaattggaaaagtcagatccaaatccttgcgctgctcgacataagcaatcgcttgttgcacttccttgagggtgtggccggaaaagtcgaccttccctgattgaaccttgatcaaacctagaatagctttgatcaaggtcgatttacctgctccgttaggcccaatgatcccggtgatcttacctgcgttaaaatgaacggcaacatcagcaaacaccggtgtgtcagcgtaggcaacggtcaggttcttgactgttaacataagaacctccaattttagggtgacctaattcgctttcaccctaagcttacagaaaagaagagagactggcaagtgttttttaaggcatacttaaaatttttatacgcggtacattttggccaccaacgctttatcgtgtccgtctcaagtcatagttataaatcccgataaatcaaaaatgtaatcgcatgcagttattggaacttatttgagactataaaaagacctatgagtaatttcattaattactcataggcctttgtttatcttcccgttatttaagttacaaatcagtcgcaactttttaaaaggccggttgttattttttctgcgtacgtattaccaactggctttacgaacaccgggaatctggcctttgtgtgccaactcgcgaaaattaagtcgcgagatgccaaatttacgcatatacgcgtgcggacgaccatctaaagcgtcgcgatgatgtaatcgtactgggctggagtcacgtggcaacttgctgagtccgatataatcgccttttgctttcagttctgcgcgttttgctgcatattgttgaactaacttctcttgccgttttgccttggcaatttttgactttttggccataagcttcctctttctataaaatgtgacgagccatctcattaaccaacctattttccgacaccgacaataggcgtatacgaacgcttatctggatttttgctgcttgcgcttcgtatcgtgtagaatttttaatgctcgtttgcgcgttttaatgttgggactcttcatccggcgccgcgcacttgctaaatccgttttttccaaaatttccctctccctttaaatcgtaatcattacgcttaatgacgaatttaaccgtatcatgcagctgttttgactgtcaataactttttcaggacgaacgcttctttgacccaattcaaaaaaagacttgtcaagccggtttttttgctttagagtttaaatcgtaatgattacgttttggaaggaagcgggtatttatgatgaagcgattacttgcaggtatcagtgtcgcactcttagcagtttttgcagtcgcgtgtggcaataatggtgccgcaaagcaatccagcgctagcaacgataaaattcaggtagtggctagcgtcgatttttatggtgaggttgccaaagcagttggcggtgataaggtcgcggtgcagtcggtgattaacaatccggctgttgatccgcatgattatgagccaaccaccaaagtcggcaaagcagttgcaacatccgatttcgtcattgccagtggcatcggctatgacggctggatggacaaagtcgttaaatcggaaaacaaatcgaaaagctacttaagagttgccgatgatctgatgaacaaaaaggaaggcgacaacgaacatatctggtatgatccgcggacaatgccaaaactggcaaatgcgctggcggataaatttgccaaaaaagacccggccaataaagccaagttcaaagccaacgcaaagaaatacatcgcttcattagatgacctcaatgcacttgttaataaactcaaatcaaacgcaaacggtcaacttgttgacgtctcggaaccagtcttcggttatgccttagattacctaggctacaagatcaacgacgcccacttttctaactcaaccgaagaaggtaccgattacagcgccaaggatattcatggtattgaaaccgacatcaaggaaaagaaaatcgcctttttcgttaacaacattcaagcgacatctaaaacagtttcacgccttgttaaacttgccaagcaaaataacgtgccagttttgaatgtcaccgaaacacttcctaaaggcaaaaactatcgcacatggatgatgagccaataccaacaactcgaaaagatccaaaatcaagcaacaacaagcagtaagtaatcaaactcgtctgaccacaagggtttgttacacttccctttacttcggtatcactcaccctgtaccgaaaaaatccatcaatggtttagcattgatgacccaacaaaccataagttcgagtcaaaagcatcgaacagtctggtcaggaaaagtccgcaaattgcggactttttttagtgagcgcgacccggcgcggttagagaccggagtgtaagtggccccaggcgttttaaatcggaagtgttacactagagccggcacaagaaaggaagatgagtatggcaaatgtgatgattctaggagcacacggccaaattgcgaccttggtgcgccaccgcttgctaaaagaaactcagcatcatctcaacttgtttttacgccatgccaagcgcatcactgatgttgaccgccaacgagaaacggtttacgacggtgatgtcactgatacggacaaactgacaaaagcaatgagcggtagtgatcttgtttacgccaacttagggaactcagggattgaggatcaagccaagtcggtcgtcaaagcgatggatgccaatcacatcaaacgcttaatttggatttcaacacttggtatttacgatgaagtgccaggtgcatttggtcgctggaaccataagatgttagacggcggttaccttgaaacctatgctgcagcggctaaagtcatcgaaaattccgacttagcctacaccattattcgccctgcttggctatccaataaagccattgtaagttatgaactcacgcaaaaaggggaacccttcaaaggcacagaagtctcccgaagtagtattgctgatctggttgttaacttaatcaatcatccgcatcaacacatcggtgaatcgcttggcgttgaccagccgcatacgcaaggcgataaaccttccttctattaatcttagcgtgaagtttttccaccacaaaaaaatttcatcttcattagcgtgaccgctctacaaaaagcatcaccggcacatgaggatgaaatttttttactagtcaaaccgttttggcagttcgacgctatttactactttcagttgtgacagcttgttgattgttggcaaaattgcgaattgattggggaatttgatcgccaaaatacttttcaccgacactcacggcctgtttgaagaagccttgaccgttagcctgataagttttcgcatcattatttattgcgctggttaagagttcgctgccaagcttattgtaatcagtcaaggctttggttaaaccgtcctctgttttattgtttgctaattcgaggcgaatatcatccaattgcccaagcccttttttggctgtcttgctaatttccttactatcactttgcaacgatacttttgtcatcgttttcatgacaatatcagaaatgcgcgtgtaccgcttttgcaggtcgtttttggtatagtgatttgttttaatcatcgttgaccccgcatcctgtgacgatttagacgccttggactgacaaccggtggccccgaccattgtcaaacagattacggtgatcaatagccattttcgcaacacaattccccctcgatcaaactgttcacaaccattcttcattaagttcattcaaccacaggcgtgatacagcgtcaaacaagtcaccgcaaatgacaaatatgattgcagatgcttttggataaaaagttcaccatgacttcatgaccatcaaaaatagtcccagaactaccggcatcatgttttcaatatttttcaatcttatacaaatggatatattatgccagattagcgtttcctacgattagtcatcaatatggcatcttttagcttgcgtcaatatcgccagtacgctacgcttaaacgcgtcatcattacggttaaacgaggagattcagttatgttaaaacggttattaacagtcatcagtctgctactactaacaacagttgttaccgcatgcaatacgaataccaaatcatcaggaaatcatgaaaagatccaagtcgtcgcaaccgttgatttttatggcgaagttgccaaagcggttggcggcaagcaagtacaagtcacgtccattatcgacaatcctgccattgatccgcatgactatgaaccaaccacccaagtcggcaaacaagtggccacagctgatttaatcatcgctaacggcatcggttatgatggctggatggataagctgatcaagtcggaaaacaaatccaaacagtatttacgcgttgctgatgatctgatggctaaacatgaaggcgataatgaacacatctggtatgatccacgcaccatgcctaaacttgccaatgcgttagccagcaaatttgccaaagaaaagccggcaaaaaaggcgatttttaaagccaatgccaagaaatacatcgcctcgcttaactccctcaatgccttaattaccaagctcaagcaaaatgctcatggtcaaaaagtcgatgtgtccgaacccgtcttcggctatgccctcaattatctgggctacaaagtcaacaaccgtcattttgcccaggcaactgaagaaggtactgattacagcgccaaagatatccatgcgattgaaaccgacatcaaagaaaagaaaatcgccttcttcgtcaacaatagccaagccagttcaaaaaccatcgatagtttcattaagctagccaaggaaaacaaggtacctgttctgaacgtcaccgagacactgcctaaaggaaaaaactaccgcacttggatgactgatcaatatcgacaactggaaaaaatccaaaatcagacggacactaagtaaccttcttgaccgcaaaacctacgagtagcatgcgtttaaaacatgatagtttgtgaagccatgtgacatatgaaacattttcgtaaactttttgaaatgaattcgttttcataccccttataccaattgaatttttgaccggttgaactacaatagagttgtaaacaggagcaaccaaaggggagatgttttaaatgtcattgttcaaacatacttttaaacgcgttgagcacttgatcgccgcaccacgcgatccccacgaagaagaacaagcacgcttgcaggaggacttgttctatacaaacctcagtagcctccaaccaaaaacaaatgcaagattttgattgatggttactataccaaaagccgtctcatctgcaggtgaggcggctttttatgtgtccagaaaccaactgtcttccctaagataatccgatcatcatactgcaaagtacccagcaatttttctgacctttcttcttcactataaatttgggcgagccttccatcattcttgacgttatttttccaaaaaatagccagctcgctaataaaaatgcaaactgactacttaaggccatcgataaacttagtgctgtgaccttttttatattttaaatggcgactagacgctgagcaaccactcccacagcgattgaaccctctgtctaggtgttttttcatcgccagtctgcctcacatttggatgaaaggaataacgagacccccacgatccgttgattcctggtttccttacgactgacctatatgaaagaatccagcacctttttgaagaccataaacctgaaataatatcggctttcggtctgctcatgctgcgccgatttctccgatgtgtctacccttatctctaactaccaaaaccttgcaatagcactctcacaagcgagagtataaaagccattttttcatcataattgtctcgcctgctaatcatcccacatgtttagcaggctaatatcaattactttgcatgacgcgctttacgaacgccagcgaacccaagagcagcgatgatagcggcaccggcttcggctaaaagaagacccgtttgcccttcacctgtagctggataagcgtgcttgccattcttctggaccatccgactcataggttgtggattggttgactgagtggttcctagtggtgccacggcagcacttgaagttgaggagccggaagtgcttgatgatgctgtggcacctgcacttgaggctgatgaacttgaggcactagaagatgctgaactgcctgtacttgaggccgatgagctggacgcgcttgaggaagcagaactgcctatacttgaggctgacgaactcgaagcgctggaagatgctgagctgcccgcacttgcagcagcttatgtagcagccgctgaacttgaacccgctttggccgtattctgcactgctgccgagctagctaccgtattatcagctcttcctgttgcggttgcccctgcactgactgaggagttgctacttttgatgcccgcgattcattttgctgactttgcagggctacaggtgccttttgacttgcatttccatttttagaaagcgttacattggcaacgcctaaagttgtcctgccaaaaagtacgacaaacgctgaagcaacaacccattgactaccgcgcttgtacattttcttcttgtcattgacgacatgttctttgaagcggttatataaacatatttactcctccaatagcatcaatattgtatctgctaaagcttggtacaaaacttattatatttttgaattaggagtattatgcctatgcaatacggcgcttcttgagatgactcgtcaagcaaagtattttacaacctttttgatagtttcatataagtaatgaaacccttaaccccgctaccatcgccaccacccccagcaacacactccccaaaaaatacccaacaaacacgcgccactgccgattacgaatcaaaataaacgcgtctgccataaacgttgaaaaagttgtaaagccaccgcaaaatccagtcagcaacaacacccgaaaagcagaaaacgcgggcaagccagctaaaaatcccgccaaaaatgccccaagcacattaatcatcattgtggcaaccggttttccgggccacagcatccgccctaacaccgtcagcaaataccgacaaacagctcccacaccagcaccaattccgaccaaaattaccatgagcttttatcctttcgtggtagccattttgcaacaaagaatccgccagctgctgccagcagtccgccgataagatttaagcttagcaacacgaacgcatagaccgcatgcgttgccaccaaattaacaaagtccagcataagcgtcgaaaaggtcgtaaacccaccgattacccctgttccaatgcctaacaacagccactctggcaagtcaaatctcatgtctagcccataagtcgtaaacgccagcagaaaactgcccaataagttcacaattgtcgtacccaccatggtttgaccgtccatcgtgactgaactaaggccatatcgcatgaccccgccgaaaaaaccaccgacaaatactgccagcacccaactaagccttacttgttcccgttgttgcatagattgctcctttcttcatccgcgcgttgccgtacatgtgtccaaaaaaagacacctaccccgttaattacaaggtaggtgtcatcaacttacgtataggcgaacaccatcgccatttaattcattgaaattatatcaaataattgcatgggaaaacagcgccggaaagtgattgattttccactgtagacaaacatgacgcagattagcttatacccagctgaccgactgccaacccaaaatacttgccacagtaaaaagcccgcgctgcaacaaacagtccggactttttaatttcagtcgaagtcagtgaacgcgcactgactttcggctttaaaatggtacccgcttatcacgggaaagtcattcagtcgaaactaagaaaacatgggagtgttgtcactatcgacatgacttaaaaacgctattttggagaaatgacgttagcagcattatttgatgttgtcaccatggttagtctaccaagtcgagcgatcgcttggtcacacaatattattgtgcccccagagttggtcgtaaccaaagccagtcagatcttcaacttttgctttgacggcgggatcaacatccgccatcttgccgcctgccttcaagcgatcgatttcatcacgaaggatcttgtgattttcacgatccaacttaaagaagtaggaagtaacaaacgcgagtaacagcattaacgttgtaccaactaacatccagatgattaaaccgtttatcgcagcggcactttgcgtcttggcgccttcattgaatccaaatgctgataaaacaatcccggttaaaaatggtgccagcgcggaagttgtcttccgagcaaaggtcataataccggcaaagataccttcgcgccgttgcttggtgaccatttcgtccacatcaggaatgaacgtgtaaacagtccatggcacatagccggtaccggagtttgaaatgccccaagttacctgaagtgcatataaggtcatgatgccccagctagtcgcagctgcttggccatagtacaaaccggcgtagcaagcaaccgtgaagaacatcattgcatacataatccgcaataacttggaaggtccaagtttgctcatgatctttggccataccaagttacatgggatcccgataatggaaccaaacgtcaaaatattggaagcttcagtcggattgctctgcatggcatagacaatgtaaaacacataggttgccccgacaatatcacgtgctgtaaatgaactcagataaataactaagtgaagtgcaaaggatttaatccggaagaccgaacccatatccttaatcatgttccaaagcgatactaaaggattttcgcctttatgactgctttcttcaataatagctttacgttcttccggcgttccatctgtctcacgttcaaaggttgagaagtacgtcaagccaatggcaagaatgaagacgatagcaagaatgatcccgatggttaagaatgcgtttggattatttttacccataatggcaaagacgcgacctggcagccatgaagcaaggaaggttgctaaagctgaccaaagcatccgcgaactggataaacgtgacttcatatcataatcatctgtcatttcagcggccagcgtctcgtatggaatcataaccaacgctgtgaaagcttccatgagcaggtatgtgaaaagataaaaccagaagcccatatgtgaaatccagataatgacatagataaacatcagcggaatggaaattagcaggaagaatcttctgcgaccaaacttccgtcctaatttagttgcaccgaagtgatccgttaagtaacccatcaaaggactaataaaggaatcagccacacgtgcaatcgcaaggatcgtacctccaagcactggagataatccgccaaaggatgtgtagaaaaacaacatccatgtggaggcaacggttagggccccattaccaaataaatctgcggcaccgtaaccaataacattacgccacctgacttttctcttcacgatgaaaacctcccatttaattagcaacaaatagtgattcggttcttttcgtaaacgtttacaaaaatgaggttaacaccactttcgtaaaatcgctatctaaatttgactattttagtaaaatcagcgcgattgctaatgatatgtcccaaaataaggacatatctacagaatcagaattagttttggccttttaaccctcttcatgttctcgtcgcttatcaataccattatacaaatcggaatcacctatttgtgttcttgatcgttgtatatgctgttgtagatttttgtgaaatttacagcaaatgaaaaataatatctagaccagttttgcaaacgatgacgctttttctttgtatattcaggatttcgtgacgtccatctgatcgattcagtagtacttttaacgcatctttattagcaaaatgatttttagggacatcaatctagcaagtttgggacaaatctccatctatgaaaaggcaagattttaagcaataactgatatcacgcatttcataacttcatattaaaagcgacttttagtaaacgcttaaataccatattgcattttcaatttttaaaaagtacgctaaaaaaaagagcgttttacttaaaaaggagctaattagacatgccaaatataacaccatcgttactcgcgccggatcatctgcgcgttaacttgcaacattttgcttataacgtccaaacgcaaccgcatttcagctggtggaaccacagcaatcgcaccggagcatcgcaaagcgcgtatcagcttacggtctttcagcgccttcaggatcgtcaggatcataaatatttgtacgatagtggttgggtaacgagttcgaataataccgcggtgacggctgcaaagttatccgatcaactcgttgctggtcaattgtattattggcaagtgcgcatcaaagacaacgccggaaatatcagtgacttctcccagcctgccaaactgatctgtgccgatccgtcgctaccggttaagcatggcatctggcgccaacctcaacccaaaacggcccaagagctggcacacatcggtcaggttgtctttttgcgcagccctcaactcaaaatcaatctgagcgaggttgatactgccgtcattgttgcggtggcccggggtaatgaaccggtttttgctcaaagtttcgatctttatctcaatggtcattgtctgggggttggctcggctcgccaacaggaacacgatcatggaacagaaaaaacagctatttactataacgtttatgaagctaccgattttttgcaagacggggcgaataccgttgcaaccttggccactgcaagttcagataggcaggcattctggtgccagctgatcctgtataaacatgacggaacgaaagaagttgccacgaccactgacaacacctggcgcgcattagatggcagcagtgcctttggcgattatggcgttaagatcagaacccaatatttcggtatggtcagtgaaaatatcgacatgcgttactatcctcagaactggaccagcagcgcatttgacgatcataattggccgcttgcatggcagaatcctcaccaaatgattgccgacaatgaagtgctggtgccatttcgaagcgaaaataccgaacgcgtggaagtgcatgatcgcaataaacgggtgctcactttttccgatcaaaactatctgttggacttgggaaaagagatcattggcgggctaaaggtcaatctgttcagtgccttcgatcagcgtgtcaccgtgatgatgggtgaacaactaaatgaagacggccacgtccggcatgagatggcgtgcggacctgattacatcgaaaactggacgcttgtaaaaggacagaatcaattcaccactttacaaatgaaaaacttccgctatgttgaactgttaggatttgaaggtgatttgccgcttgatgccattaatggttgggccctgcaacaagcatttccggataatgagagccagtttgatagtgacagtgagttgttaaatcgtgagtacgagttgtcgaagtatacgatcaaggcgacgaatcaggatgtttttgtcgactcacaagcacgcgaacgccggccgtatgaaggcgatctccttgtcaatgccaatacgagttatagtgtctcctcaaactactcactggctaggcattctctggattatttaattgacaatccaacctggcccgaagattacaaactgttcgcaattgaaatggcttggcttgattatctctataccggtgatgatgatttactgcagactcgttacactgacttgcagtacaagctaaatcgcggtaagtccgcagaaagttttgacggcgcttcgcaaagtttcactggttcgctgaagaacagccaaggtgtcgacaattttgacgctgcagtcggcttggtcaccaacgatgggctggtggactggccgatttccgaacgtgacggctttgtggaaggtacttacaatacgccatttaacgcgattttccatggtgcttacgcgacgatggccaaaattgcgcgcgtccttcatcatcctgatgacgctgaccgttaccaaaaacgagcggaaatcattaagacgaatctgattgataaattatatgacccgcaaacaggccggttcttcgattcgttaaccgcggatctatctgtcaatcgccatacatcacatcacgcgtctgcttacgcgctttgctatggcgtttatactgatcagaatatggccgatcggttaagtcattttgtcgccaataatggtcattttgtcggtagtatctactttatctacttcatgctcaaaggactctttgaagccggtcacgcagccgacgccatcacgctgttgaccgaccctgacaaccacaaggatcataagtcatttgcggcgattttagacagcttaaaagcaaccattgccccggaagcttggagtaatgcgtacaagccaaatctcaccttatcccatccgtggggcgccactcccggcttaacgattgttcaaggggtctttggcatcgtgccgctcgcgcctggatttacaaccttcagagtcaaagttcgccctggcaatttgaagcacttagatctcacgacgccatcagtcaagggacttatcaccctgcattatcgtcacgagccaacacaccagatgcttgacgtaaccgtgccaatgaataccaccgcacaagttgaattacctgatgatgcccaggccattgtcgttcacgaccagtacggaaaagactggaccgcttcgatcgaacatgaccacgacaccttaaccatccccatgggtcgctatcagattcaatatcaagcttagtgtctaccaatcttaagttttcacgacttttgtcaattttacattaaacaaaaaccagctaggcagcaattgactgtcgagctggttttttgtgtggtgagagcgagccggcgcgattagaagtcggagtgtaagcgtccttacacgcagatccctgagctggtgaacgcgttatggttgttgccgactgaatcatctagctggttttaattggaatcgctgaccaaagttgtcttcatatcaaccttcgtcgtgataaccccatcctgataaaacacatcggcaatggcgttttcttctgccacaatgctactgttggcactaatcagcgtcatggaataggtgcgccgttctaccatctttttaatcacttcatcggagagattcagggttttactgagcatcgcaatgagttgcgtatgatggctattggcccaagtcatatcgtcatttagttcagtcgtcagtaacttacttaatgatgtatgggtcttggcatagctctgggttgaaatcaggaaatcacggttcttggtcaagccggtgccgttggtcaacagcttagcaccttgattgacttgggccgttgacgtatatggatcccaggtaacccatgcatcgacgctacctttagcaaatgcaaccgaggccgaactttgatccatgttcaccagtttcacatcactggtgctgagtccggctttcttgagcgcctggatgataaggtactgggcggcagtgcctttttgatacgcaatggtcttgccctttaattgctcaagactggtgatgccgctatttttaccaaccaaaataccactaccatattctttggtggccccagcggcaattagtgcaatgtccgtgccagttgctttggcagttacaggcggcgtatccccgacccgcgcatagtcgatggcaccgcttttaagtgccgtcatcaaggctgccccgtcagagaactccttgaactcaacctgatagcctttagctttcaactttttggctaattcgccgcgctgccgggcaatgtcgacaggatcggctttttgatagccaatcgtgacggtctcaaggttgctcgatgccgtggtggtttgagtataaccgtaaaccgccacgctcagccaagcaactaagcccactaacaataaaaccagtcgtaacttacgcttcatatagcttcccgccttgcattaattgtttgcggagtttcggccgcagcaccttaccagtagcattcaccggaaaagctttgacaaaaacgacttcggttgggcattcataagcggctaaatgtcgacgggcaaaattgagtaaatcaagcttggccttttgcgggtcttccgtggcatcttggcgaatgacaacggctgtgaccgcttcaccatataaattatccggtaagccgataaccgccacttgggcaacccagtccagttcgtttagaacattttcgactttggctggggccactttttcaccaccgcggttaatcatttctttgcgtcggcctttgacaaacagatacccatcctgatccagatatccgaggtcgccggttagaaaccagccattttcaaaagattccgggtgtggctcaagataatcatgaataacgtgatcgccacgcagaacgatttcgccttcaacaaatggctttttggtaaaggtgccatccgctaatttgattcgcaactcagtccccaccggcttaccggctgaaccgattttcggggcatgaatcggattaagcgtactttgactagccgtctcagtcatgccgtagccttccagaacctgagtgtgaaaatgcgactgaaaggcgaccagtttatcttctggtaatgcaaaggacgagctgcggacaaagcgtaaatgaatgttgctgtgataagccgctaacgcctgttgattcatcagcaagattgaaatgatcgtcggaaccaccgagacccacgtgacatgattggtttcaatcgtcggccagaatcccgaggcggaaaacttcggcgcaatcaccagcttaccgcctgacaacctagtagcaagtaccgagatgacctgggcattaatatgaaacatcggcatgaccaccatcgcggtatcatccggcgatagttcgtgactcttggcatcatgaagcgcagcatttaataacatccggtgcgtcaagccgactcgtttaggtttgcccgtggtcccggaagtgttgaggattaatgccaagtcgtcctcttgtggtcgtgcttgaggggcattaatccgataagccaactgactcgcatcggtcaggattgccaactcggaaatggtatgcagttgcactttctcccatggaactaacggggcttctaaggatttacccactgctggcaatgtgatgacggcttgatagtggtaggtttcccattctgccaacaattccggtagcggggttttggcagcaatcggatgagcaacagccccaatttcccagagcgcctgattaagcggtaaaaagaccggcgaattcggtaaagcaattaagacttggtcacctgcgccaattttctgctcagcaaactgatcacgtaacgcggcaacatcttcttccaaatcgcgtccggtgtaccaagtattggcctcaacggatttgactaacgggtaatcacgatgattgatgagattctgagataactgatcggtgagtttgctcatgattcaggactcctttcgtagctaacaacaatgactgcggacgaccaatgagccatccaaacggggaaactttgtaacaaaaccaagcgatggcaaaggaaatgccgagaatgctgagataacccagcggcaacagcagcattaacatgagattactaagatgaaccagtcccaagacaccacctaatagcgtgatggcaatggtttggcaaagatagacaccaaacgaaacttgtgcgccatgaccaaccaaacgagcaatccagtgcgttggctgtttggcgtgccagctggcatacttttgaccaaggatggcaacaaaggcaatcatcaccacgtcatataccaacatatacggctgatgaggtgaaaccgcagcactgtgagtcagtccaagaatctgtttgttgaagccataaagaccaactgttcctaagctgagaaacaaggtgctccagccgatcaggcgctgatgggacattaaccaggttttaaccgcttgggcgtgtaggctgaataaaccaccggcaatgaagaagaattggtaggtcacaacattgacgccatatgctctaaaccaccataaccagtggctcgtgtcgacatgcggcaggccgtacttgatacctgcgacgatgagtaactgcaaagtaaaactagctagcaacaaggcgccgtgatgcttctccgttcttttgaatagccaaagcatcgccggaaataacagatacagttgtaaggttaccaagacgtaatacagataaaattgatcaccatgcaataaggcactgagataatccggccagaagttggcaacggtgaacccgccaatacccagtagcacggcgctgatcattaagattgtgttccacaagacatagggaacgccaactgttgtgaagcgttttttgaagaaccgcggccagttacgttgccgggagtagtagaccatcgtcagcaccagccccgtcatgaacatgaagcccatgcgtgtgaagtgaatcatgaggtgggtggcgagcaaagccgtgctggcaaaaccagaagacatttgatgttgaaatgccgtggtggtgtggttcaacaaaacgccggcaatgaagatcaatcgcattaagtcaatctcataaaggtagcgatgcttagttggctttgccgtcgtagcattcgctgttgcctgtacctgtttcatacggtcaccggctctgctaaaatggccttcaatacccgcgctgccgtttgggcaataacttctggtgactcaccacgagcacccgctgtttcagcgaccaactgaccatctttaaccacgataatccgatctgccatccgcgccgcttcattaacatcatgcgtgatcaacatcgtactcagcttttgggtagtgaaaatgtgtaagatgagatcttgcatccgttgacgggtcaatgcatccaaggcgcccagcggttcatcaagcaagagcagttggggcttggccaacaatgctcgtgctaatgccaagcgttgtttttgaccaccagacagttgtgccggatagccatcacttttatcggccaaaccgactgcttttaacagtgacttagcctccttaaccactgccggatcatgatttttgaacgaaacattatcgagattggttaaccatggtaaaagccgatcattttggaacatcacgcgcattaccaagtcgtttgcgcgcgtcagtttgccagcagtcggggcttcaagtccggcgattaagcgcagaatcgtacttttaccgccgccactcatcccgactagtgctaaaaattcgccgggataaagattgagttgaatgtcatgaagaacggttttatcaccatagactttttcaatatgttgaagtttgacgattgggttagtcattttcagtccctccttgccgccaaccgaggaataggcgctccaagctttttgcgatcatatcggagagcttgcccagtaaggcgtaaatcaaaatgcaaagtaacacggtatccatccgcataagttcctgtgcattggtggccatgtagcctaagccggatgtggcggagatcgtttcggcaacaatcaaggttgtccacatcacccctagcgcataccgcacgcccataagaatattggctaaggcacccgggaaaacaacgcgggtgaacaatgcgcgtcgggataagccataagcacggcccatttccaataactccggatctgcgccgacaatgccttgatacgtgttgatatacatcgggaacataaccccgatggcaaccaacgcaatcttggccggttcgccaatgcccattaagataatcatgagcggaattaaggaaaggtgcgggatattccgcaacatttgaatcggactatcaagcaaagcacgaatcggtttgactaacccgttgatcaggccgagtgcgaagccgacactaccgccaatcgcaaacccagccgtggctcgataaagactaatggcaatattctttggcaattcaccgctttgccacagcgagattccgtcttgaatgaccgttgacggtgcgggaatcaaggaactcgtcacccagttaaaactgaccgccgcctgccagctcatcaggaacgcgagcggtaccagccaaggcaggatctttaaccaattcacagacggtttaacccgttttttcggctcctgcgtcagtgtcgtgacttcttgcatcagcgccatctcccttaagttgatgatgttcatactagtagcggtaacttaaagctgacttaagcaagtttgaagagttcgtgacgaaaacggcatgaaaaaacgcccgcttcactgtcaataacagttaaaagcgagcattcccgtggatcagatgtatttttaaaaagaaaaatgggccattgataacaattggcgtcatttaaaaagaagccggtgaagcaaatttcctcagcaagatcaattaagcagtttgccttgaccacctaaatatttggttgttaagtcaatcacgcgttgggccgtttggtcaaccaacgcttggcttgtgttttcatttccttgggcgatgtaataaagatgggtggtttcaggcgtcactttcgttttttccacttgccgggtttctaagtggcaaatgatttcgttgctgtcatcaacataagcatactcgcctgctttaaccggttccggctggtcgtctgcaccgatgggaacgaagcgctcggtgccatcagtcagccgtaaattgacattgccatcaatgtgttcaatatcgtgggcgccaagtgcaaggtgactttgaatcgaaatgaggttgtataagtcaaccactggattaatgggtacaagctccccgcgtttcaaaattagcttcaataatgttgctggcgccggggtgttgttgcgcttaggcagatgaacagcgcgatgcaagtcccaaaagccctgaataatcggatcctgcttaatctgatcgcgattcaatgtttccaaaaccgttgcaatctctgtggaaatggcttgttttagagcttgcgggtagtggtgattgtcgatgccggttagctcaacgccgcggattttgacgcctagtgctagtactttgggatcgatgatgaagttcatggctattcctcactttctgggggtgtgctggctgcttttttaggcgggagggagttctgtttttcggttggttttgggggcgactttgcgttctataacgcgattcctggtgcagaaatttgcgtgtaagggccttagttgcaatggctaaagctcggccattgtgactgaggccgcttatgttccggcttactcccataacgcgctcgccagcccagaaacctgcgtgtaaggacctcaggcgcaatggccaaagaccggccatcacgcctgaggccacttacactccgacttctaaacgcgccggctcgcgctcacattaacgcgctcgccagcccagaaacctgcgtgtaaggacctcagtcgcaatggccaaagaccggccattgcaactgaggccgcttacactccggtttctaaccgggctggctcgcgctcactcaaaaaacagcatccatccctgttttgccaagggacgaatgctgcagcgcggtaccacccaaatttacattaccttcacaagcaatgcctcaacgacgccgaaattcatgatctttcgaggtccggaaagttaacggctccgaccgactagtctgcgttaacaagctagtgacatggcaaagctcatcttcacagtgtttgcagtcatccttttccaccagccggattctctgcggaccgaaatcactgttactcttccttgcgtctttaacgattttgaattaaccctatgctaattcgagtattaggaaaagtcaatccattcacctgatagccatttactgacaattcaaacatatttgatgttgatggactttgtacggtcacagtcactgtaacgaaaactaaaatttaaaatcaaaattcattttggtgaattgagcgactgtataaaaatcttcaatgttcattctttcaataaaatcgatttttcggttgccttgttcagtgacatccagagaataaacctgcgaagtgacaacctgaccacgaattttattggatacaatatcaacataaccaggtagtgtccgaattgttgaggtaattggtgcgacaatcacaaatccggttgcacgattgtatgcgttactgcttaaaacaacagctgggcatctttttctaatttcatgaccctcggacggatcaaaatcaagccacaccacatcaccttgcttagccttatatgtcattattcaatatcctcatagtcaaaatccggccaagcttcttcttgatggaatgataatggttttgctttggtatagggattttttacctttgggatcaacagataaccacctttttcatctgaaatcagcaaaaacgcctcgcctcgtttgaaacccgcactgctcggaagtgataaagctaacgagtttccacgttttacaactttcacatccatcataatcgcctccttctgccccttgaggtataccatgtattacacgtatcacaaagcggaaagaaaagccattaatcaacgtcaaatgttagcgccttatctatctcgcagcacatgcacatcaccatacaattcagcttggctctgccataattcgcggaaataggccgaacgttgaagaagctcttctcgcgttccgatatcgtcaattcgtccagcttttaataaaataatttgattggctaatgtcaccgcgccgatacgatgcgtaatgaatagtgacggggtttccttagacagccgtttgatttttgtaaataaagccaactcttttaacgggtccatcgccgcggaaggttcatcaaggatttgataaatgcctcgcttgtactgtgctctagccactgcaagctgttggcgttgcccgccgctgggttgaaagttgtcttgctgataacttccgatttcagtggcggcttgttttggcaagtgcgccaccaaactgtcaatcccattggctgccatcacctgtgcgagccgatccgtatctggttgagtgctggcagtaatattttcagcaattgtaaaatcaaaaatggcatagtcttggaatactactttgaatagtcctaagtaagcagccgctgatatttcagcaatatcatgaccgttaaataagattttcccggcagtcggttgataaagtcccagcaacaatttgactaaggtggtcttgccactgccatttacaccaatcaacgcagtcacaccggttaagtcgagggtaaaggagatatcatgcaagacctcctcgccatccgggtaggcaaacgaaacatgatcaaaaacaatggtattttgacgctgaactggcggggtctcacttgttggcgttgttgtttggccgttagtggtcaagatctcattgacgtaccccatctgattctcaaagcgcaggaatcgttgccaagtcgctacgatcaaactagcagcactggtcatttgaaccacgctgccaaataaggtattaagctgccccaccggcaacaagccgcgataaattttaaacacaattaatagaaacaaagccatcgtcgcaaacgccgccattaaagcagtgatcatttgcgaaccactgtcgttaactaccagcttatgattggcagtcttttcctcagtccacgttgctcgatagcgttgttgaatcggcgtacctaacccccacatcttaatagacttaagtccttcataggcgttgacgacattcatcagaaaatagttcatttttctttccaagcccatcaaatccttgaacaacttaaaacttgtgcgcgtcagagattgatagacgtgaatgagcaatgcttcgcccaaaaataatgtaagaaccgtcactaaaactaccgcggtaatctcttgactgcgtgtcgtcccggcaaccaccagccaactaatcaagcctaaaccgacaatcacggtcacaaccccttgaatcaggttttgtaattggctaaagaaaaccggaatcccgcctgagtaacgaaatgacgcctcacttttcatcatcttggcaaaatagcgctgagtctcaagtgtttgaaaatcaacctgctcccaagcttcatacattgccagttttagctgctcattggcctgaagcgttttgacttccaaatagcgctgaatgcatacagccatcaggtaagccccgccagccatcccataaaaatagccaataagtgtcggtaccgtttctagatgacctgccaaaatagcattaatgatttgggtattacccagaataatcagaagcggcgcaatggcgttcagtgtgctcgtgaatactgccagcacaaaaaggcttttcccaaaccgagcaatcaagcgtcctgttgccaaggcttcttggagctggtctttaagctgtttcatgatcgccacctccaacgtacattgaacgctgtgcttcccataaagcgcgataatcagcagaattttccagaagccaatgatgcgttcccgctgccaccacggttccgtctttcatcacaaagattttgacattccgaaccgcaagcgcaccaagccgatgagcgacaataatcgtggttttattgacgagtttttcatcgattaaatcgtaaaattgtttctcactcaaaggatcaagcgcggctgtcggttcatcaagaatattgaagtcggcttgacgatacagtacacgggcaaataacagtttctctttttgcccgcctgacaattgaatcccatcatccgccaattcgttaccgataaaagtctgcacgccttgaggaagcccagcgacaaaagtacctaaccccacttcatcaagcaccgttttaacccgacccaagtcgatcttttcaggtgtggtgcaagcaacgttttctgcaatggtgaagtgaagtatcacgtcatcttgaaactcaacggccacccgacgctgaatagcggcaggcgtccagtccgaaattgcttggccatccatgacaaccgatccggctgttggcacgtaaagtccgcaaagcaatttgatgagtgtcgacttgccggcaccattttcccctacgattgcgattaactcacctggggcaatggaaagattggcatcgtgcaaaataggcgtcttgttgacttgataatccacatgcgtcacgttgattgcgccagagccgctaaaatgatcggtattttttcgttggtggtggcgatagggaaatgccataaattttcgaaagttatcgacaaataccagatttttccctaccgccgcatacgcatctctgagttgaccaaagttagaattaagcgtttgaatcgccgtgatgaaaaacagcagactggcaacagaaatattacgggttgccagcaaaatcagtaatgacagcgctaggccgccgacattcacgatacgctgaccgagattcaccattaacgtgatattggcataatgtcgctgccatgccactaagcgctgaattaaatcgctaaagtgctggtggaaaaccccaagcatcgcaaacaagcgaatatctttgccggtcgaacgcttcatcaacgttcgaacaaaataattttgataactagtgatacgattctggctttctttatgcttgaaataccactgattactcaaccgctgaaacaggtactgcaagacattaagtccaaaaaccactgcagccggccaaaaactcagtgtccccatcatcaccagtaacaccgcaatctgacaacccgtgcgcaccaaaataatagtctgatcgacaaccgccccgataccaacattagccccattatagatagcttcatacgcctgatcgatgaccgtttttcccgccaccgaatcaatcaagcgctgatcccagccgaaaatatgctccgaaaacaccggtacataatcaaaacggaaatcaaacgtcaatattgacaggcgctgctgcaagaatagatccaaaattatgataccatagacaataacaccagaaataaagataactaatatcgtcaacccgacattcaactgcttggtttgtaacaaaatgactgcgagcggcggcagcaatgaaataccgaccacataaacgatttcgaccaaacacagcccgcccaataaggctccgaacttgaagcgatatttgccaataaatttagcaagtacatagcgccagttgccggcttgtcccataacggccaccccctgatatcacccaaggttcacgtttgttaaaagcaaaagtcaccattcgcagtaaaaataagcgccaacaacaggattgctttgtacaagttttggagcaaattttcacatacatataccattcgataaatgattaaatcataatttacacccaaaataacaccgccgtaaagcatgtcgtccttttgtaccaaaaacagtctcgacatcactagtctagctttcgaataaatcgcatccaaataagcaatgacgacaacgccagcccaatcgcactaaggatcaaggcattccaccccaagattggaatcacacggccaaataaaaagtcagctggtgggatcaaaagcgcactaaaaataaacaagattgaaaaaacgcgacccagataatcattctcggtgattaactgtagcgcggtgaataccttggcattgaatctcgtaccaaagaagccattgataaacgcggcaaaaagtaacgcaggataaactctaaagatcccgggaatgagaatggacaacgcaagcaaaagtacatctatgtagtaaccattcttcccacttttttggttaaacagtgccaacaacaagcctccggcaatgccgccaatcgcctcgatactgatcactgcgctataccaatcaccatttaaatctaacgaaaccttgaccaaatatggtagtgaaagcgtgtaagcttcagcgaaaaaattaatcgtggcaattaatatcagcaaccccaagatcgtttctttctttcgtacatacgccatgccagactttaatttgggcaagatctgcaatttttctttatgattgtttttttcggtataccggatggttgagattaataaagcggacaaaacaaacgaaaccccattgattaaaataaagccattaatgttactgtgaagcttcaataacaatgcgccaaccaacgggccaaccactttgatcgtacttgacaacgtattttgaaccgaattaaaaggctcgatttggctttcatgaatgacattaggcacaacggcttttgctgacggcgaattaaatgccaacgaaacgttaagcaccgaactcgtcagaatcaatagcagtttgcctgccacaacatcgcgaagcaaaaaggcgcacatgaaacaggtcaggccgcttaacagatcagcaaaaatcatcatatgtttgcggttaaacgagtcaacaatcgggccagcaaaaacattggcagcgataaggaccatgctgctgataccgttaatcaatcccaaaagttctgtttgatgcgtttgctcaactaagaaccagttcatcccgtagatatagaccatgtcgcccagtaaggaaaagccgtatccaagaagcaaagggagcgcgttttgcattcgcttaatcataatgcaattcctcgctgtccgaatattcgatggtatttgtatgtaatgcacttatcattttaatgacctcgccagattgaattgtcgtcattgttcgcgatcaatcacgctgacttcagacgcctatcactaaaaggacaccgtgaaatttctttgaacaaacacatgcttttcatcataagggttaagctaaaatttatcaatcgttaattttgctcttcaattgctaggcgctggatcaaaatgataaatttgcaagtaaaccgcgaaagtttccaaatctcctaaaaatgaaacgtattttggacagcaaaaaaaccacccgaacagataactgtccaggtggttccaaagttgatgcatataacatgcaccgttttgccggtcgctctcggcgaattaacgcttggagaactgactagccttacgagctttcttcaagccatacttcttccgttccttcatacgagggtcacgggtcagcatgccggccttcttaagcgggccgcggaagtcaggatcaacggtcaacaaggcacgggcaatgccgtgacgagttgcgccagcttggccagagaaaccgccgccattaacgttaacaagcacgtcatagctgcctgtagtttcagtgatgccaaatggttggcttaaatcggtgatcaggttttcatatggaaggtagtcgcgaacgtctttaccgttcatcgtgatcttgccggtaccaggaaccaaacggacccgggcaacggagttcttgcgacgacctgtacctgcgtattgtacttgtgccacagtaattgcctccttagattaagtttgaaatgtcgagtacttctggcttctgtgccaaatgtgggtgttcctccccagcatagacatgaagcttcaagaattgctgatgaccaagagtgttcttggtcgggagcatcttcttaacagagtattcaaccagacgagccgggttgtcccgcaagagatccccagcgatttcatgtttcaaaccacctggatgctgactgtgacgatagtaaatcttgtctgaggcttttttgccagtcaactttaacttagaagcgttgataacgatcacattgtcacctgtatcaacgtttggggtgaattgcggcttgttcttaccacgcaagatcgaagcaacgacagatgataaacggcccaacgcgatatccgttgcgtcgatcacataccatttacgttcgatttcacctggcttagccaaaaatgttgtacgcacgatttgtttcctccataattctgtgcttgtttgaacacgttaagtttccggggcttatcgtggggcaaacaataccagctactagaataccaacgattagcgctcaagtcaatgtaaaattcagtatcctactataaagttgcactcgcagttcgcgttcttttaacttcaagatgttgcttgtcccaaatgcgcttgcgtacatcaaatacttcttaaaaacggtgctttaattttactgcttccattagtaccgtgtctgcaacagcccactcgatgcttcaatcctcgtatccttccccattggcttcgggccgcaaaacaccggtacaaaacatctgcaaagcgcgatcaagcgacaattgattttgaaaagtgttcccgcgaccggtacctacagttggttgcagataagcggctaaaacggttaaaaaatagagggtcacgtcacgaacgcgatatgtcggcgccagctgttcgtcaaaggtgctaaaaaaccgatctaacggcgacaacaagccgacttgccatgcctgaaaaacatccgcctgcgccttagaacttaaattcccgacatcatgtaagacgagttgcaagttcatcatgttgtcatcggtgagtaaatgtccgaggcgcttgacttttttgccaaaattttgggcatctatttgttcatgggcaattttacttgccatgtcttcacttaccgccatgacaacagcaagatacaaggcctctttggttttaaaatagtgatacagcagcggttggcgaacgtcagccgcttcagcgatcattcgggtggtcaccgctgtgtaaccgtgattcataaataatacctgagcggcggttaagatccgctgcacggtcgctttcttctggtcatttcgttgtgtcatttttccaagcccttttcatttatcaactgataaacaagtgatatactgattgtgcaaaatcaaatatggaggtgatcgtgatgttccttgcgtataaagagattattcacaacaaagcccgctatctgctcgtcatggcgacctttgttttaattgcctatctggtcttttttctaaccggtttggctacaggtttagcgcgtaacaatcgcaccgccattgacgcattgccgggtaattacgttctcctgtcaaaatatgccaacaagaatctcctgagttcgacattgagcgcggatcaaatcaccaaagtcagcaccaagcacaccgccgtcctcggtcaagttgcggttgtagcggaaagtaccgcgaataataagaaagtcaatagtaacgtctttggcatcaacctcaacggcaagctgaagccgactgtcacaagcggacgcctgccaatccatcacaacgaggtgctcgcggatgacagtgtgaccatttatggtttgcaccaaggtgatcgcatcactttaaacggcagcagtcaaacgtatcggattgtcgggttgacgcatgaccggcgcttttacacggtacctgtattttacacaactttaggcacttttcggcagctaaagttcggacagcgccaagttaaacaggcctccgcggtgatcagtacaaagccgtttaaaaatgtcccgaccaagacccaatccatttccaaagcaaccttagtcgaaaacatccccggctatacagctgaaacttcgacttttgccttaatgatcggagcaatgattggcattatgctcttaatcattggcatcttcatgtacattttaaccattcaaaaaattgccatgtacggggtcatgcgggcacaaggcattcgcacgcgggcaattattgctgctttgttctggcaaatcctgatgcttgcggtcaccggcgttgctatcggtgccggactgttgggattaacgcaatttattttaccaaaagccatgccattttatgctaatccgccgctttttatcgcgatcgctgccgccttaattttaatgtccctggttggcgggttattctcactacgccggattttgcacattgatcctttagctgcgattggaggcgagtaacatgaccacactagttcaactcaagcaagtcagcaaagtttacggcagtggccatacggcggtagtcgccttgcaccccaccgactttacgctgcatgccggtgaatttgccgccgtcatcgggccatccggttcaggtaaaacaactttgttaacgattatcggcaatctccagcaacccagcgacggtcagattgtgattaacagtcaggacaccacgcattttaatgaacgtcagcggaccgatctgcggtttaatacgtttggctttatcttacaagccagcaacctaattccttttttgaccgttaaagatcagctagccttagtagaccgtttcaatcatcatcgccaacacaaacgctccatgaccgagctctttaacctactcggtatcagcgacctgaccaccaattatccgtccgctttatccggtggcgaaaaacagcgggttgcaattgcccgtgcgttatacaacgacccgaagattatcttagccgatgaaccgaccgccagcctcgacaccaaacgggcactgcaagtcgtggcacttctggctgatattgcccacaaaaccaagcgcggtgtcatcatgatcacccacgacacgcgtttgctggatgacgtggatacgctatatgaaatgcgcgatggtcagctcaagcaactcagagacagagcggccaaaaaagtcacaccgaatccagcgtagatttaatctttttttaatattttaagcttgccgctattccgcatagcagcagcatctaagcgctatcagataggccgaattagcactcttttaaaaacagtgctaaaaatttgcatcatcgcccagcaaaaggcttataatgaatttgtatcaaaaatgagtttatatcatggaggtaatcattatggcaacagtagatcctgaaaagacattgtttctcgatgaaccaatgaacaaggtatttgactggagcaacagcgaagcacctgtccgtgatgcgctgtgggattattacatggaaaagaacagccgtgataccatcaagactgaagaagaaatgaaaccagtcctagacatgtccgacgatgaggtcaaagccctagcagaaaaggttctcaagaagtaagatcacaaaactaaacatcatgaaccgcgcccccacaaaaagggacgcggttctttttgggtgagcgcgagcaggagcgcttagaagtcggagtgtaagcggccttaagcgtgatggcccgcacttggccattgcgcttaaggtccttacacgcagacttctgcgactgcgagcgcgttatagaaagtacggcaagacatgctaattgcccctaatagcatgtcctccgcaacccaccaacctcaaaaccacaaaacctcaaattcactatccaccttccccccttgaccctaaccccacgtcaccgtttaaagttataattgatccaagggaggccagtcaatgacatactcaaccaagcaactcgctgacttagctggtgtgaccatccgcacactacgctactacgacaaaatcggcttactaaagccaacccgcaatcccaacaacgactaccgccaatacacgcaagctgaggtcaatcgcctgcaggtcatccgcttcttacaacttttcgaaatgccactcagccaaatcaaacaactgcttgacggtccaaccgaccaattaaccgccacgctcatccggcaacggcaacgcatcaccgccaaacgcgaccaacttagcttactacttcaaaccttggatcaaactttagaaaaaggggttaacaccatgacagacaacgaaaaatttgctgcttttaagcaacaagccattcagcacaatgaagaacattttggtaaagaagtccgcgaccaatacggagaagatgtcgtcgaagccagcaatgagaagtttcgcaaaatgtcccaagcacaagtcgcacaactgaccgcactgcaacagaagattcttgaggaactaaagccactcgttggtacgaccgattacaacaccgccgccgccaagcatcttttcaaactgcacaaacagtttctccaactcacctggccatctgaacaatattccgaaaaagctcaccgcggtctggcagccatgtacgtctccgatccgcgtttcaccaagtactatgaagacggcacaggtaaaaaaggtgcttccaaaactttgaacgccatcattcgccattacacgcgttaacgcaccaagatttcatttcgtgtgcgctgtttaagcattttggcgtgactaaccagctgtcaatttcagcaggatgaattcatttgcaaagaggctctaaagactgacctaccagtccttagagcctcttttggttgcatagtttgtcaactcggtacttcaaaatgcaaaagatcagggaaataccacaaagccaataaaaaagtttgtgtgtgagggtcaataataaacttccttcaagtacaatcccgaagcaggggccgtgcctcttgcctgctgcctatccttaacttcaaaaagccgttgaaaatcatgaacatcgcgccggccgttgccaatctccaaagccgtcgccaccaaaatccgcaccatgttgtacaaaaagccattaccataaaactcaaaaatcaattcattggtagccggatcttcttcaaccgttgcctcataaatcgtccggaccttatctttaatcacaccgccactagctgcaaaactcgtgaagtcatgcgtaccaactagatctttcaacgcaacctcaatccgcttgacatccaacttataaggatagtgtcctgtgtaaaggcgattaaacggattcgtataatagccacgcgccacccgataccgatatcgctttcccttcgctgaatagcgcgcatgaaaatccgccgcgacaatttcagcttttaggatttcaatatccagtggcatcagtgaattcattgcccgcaacatcgactcagccggaatatttcccgggtaatcaaaactaatgacctgtcctagcgcgtgcacgcctgaatctgtccggcctgagccatcaacatgcaccggttgcccttttgccattttcgtcagagctttttgcagaacaccttgaaccgttcgctgcttgggctgaacttgatagccggcaaagttggtgccatcgtaagccagtgtcactttataatgcgtcaatacagtggttcctttctaatacgcgcgcagtaacagcaaaagtccggttaaaacaagcataccgcccgcagcaatccagtcacgctgatgataacgtaagatccgatacttggttcgattgtcgccgccttgatacccacgggcttccatcgctgttgctaactcgtcagcggtggtgaagctagaaacaaacaacgggatcagtagcggaacaacagctttcatttgctgaaaaatattaccttcaccaaagtcaacgccacgcgctcgttgggcattcataattttagtggtttgatccatcaatgtcggcacgaatcgcaaggcaatttgcaaaaccaaggccagctcggtcaccggcacgtgaataacccgtaacggttttaacagactctcgaccgcatcagccagtgaaagcggctgggttgttagcgtcagcaaggttgacataaagatgatgagcacaaaacgaacgaaaataaaggccccattaatcagccctagcttcgtgatccataaccaaccccaatgccaataaaccgtaccgccacgaacaaacaatacctgcaaagcgacggtaaacaagatcagccagattaacggccggacgcctcgcaagaagaagccaagtttaataccggacagccaaatcatgaacaaagtcgccacaaacatcattaaatacgtttgccagttgttggctagaaaaacaatcccgatataatagaaactcgccatcaacttggtgcgagggtcaagctcgtgaatccatgaatggccgggaatatagcgtccaagtaatagtttatccacgctggccacctccgatctgtggcagcaattgatccgccaactcggcttcggttaacggctgcggatcaaagtgaaacccttttgcagtcaattgttgtgccatttgagcggttttaggtaaccctagctgattcgccttcaaccaagccgagtcggcaaagatctcccgcggcgttccggttttgatcaaatgtccctttgccatcacccaaaccgtgtcggcataatccgccacatcgtccatctggtgggtcacgagcacaattgtctgcccttcttcacgatgcaggcgttcaaacatttgcatcatttcgtgccgcccagccggatccagaccggctgtcggctcatccagcaccaaaacttccggttgcatggccaacacaccggcaatggccactcttcgcatttgcccgccagacagatcaaatggcgacttttctaatacatcatgcggcagaccgaccatcgtaatcattttatccgccaacgctaaagcatcctgctcgctcacaccaaagttttgcggtccaaaagcaatgtccttagccacggtttgttcaaacagttgattctcggcaaactgaaaaaccataccaactttttgccgcaacggtttcagattcttattactcgtttcattagtgatgaccttatcgccaatcgtgacagttccggaagtcggctttagtaatgcattcaagtgttgcaaaatggtcgacttacccgaaccggtgtggccgataatcgccgtataactgccatcatggatggttccggaaacatctttgatcccgtcaccagcgaaaggcgtacctgcctgatacgtaaagctcacatggtcgaatgtaatgtccacaggtagtctaccaacctttcattgtccaaatatgcttctggcattgtgacaccgcgctgaatcaaggcgtcttttaaccgctcggaatacggcacatcaagccctaagcgcaataggtctgtcccatgtgcaaagatctcgctaggcgttccgatttcgttaatcttcccgtcattaagtaaaataatccgatgcgcagatgccgcttcatcaatatcatgggtaattgacaaaacggtgagccccaattcatctttgagttcacgaatcacacccaacacttcctggcgaccggccggatctagcattgatgttgattcatccagaataataatctccgggcgctgggcaataatgccggcaatcgccacccgttgcttctggccgccagacaaccgcgccggctcccggtcagcaaaagccgtcatgccaacgcgtttgagggcttcatccacccggcgaatcatgtcatctcgtgggacaccgcgattttccagtccgaatgccacatcatcggcaaccgtcgcacccacaaactgattgtccggattctggaaaacaatcccaaccttggcgcgaatatcccacacggtttcttcgctaagcgtcatcccggcaacttcaaccgtgcccgattctggcgccagcagtccatttaaatttttcgccagcgtactcttaccgctaccattatggccgataattgccagccactcacctttagccacatcaaacgacacatctgtcagtgcttgacgttttgcttccggataagtgtaattcaagtgttgaacatgaatgacgttgcccacaatgccccttcttcctacgctttgtataccgaacaatgataccatattttaccgaattgttggacgatccctacttcaaatacgagatgtaccgctagtcgtttcagtgaccgccgggactaattagccaattcaatcatcttttcgtaatatccggatcggtacaaagaaacccgaaaaagaccgtaaaaatcaacgcaatcagccctagaagccatgcctgtacttgcaccattccaacatgagacatcacaatcccaaaccgactctggccattgacaaccaattgccgatagaattgactttggataaggaaaatgagccaaaacatgagggctacgcgtccaccttttgccgataaacccacaagtagcgaaatactaccggcaggcatcacccagctaaagttaagaatcacctgtaacaaaaacccatccaatgagtggggatacgtcagattggcaagcgggtaccactgcgccaaaaccaccacgaggaaccataaaacaataagcggtgtataggccttcattaaagaaaatggtgtcttgcttcgtctaaagcgtgcccccattaagtagccacataaagccgcaaaaagccacagatacgaagaccagtcaatggccaccgccccattgtccaaccgataaacagtgggaataaacagcccacctatactcgtacttgcaggcgtaaatgcgagtatcaaaacgacaaagaggattgaaaggattgtccagccgctaaccaacaataagccaagttgcagcggcgttcgataatgaaaccaagtacgcatattagcatgacctccattatgtcgcagtatacaggaaaaatcggattagtagtgcgatggagctagaaagtttggcgaattgaggaccaatttaccgcgcgtcatggctggctttgttttaaggctaatgcttttttaactcgaccccagtatttaaaaagaattctcttccgcgtgtcggcgaagagaattctttttagttgatagatttaattacggcaacaagcttggttacgcttgctttcgaggcgctggttcatacttcatcataacgcgctcaccagcccagcaatccacatgtaagagccatgaacaccatggtcaaaacgggtatcacgtccatggtcgcttacatgccgactgctgatcgcaatagtttgcgattgcacaaaaaaatcatttaatgatggagacaccggttgcccggtgctctcaagctagactaagcaggattatacctgccatcatcgtaacgctccatcgatcaaatgatcaaagttggttgacctcgagggccagcccttttaactgaatttagacgagctcaatgataaccattggtgcaccgtcaccgcgacgtggcgcagtcttcaaaatgcgggtatagccgcctttgcgatctgcgtattttggtgccaagtcactgaacagtttttgtaaagcggacttcacaatcacactgtcttcttgttcttcgacactcgcaatttcgttgcgcacataagctgctgcttggcggcgtgcatgtaaatcgccacgcttgcccaaggtgatcattttttcagcagttgaacgaacttccttagcgcgggcttcggttgtaacgattcgttcgttgatcagcagatccgttgtcaaatcgcgtagcattgccttacgctgtgagctggtccgccctaatttacggtaactcatggattggcctccttttcgaaattagtcttctttacgcaatcctaagccaagatctgccaacttgtttttaacttcttcaagtgacttgcggcctaagttacgaactttcatcatatcggcttctgttttgttggttaactcctggaccgtattaatcccggcacgcttcaagcagttgtaggaacgaaccgacaagtcaagctcttcgatggtcatctcaagcattttttccttgtgcgtttcttctttttcaaccatgatttcagcgttcttagcttcatccgtcaaattgacgaaaatatctaggtgttcagtcaggatcttcgctgctaagctgatggcctcacgtggcgagattgagccattagtccaaacatccagcgttaacttgtcgaaatcattccgacggccaacacgggtgctttcaacttgatagttaacccggctgatcggggtgaaaatcgagtcgatcggcaaaacaccgattggcatgtcatcagacttattctggtcagctgccacatacccgcgaccctttttaacggtcatacgtacatggaagtgcccgccgtctgcaacagtacagatatactgttcaggatttaagacctcaacatcaggatcagcgacgatatcagcagcagttaccttagccggaccgttgacatcaatttcgatgttcttatcttcatcagtgttcatcttgagtgccaatttcttgatattcaaaatgatctgagtcacatcttccaatacaccatcaattgtggagaactcatgaagtaccccatcaatttgaatgctgctgacagctgcgcccggtaatgaagaaagaaggatccgccgcaacgagttacctaacgtagtaccgtagccgcgttccaacggttcaaccacaaacttgccatagttggtgctttcgtcaactttggtaatgttcggcttttcgaattcgatcatctagtttgtacccctttcaaaacgagaagtgaagatttgtctgcctgaccgccataacggtcgaagggtaacaattaaacacgacgacgctttggaggacgagaaccgttatgcggaaccggtgtaacatcacggatcgcagtaacttcaagacctgttgcctgaagtgaacggattgcagcttcacgaccagagcctgggcccttaaccgcaacttcaaccgacttcatgccatgttccattgattccttcgccgcagcttcagcagccatctgcgcagcaaacggtgttgacttacgactacctttaaacccgagtgcaccagcagaggaccaagcgatcgcattgccgcgagggtccgtgatcattactaaggtgttgttgaaggttgagtggatatgagccacgccagattcaacgtttttgcggacacggcgcttccgcgtagtttttctacctgccatcgatcaatgacctcctttaattattttttcttacctgccatcgttgcttttttccctttacgggtacgagcattgttcttggtattttgtccacgaaccggcaagccacgacgatgacggatgccgcgatatgaaccgatttccatcaatcgcttgatgttcaagttcacttcacgacggagatcgccttcaactttgtatgagtccaaagctgcacgaatcttgtcttcttgttctggggtcaggtcatcttgacgaacatcttccggaacaccggcagtcttgagaaccttttgagcggttgtcttgccgacaccatagatataagttaaggcaatgacaatttgcttaccacgtggtaagtcgacacctgcgatacgagccatgtacaatgacacctcctattttttaatttatattatccctggcgttgcttatgctttgggtttgcagagcagataatcatgacccgacccttacgacggaccactttgcagtgctcgcacatctttttaacagatggacgtactttcatgagaatttagcctccttgagttggcaactacttgaaacggtatgtgatccggcccttggtcaaatcataaggtgaaagttcaaccgtcaccttgtcacctggtaaaatgcgaatgtagtgcatccgaattttaccggaaacatgggcgaggatctcggcaccattttcaagcttgactttgaacatcgcgttgggtagggtatccgtcacggtgccttggatctcaattacatcgtcttttgccacgaagtgtttcctcctaaaaattattggttctattaacgcgcgaaaagggtgaggccgattggcactcaccgcataccgcgatattgtaccataattcttcgactttgaaaacagtcatgaggggcgtgcaatcgtccaagcacttactttgccacagcagccaaaatcgtcttaatatctgcaaacaccttatcgatgtcttgatcaccattaacagtgtggagcaaccccttcttttggtagaagtctaataatggcgtattcatctcgatgtttactttaagacggtttttaacggtttccggcttatcatcttcgcgttggaagaattcgtggccgccacagcgatcacatgtgccggcaacctttggcgggttgtagattttgtgataagttgcaccacatgtcttacagataaaccgaccagacaagcggtcaactaactttgcaggcgcaacatcaatattgataacagcatctaacggcttcttaagatcagctgtgatcgtttcgagtgcctctgcttgttggatggtgcgcggaaagccgtcaagcatgtagcccgcatcggtatcggactcagcaaggcgttccttgacaatgccattggtaaccgagtcgggtaccagttgacctttatcaataaagccttttgcttccttacctaatgctgtgccagcagccatcgcggctcggaacatatctccggtggaaatatgtgctatcggataagtatcctcaatccgttctgcctgcgtgcctttccctgcaccgggaagtcccattaaaatgagattcacgttgcatcctcctctaattgtacgcgctggcatgtatttaaaactgctgtgaacagcttctaaacaatttaacgctgaaactacttgccagtttgtacgctgcttttaacgcgtcaacctttgaaaatggctgacttctgatatcgtttacttcttatcgttcttaaccaaatcgccgcgaataaatccgacgtactcacgcttcatgagtaagccgtccaattggcgaaccaattcaatagcggtcatgacaacaatcaacaggctcgtaccaccaagtccgattgattgcggcagcccccaaatgttggcagccagttgtggcagtaaggcaaccaaaccaaggaacaaagcacccactgttgataagcgcatgagtagccgtgagatataattctcggtttccttacccggccaaacaccgggaatatagctgccttgtttggttaagttttctgcgaccttctcgggattaacctgaacgaacgcatagaagaacgtgaacagaataatcaaaagcgtatagatcgcagttccggctggcttttgcatattgaagatattagtcatgacttgataccatccgtcagtcccatgattcttctgaaaagccattaaaattgtttgcggcgtcacaataaaggaactcgcaaaaataaccgggataacaccggcaacgttaactttaagcggtaggtaactgttgctgcccgcgctggtaacgcgccgagtgtactgaattggaattttataattagcttgctgcacccaggtgacaaacgtgataaccaggatcacgatgactgccaaagctgctaaaaatgcaattcctttccagatttcagaaccagagtatacctgaacgttatctcgatataactcttggagacctgaaggcaggcgtgccacaatcccggagaagatcaacagcgaaaccccgttaccaaggcctttatcagtaatctgttcacccatccacgttagcaacattgtgccgccggtaaggatgataccgattgtgatataggtactaacggacggatttttaaccaagcccatcgaacttaacgtttgaaagccggccgtaatcccaattgcctgaaagaacccaaaagcgatggtcagataacgagtaacttgattcagcttacgccgaccgacttccccttgcttgctccactcgacaaatttcggaacgatatccatctgcagcagctgaaccacaatttgtgccgtaatatacggcgaaacccccatcgaaaagatggagtattgtgccaatccgccaccactgacagtatccagcagtgagatcaagcctgtcgagccgattgactgcagcgccttggcattaacaccgggaaccgcaatcagtgtacctaatcgatagaccaataaaaccgctaaagtgaagaggatcttgttacggatgtctttgaccttgagcgcgttttttagggtcctcagcattagatcacctcaatcgaaccgccagctgcttcaacggcagcttttgctgcggttgaagcttttgcaaccttaatggtcaattttttctcaagtttaccgtctgccagcaacttaacaccgttcttttcgttcttaacaataccggcatcgatcaaggctgctggtgtaacttcagcgccgtcatcgaagcgattaagatcggaaaggttaacgattgcatattctttgcggttaatgttgttgaaaccgcgctttggcatccggcggaataatggcatctggccaccttcgaagccaagacgcgtcttgccgccttgtcgtgccaattgaccttttgtccctttaccagctgtcttaccttgaccgctagaagtaccacggcccagacgcttgcgggcatgacgggagccgacactcggctttaattcgtgcaattgcatactcttgggcacctccttgtcgaaataatgtattaatctttgatttcttcaaccgaaaccaagtgtgaaatctggaaaatcgcaccacgagtggctgcgttgtctggtttaatcaccgagctgttcacccgatttaagcctaattccttcacaattttacgttgcttaggaagacggtgggcagcactacgggtcaaagtaatcttcaattgagccatgtgtttacctcctagtcttcaagcgatgacgcagaaacgccgcgtaattcagcaacttgttcgcgggtgcgcaactgtgtaagtccatccattgttgcccgaatcatattgattggcgtgttacggccaagggatttgctggtgatatcagcaattccggcaagttccataacggaacggatagcgccaccagcagcaaccccagaaccttcttcagcaggcttcagtaaaacttcaccagcgccgaagtggccgattacttcatgaggaatcgtggtgccgacaattggcacttcaatgaggctcttcttagctgcgtcaacagctttacggattgcttcaggtacttcttgggctttgccggttgcgaagccgacgtgaccgttcttatcgccaacgattgcaattgctgcaaaccgtagacggcgaccacctttaacaacctttgtaacccggttgatggcaacgacctggtcttctaagtccaattggtttggatcgataaatgatgccatgtgttggttatcctccttttttctagaattcgaggccattttcacgtgctgcttcagctaaagcggcaacgcgaccatggtacagataaccaccacggtcaaagaccacaactttatgaccatctgcaactgcacgcttggcgattaatgcaccaacctgagcagccgcgtcagtcttgttttcaggatctttaatgtccttatcaagagtggaggcacttgctagcgtcacacccgctacgtcatcaattaattgcgcgtagatgtttttattggaacggaaaacgttcaagcgtgggcgctcgctcgtaccagaaatcttgcctcgtacgcgggcgtgacgccgttgccgagtcttattcttatctggctttgaaatcacaatgttcacctcttgttaaatttgttgaaggttacgactacttaccagtcttaccttccttacgacggacatgttcgtcaacataacgaatacctttacccttataaggttcaggtgcacggacggaacgaacaacggctgcgaattgaccaacaacctgttttgagatcccactgatgatgatctgagtggtgcttgggacttcaacagtaacaccttttggcgcggtcatttcaactggatgtgagtaaccgacgttcaaaacaagtttttcgccttgcttctgcgcacggtatccaacaccaaccagcttcatttctttcttatagccttcggtaaccccaacgaccatgttgtttaagttggcacgcatcgtaccatggatggccttgtaggaatcatcgggacgggtgaaattaatttcgtcgccttcctgatgtaattcgatttccggggcaaaatgacgggtcaattcgcctttagggcccttaaccgtaatattgtcaccatctttggtaacagtaacaccggctgggactttgatgactttataaccaatacgactcacttatcggcacctcctttttgatgttatgaattaccaaacgtaagcgagtacttcgccgccaacgtttttggcacgagcttccttatcggtgataacaccttcggaagttgagataattgcaatccctaaaccgtttaaaaccttaggaacagcatcactcttaacgtatgagcgcaaacccggtttggaaatccgcttcaagccggaaataacccgttcattgttcttaccatacttcaagaaaatgcggatcacgccttgcttgtcatcatcgataacttcgtagtcacggatgaacccttcacgtttaagaatctcagaaatgtctttcttcatctttgatgcaggtacgaccaaggattcgtgacgcaccatattagcgttacggatccgggtcaagtaatctgcgattggatcggtcaagaccattgatttaacctcctttgtctagtgattaccagctagctttgcgcatgcctggaatttggccggcatgtgctaactcacgaaggcaaatccggcagagtttgaatttacgatatacggaatgcggacggccacaccgttggcaccgcgtatattcctggactgcaaattttgcaggccgtttgtttttagcgatcattgacttcttagccaagtagcggacctcccttatttggcgaatggcatcccgacttgcgtgagcaactcgagtgcctcttcatcagtatttgccgttgtaacaatcacaacatccaacccacgaacccgattaaccttatcgtaatcgatttctgggaagatcagttgttctctaacacccaatgtatagttcccgcggccatcgaaggactttggggaaataccgtggaagtcacgaacacgcggcagggaaacattgatcagcttatctaagaaatcatacatgcgttcgccgcgcaatgttaccttggcgccgattggcataccttcacgtaagcggaaaccggcaatactcttcttggccttggtgatcagcggatgctggccagagattagcgtcaattcttctaccgcttcatccaataacttagcattctgagttgcatcaccaacacccatgttcaaaacgatcttttcaatcttaggtgcctgcatggtgctcttatagttgaacttgcttaccaatgcaggggcgatttctttgctataacgttcttcaagacgattctccatgaaaaagtttgtcctccttccctattatttatcgattgcggtgccagacttcttagcaatccgcactttattgccatctttaacttcagaaccgatgcgagtcggcttgttggtttcaggatccagaagcatcacgtttgaaacgtgaataggtgcttctttgtcgatgataccgccttgcggattcgtattgttcggcttctggtgcttcttgatcatgttgatgccttcaacaacgactttgtcagcgctcttgaggactttcgtgatctggccttctttgccggcatctttgccgcgcatgacccgcactttgtcaccagttttgaacttcatgtatcgcacctcctatttggtcagaatgattaaagcacttcgggcgctaaggagacgatcttcatgaaatcgccgtcacgcaattcacgtgccacaggtccaaagatacgagtcccacgtgggctcttgtcagcattgatgatgacagctgcgttctcatcgaacttgatgtaggaaccgtcagcacggcgagcgcctgacttggtacgaacaatcacagctttaacaacatcagccttcttgacaacgccacctggtgttgcttgttttacagttgcgacaacaacgtccccgatattaccggtcttgcggtatgaaccaccaagtaccttaatgacaaggatttcgcgcgcgcctgagttatctgctactttaagacgactttcttgctgaatcacggatttggtcctcctttcactctaaaaatgattagatgataactgccttttcgacaatattcaataaacggaaacgcttattgcgtgataaaggacgagtttccgcgatttggacaatatcgccaactttagcgctattgtcttcgtcatgcgcataaaacttcttggaatacttaacccgtttgccataaacagggtgtgttttatatgtgctgacttccacggtgatggtcttgtccattttatccgagaccacgcggccttgataaactttacgagaattacgttctgccaaggtaaatgtctcctttccgattatttattgagttcctgttgccgaaggaccgttttgatccgtgcaatgtttttccgaacttgcttcaagcgagcggtgttttccaattggccagtcgcctgttggaagcgcaagttgaacagttcttctttatattgcttctctttgtcgagcatctcagcagtggttaatgcagtaatttctttagccttcatttgattgcccacctacttcctcgcgtgaaacgatcttggtgcggattgggagtttgttggatgctaaacgcaaagcttcctttgcgactgcctcggacacgccgccgacttcaaacatgatcttttcacgtttaacgactgcaacccatccagttggtgcacctttaccattacccatccggacgccgacacctttactggtgtaggacttgtgagggaaaatgcggatccatactttcccaccacgcttcatataacgggtcattgcaacacgcgctgcttcgatctggcggttggtgatccaatgggattccaatgcttccaaaccatattcgccgaagtcaacgttcttgccgcccttggctgcaccgcgcatcttcccacggaattcacgacgatgcttgacacgcttaggtactaacattgattatttccctcctttcgcattattttgctgtggcttttcaggtaaaatttcaccacgattgatccaggttttgatcccgatccggccataagtcgttgctgcttcttcccatgcatagtcgatatcggcacgcaaggtatgcagcggaactaaaccttcattgtaatgttcacgacgtgcaatgtcagcaccgtttaaacgaccggaagcttgggttttgattcccttagcaccggcacgcatggtacgttgcattgcttgacgcattgcacgacggaatgcgatccgttgttcaagctgacgcgcgatgttttcgccgacaagcttggcatccaaatcaggttttttgatttctacaatattgatgtgaacttggcgaccagtcagcttattgagctgcttgcgcaagttttcaacttcagaaccgcctttaccgataaccatacccggtttagcagtatgaacggaaatgttgacgcgctttgcagcacgttcaatttcaatacgtgatactgaagcatcttgcagcttcttattgatgaagtttcggatttcaatgtcttcatgcaagtagtcagcaaagtctttgtctgcataccacttggcatcccagtcacggatgacaccgacacggaaaccggttggattaatcttttgacccacgcgttatccctccttatgcttctttttcggatacaaccacggtaacgtggcttgtccgtttattgatcggtgatgcgctccccttagcacgaggacggaaccgtttgagggtcgggccttcgttgacataagctttgcttacataaaggttttgtgcatctaagtcatagttatgttctgcattagcaatagcagacttgagtaccttttcgatgatcggagaaccggaacgaggtgtgaactcaagaatcgccagtgcttcagcaacatcgcgaccacgaatcaagtcgattaccaagcgcgctttgcgagcagcaatccgaaccgtcttggccgttgccgttgcagacgtaatttgatcagccatgaatgttgtgctcctttctagcgtgctgttgtcttcttgtcatcggtgttgtgaccgcggaaggtacgcgtaggaacaaattcgcctaacttgtgaccaaccatgtcttcactcacgaaaaccgggacatgcttgcgaccatcgtaaacggcgatggtgtagccaatgaaacttggaaaaatagtagaacgacgcgaccatgtacgaataacggtcttcttgtcgttatctgcctgcgcttcaatcttcttcaggagatgagcgtcggcaaaaggtccttttttaagactgcgacccattgtgtgacctcctttaatcgatgtaacacttcaatgtgtttacttcgtcttgcggtgacgaacgatgaatttctcggatttagccttgtgatcccgggtcttcttacccaaggtcttcttgccccaaggtgataatggtgacggacgaccgattggtgctttaccttcaccaccaccatgcgggtgatcgttagggttcataactgacccacgaacagtcggacggaagcccaaccagcgcttacggccagctttaccaatgctaatcaattcgtgttgttcgttaccaaccgcaccgatagtcgcacggttctcggctaataccaagcgaacttcgccggaagcaagtttgatggtaacgtacttatcattatccttacccagtaactgagcggaaacgccggcagaacgtgctagttgtgcgcctttgccaggtttaagttcaatgttatggatggtggtaccagctgggatattctttaacttcaatgtgttgccgactttgatgtcaacatcgtcaccggagtaaaccttatcgccaaccttaagtccctttggtgccaagatgtaggacttaaccccatcttcataatgcaataatgcaatgttagcggtccgatttggatcgtattcgattgctttaaccgttgcggccatattgtctttattgcgcttgaagtcgatcacacgataaaactgtttgtgaccaccgccacgatgacgcactgtgatgtgtccgtgagcattgcgccctgctgtatggctttggctgaccagcaaagtcttttcaggctttgtcttggtgatttcagcaaagtctgagccggacatgttgcgccggccattgcttgttggtttgtacttaataatcgccacgtgtttaacctcctataacaaatttttgttacttgttatcgttatcttcatcagcgaagatcttgatttcttttgaatcggcgctcaaggcaaccaaggccttacgacgacgacgcgtcatgccttcgtaacgaccttggcgcttcttcttgccgcgaacgtttgcaatgttgacattaacaaccttcacgccgaagatttcttcaactgctttgcgaacttggggctttgttgcatgaattgcaacttcgaatgtgtatttacggttgtccatttcagccatcgattgctcggtgacgatcggacgtaaaatgatatcgcgtgcttccattatgcaagcacctcctcaatcttttggagcgcagattgggttaagatcaatttcttgtagttaacagcgtccaagacgttgataccctctgcaggaacaactttcacattcggcaggttacgtgcagctttggcagcaacatcattgccatcttcaagcacaaccagtgccttatcgttgactttgagtccgtccaagacatttaaaaatgccttggtctttggagcatcaaagctcaagccatcaacaacgaccagatcgccatcgagaactttttgtgaaagtacggatttaatcgccaagcgccgaaccttcttaggcagcttgtaagcatagctgcgtggtgtcgggccaaagacgatcccaccgccgcgccattgtggactgcggattgaaccttggcgggcacgaccggtacccttttggcgccaaggcttacgaccgccgcctgaaacagcggaacggtttttaacggcgtgagtaccctgacgaagggaagcgcgttgcatcacaactgcgtcaaacacgacgttttcatttggttcgactgcccagattgcatcgttgagttcaaccgtgccgttttctgagccgtcttgcttatataaagtaacgttagccattagttattgtcctcccttcgtattatttagctgctttaacagcagaacggattgtaacaaaggacttgttagcacctgggacattgcctttgatcaacaggacattgtgttctgtatcggcggcaacgacttgcaggttttgcatggtgcgggtatggttacccatccggccaggaagtttcttacccttgaagactttgttgatgatagctccaagtgaacctggacgacgatggtagcgagaaccgtgtgccatagggccgcgggactgaccatctttcttgatattaccttgataaccatgacctttggaagtaccggtgacgtccacaatgtcgcctgctgcgaattcgtcagctttaacttcgctgccgacttcataatcactaagcgctacatcgcggatttcgcgaacgaagcgcttaggggtcgtgtcagcctttttggcgtgaccgacgcttggcttattcgtcaagacttcacgcatatcgccgtagcccaactgaactgcttcgtaaccatcagattcaacggtcttgacttgcattacaacgttgggtgttacgtcaattacagtaacgggaacaagttcgccgttatcggtgaagacctgcgtcatgccaacttttttgcctaagattcctttacgtgccatgggtacacctcctattttctaagaattataatttaatttcgatatcgacgccgcttggcaaatcgagcttcattaaagcatcaactgtcttcggtgttgggttaacaatatcaatcagacgtttgtgcgtccgcatttcgaattgttcacgtgaatccttgtacttatgtggggaacgtaaaaccgtgtaaattgtacgttccgttggcagagggatcggacctgaaattgttgcgcctgtacgctttgcagtgtcaacgatcttgtctgcggattgatcgagaatccggtgttcataagccttaagccggatccgaatcttttgttttgccattgtgtgacctccttcgtctattatcagttagtagactagctccgtgaaaattaccaactcgccaccgtggcaaagcggccgggcgtgtcgcaacctctcacatccacgctactctggttcatctctggaaccaagtgcatagttatcccctttgagaaacagcactcttgatagtatacaaaaactcccccgccattacaaggttttctttcgatttgcacaaaaaagtttgtgcgcttgatgctgagaaaagcaaacttgttttactgatcagctgtatgtgctacattcaaattaaatccagtattcgatttgattaaggagcatgccatgaaattcgatcactataaaaagtttatcaacgtagccttggatcttttgctcggtctgctcgctattgttgtcgtcatcttcatgttacgctacattatcgacattgggagtttaatccttcgaccgttatcggctgacctattcggcaaggtcattcaggaagtcacgagtttctttatgctgtttgaatttgtcattatgctgattcgctacattgaagaggggcaccatattccgattcgttatctcattctcatttcgatgacggccattttacggcagctgttggtcttacacgatcgtggtaccgaaaccttgcttttgacattggcaattctcgttttagcaggcgttttgacggtcttctcctttgttagtggcgatttcaaacactcgcgcggagaacaggatattgatatcgatcagcacttttgactgtggcgatcttgttttgccttagctactgatccaggctctgatgtattcttgttctttagctcgggttatatgacttcacgcaaaaaggaatcgcagctgaccgttgcgattcctttttgcgtgaatatatcctgaccggagcattcacaattagataattccctttaattaaagtttgccaaccaagtcagcacccggcttcaaggttttctcgccaggctgccagttcgctgggcaaacctgatcaccgtgagcggcaacaaattgtgctgcctgaagcgtccgcaaaatttcgtcagcgttacgaccgatgccgaagttgttaacgacataagcttgaatcacgccatccgggtcaataatgaaggtgccgcggaacgcttgaccactcgcttcatcccgaacatccagcgccgttgccagtttaccagccggatcggcaagcatcggatactgaattttcttgatcgtcggactcgtctctgcccatgccatatgcacaaattcggtatcctcagaagcggaatagatttcggctcctgcagctttaaaacgatcgtagtgatcctgcaaatcgcctagttctgtgggacaaacaaatgaaaagtcagctgggtagaaacagattactgcccacttaccttgcaaatccttatttgtcaccgtgtgaaaatccccattttgataggcggtcaatgaaaagtccggtaaatgctgtccaataaagctcataatattccctccatttttagaatgattattatttacaacttaacggtaccttttcatgcccgcattttcaagcctaaattgccacgaattacctgtgacagttacccacataaatcaaaaatgttgctggttagcttgccttctttccaaaccgccgattaaaaaaacaccatctgtttcaatagacagtgtgtttaaaagtatgctcttaaggcgttatgtgaacttcctagcgcaaacgattcctttcttcatgccgataatgtgccaaaccttcttctaaaccgcgaatgacataatcacgaatatactttggcgcaagcactttgactaactctgcctgtcctagcaaccacatacgaatgccaaagccatcattaaccggaatggtgatgtggtagaacttttgcgcgtaaggattcttggacgttggctgctcatcgactttttcatcatgaacgatggcatccggaaaacgatcaaggacaaaacgcgggtcatagccatacaggatttccagattaattggcttgcctaagtatggataccatgtgtgtttttgtaaccggccgccgcgaaaacgtgcttcataggcatgttgcggttgacgtccatggtaagtaatatggctcatatcatcaagccgaaagcgcacaaactgaccattgtccggatcatcaggctgctcgtcactaccatcaataatgagataaaaaaataagtcgccaaaatataatccagttggtaggcgccgatcaaaatgacgggttacgccatgataagtatgatcgaagctaatggtctcatgcttcaaaatcgcctgactcaaacgtgccaaccgtgctgtgagtgctacttttggtacccctttatactcgaagatcggatttcgtaccacatcgcttaggcttcgatgctccggcccttcaggcagcaactggtgaagtagcgttttcatctcggaagttgccaagccccgacttgcggtcaaaatcagcgtcattgctaataactgcccgtcatttaagggactgtggccagttgatagtacagttgacttgaagcgataatcacccgtggtacttgcgacaaatacatccggctcatccatcacgtcatcgaacatccgtttaatgacactaatatcacgccgaatggaagactcatctttattaaactcgtgcattaaggtttgtttgtttaatacctctcctcgcatgagtcgcagcataatcgttacaattcgttcctggcttgacacgttgcgccacttcctaacgtcacctaataataacagtatcatacgcgttcaaaaaacgtgccgtcaatcatctcaagaagtcttccacgctcataatgtactgaccagcctagagatcgggcgaaatcacactcactttctataacgcgttcgccggcgcagggatctgcgtataaggatcttgggcgcaatggtcaaataccgaccatcacggttaaggccgcttatgttctagctcatgcccataacgcgttcgccggcgcagggatctgcgtgtaaggaccttgggcgcaatggtcaaagaccgaccatcacgcccaaggccacttacactccgatccctaagcgcgccggttcacgctcacgctcaataaaaaacggtgctgccttgaacaggcaacaccgtttttgtcgtcggtgatcacgaaagactagtctttcgtagcaacaccgccgccatttttcttgataatttcttcttggatactctttggtacagcttcgtagtggtcaaaggtcatggtgaaagtaccacggccttgggttgcactacgcaaggtggttgcatagccaaacatttcggccagcggaaccattgagttaaccaattgcgcattaccgcgcgcttccataccttcaacgcgaccgcgacgtgccgtgatctggcccataacatcgccaaggtattcttcaggcgcaacgacttcaacgtgcatgatcggttcaaggatcacggcgccagcattcttcgaggcattacgtaacgccatggaagcagccactttaaaggcagcttcagaagaatcgacttcatggtaagaaccatcatatagtttggccttcacatcaattaatggatagccagccaagacaccgtttgccatggcttctttcagaccttgttcaacagctgggatatattcacgcggaacaaccccaccgacaatggcattttcaaattcaaagcccttgccttcttcgtttggtgtgaactcgatccaaacatcaccatattgacctttaccaccggactgacgaacaaacttaccttgtgcagacgcttctttagtaaaggtctcacgataggcaacttgtggttcaccaactttagcagccactttgaattcacgcttcagacgatcaaccatgatatccaaatgcaattcacccatgccggcaattagtgtttcaccagtttcagggttggtctcagccttgaatgtcggatcttcttcagagagcttctgcaaaccgatatccagcttgtcttggtcttctttagagtcaggctcgatggaaacctggataaccggatccggaacatccaatgattcaagaatcaatgggtggttaacatccgtcaaagaatcccctgtggtggtattcttcaaaccgatagcagcagcgatatcgccggaaaagacttccggaatttcttcacggtgattactatgcatctgcaacagacggccgacacgttcacggttgtcttttgttgcgttcaacacataggaaccagcttccagtgtgccgctgtatacccgaatgtaggtcaaacggccaacaaatggatcagtcgcaactttgaaggccaaagcagcaaacggcttgtcatcaccagcggtcagctcaacggcatcgcctgtatcaggatcggttgcatgatacggacgaacatccaatggtgacggcaggtaatcaataaccgcgtccaacagcatctgaacacccttgttcttgaaagctgaaccagccaaaaccggatagaattccaagttaatggttgctttacgaatagcagcctttaattcagcattggaaatctcttcgccttcaagatacttgtccatgatgccatcgtcaacgtcagcaacggcttcgacaagttcgttgtgggctttttcggcagcttccttatattcatcaggaatgtcaaccgtatcccacttcgtcccgagttcatcttcatcgtacaagtcggccttcatttcgatcaggtcaatgaccccttcgaacttatcttcggcaccgattggcaactgaacggcatgggcatttgcctgcaaccgatcatgcaaagttgacaatgaatagtcaaaatccgcaccaatcttatccatcttgttaacgaaaactaaccgcggaaccccgtatgttgtcgcttgacgccaaacgttttcagtctgcggctcaacaccggattgggcatccaaaacggtgatcgcaccatctaacacacgcaaggaacgttcaacttcaatcgtgaagtcaacgtgtccgggggtgtcaatgatgttgacccggtgatccttccagaaagccgtggtagcagcactggtgatggtgatcccacgttcctgttcctgtggcatccagtccatctgtgaagctccttcatgagtttcaccgattttatgaattttaccggtataatacaaaatccgttcagtcgtggtcgttttaccggcatcgatgtgagccatgatcccgatattacgggtacggtctaacggaaattcacgtttgttggccatgtggcgtattgctcctctcttgattcaactggctttatacaaagaatggctactatataccaaaccgcggatataatagccaaaccatcttaccaacgataatgtgcaaatgcccggttagcatcagccatcttgtgggtatcttcacgcttcttcactgcggcgccggtgttgttagcggcgtccatgatttccttagccaagcgttcgtccattgtgtgttcaccgcgttgacgcgaatactgaacaatccaacgcaagcccaaggtggtccggcgatccggacgaacttcaatcggcacctggtagttagaaccaccgatacggcgagctttaacttccaagaccggcataacgttcttcattgcttcttcaaaaacgtctaacggttcgttcccggtttgtttcttaatcatatcaaatgcatcatataaaatagtggatgccttcccgcgcttaccatcaatcatcaagtggttgattaaacgggtaaccagctttgaattgtaaactggatcaggtaaaacatcacgttttgcgacactgcctttacgtggcatgcattttgcctcctcttaaaagtattcgtctgcccaagctgctcacaaaccggctcggctagcaacccaaagcgattcctgagtttcttttaggctgacgcatattctgtctataccgcacaaagcggatctaaaaatttgttgtcatcatcatgcggctaatccgcactgattttgcttacttcttcttaggacgttttgcaccgtacttcgagcgaccttgcatccggccgtcaacaccagcggtatcaagcgcaccacgaacgatgtgataacgaacccctggcaagtccttaacacggccgccacggatcaagacaacactatgttcttgcaagttatggccaatacccggaatataagctgtcacttcgatcaagttggacagacgaacacgagcatatttccgcaaagctgagttaggtttcttaggtgtcatggtaccgacacgagtagcaaccccacgtttttgcggtgctggattactggtaaggctcttcttcttgctgttgtaaccgaagttcaacgcaggagagtctgacttggttgatttggatttacgaccttggcgaactaattgattaatagtaggcattaagcttctccttccttatattgcatcttttttaagtccacacatccaggcggttcattttttgtgataaaaaaacggccaaccgaacggcgacggctcttaacccagtcagcacgtccggacaacccgaataaactggaaaaaagcacctttgatagtgtactatcctatgcgcgctggtgtcaaggaaaacaatagaacattcacttgacatttgaaatggtgaacttttaacaaaagcgtatgaacgacaaccttttcacggttatatttctaaataaccgactaacttcaaccatagcaaaaaagttctgtaaagcaaccccgaaaggcagcttcacagaactttttcgaatctctaaccaaacgtaacgaccaacttaatgattataaacgtttgcgccgacgtaaaatcacggtgctgccggcaatggtcagaatcaaaatacctaatagaactaaggtgacagtatcacgatcgccaaagctgccaaagagcaatcggcgtgatggctgttcatgacgaacgttattaccatggcttccagaaccggcagcttcagatccggcttcagatcccgatccagttccagctccaccagttccgtcagtgcttggcaacgtgtgccgtttatccgcaatgactaattgcatcgtgtcgcctgctttgacttctacagcaactggttgcgcataatcagggttaatgctgtacccagcaggcgccttgatttcagttaaccagtaccttcccagtttcagatggttgaaggacgccaaaccgttagcatcggtcgtgatttcctgacgataaccctgatcattggtcaaccggaaaaccgcaccggctaatgcatgatcggtattcgccgcatctacctttttgacgaccaatgtattgacttgataatttgccacctggaccttgatcggctgttgttgattgagtttggccaatgcagcggccgtttgtgtcaaatcagtttgttcgactttaaaggtgatcttatcggtgttgagttcatatttcggtaaggtcttcgtttcttcaaagtagtacgttccaatcggtaaattaaatggcaacttgatttggccattgcgatccgttaccaaatccttagccaggacccgatcgtcactgccatagagattaaaggtaaccccgccaagttgcttgtcaaaattaccatccgtcttttgcaactgaacggatcgagtgaattcaggttcaatgattgggtcaaggctaatcttttgatcgcccttgacgttcacatcgattcctttggccaagttgtctggaatgacataaccgcgtggagcttgggtttcaagcagttggtacttaccttcatatagatcatgatcactgagcgttacgattccgttttggttggtaatcgttgcatgccaagacttactatgatcgaccgtaccatcttcacgataacgatacagcgtaaacttagcaccgatcattgtcatcttaccagggaagcgttgatcaccagtagtgtccgctttcttcgtgatgacaacctgacctgccttctcctggttcgttgcggttaacttcacttgggcttcgtcagccttgatcgtaaagtcaacgttcccagcagccaagctcttttcccaagcttctttccgagcgccactggtgtgttccttctgatcagtcgcatcgccttcgtaatgcttcggcgcttcagtttcaactagacgataagcccggtcagacttcaggtcttcaatggtgtattcgcctgccttgagtggggtttcaaagctgcttgctgttccaaacttcaactggccgtcatcattggtcttcatgtcagccttcaaggtcttgttggttacagtgtccactagtttatacgtggcacctggcaacagatacttcttgagtgttgctgcgtcatccgtcttcttgacgcggttgtcgtacttcgtcaaggtaacctgataaggatcgtcagcgatttgcttattgaccgtaatcggtgttggcgtgatcgctgaagacagcgtaattgcatgtaccgttggatctagtcgatagccacttggcgctttgacttcagttagcgagtaagtgcccaacagtagatcgccaaatgaggcaatccctttttcatcggtggtgacgtcgcgactgtagcctgtgctgttagtgaggcggaaagtagctcctgccagcgtatgattcgtgtactgacggtcaactttctgaacgttcaatgttttgatctgatagtttgtgacgccgaccgttatcggcttctgcttattttgtgctgccaaatcagctgctgtttgcgttagatccgtttgtttaacggtaaacggatgtttgtcagtgtttggccgatatggcggcaaggttccagtctcttggaagtaatactgtccggctggcagatcaaatggtaacgtaacttggccatccttatttgtcactagatccttggcaagctcggtaccgtcatccttgtaaagtgcatacgtgattcccgcaattggattgccaaagtcaccatccgttttagctagttgggcagtacgccgataaagtggctctgtgatcgttggcaatgtgagtgtctggtcaccagtgatcgtcacatctatacccttagccaagtcatcaggaatgacatagccagttggtgctttggtttcaactaactggtacttgccttcgtacagatcggcatcgttaaaagtgacggtaccatcgttactggtgatggtagttgtccaagtcttgtcccgatcaagagtgccatcctcatcgtaccggtaaagcttaaactcagcaccggtcatcggctgtcgatcagggaatttgtcatctttgattgtttccgcctgtttcttgatggctagttgtccgggtttcttttggttcgttgcagttaacttcacttgggtttgactacctttgatcgtgaagtcaacatttccggcagctaaactcttctcccaagcatccttctgagcgccactagtatgcttggtctgatcagtcgcatcaccttcataatgcttcggcgcttcagtttcaaccagacgataggtgttgtcggcttttaggccttcaacggtgtattcgccagctttgagtggggtgtcaaaactgcttgccgctccaaacttcagctgaccgtcatcgttagtcttcatgtcggccttcaaagtcttgttcgtcacagtgtccactagtttatacgtggcacctggtaatagatacttcttaagtgtcgctgcattatccgtcttcttgacacgattatcgtacttggtcaaagttacctgatacggatcatcaacgatttgcttattgaccgtaattggcgttggcgtgatcgctgaggatagtgtgattgcatgtaccgttggatctagtcgataaccacttggcgctttgacttcagttagcgagtaactacccaacaatagatcgccaaatgaggcaattcctttttcatcagttgtgatatcgcgactgtagccagtgctattggtgaggcggaaaatagcccctgccagcgtatggtcggtgtactgacgatcaactttctgaacgttcaacgtcttgatctgatagttcgtgacgctgaccgcaatcggcttctgcttgttctcggctgctaaggcattagccgtctgggttagatccgtttgcttaacggtaaacggatgcttatccgtatttggtcgatatggccgtaatgtcttggtttccttaaagtagtacgagcctgctggtaaattaaacggcaagttgacttggcctttttcgtctgtaaccaagtctttagcaagctcggttccatcttcacgataaagggcataagtgatcccagcaattgggttcccaaaattaccgtcagtcttgttcaaggcgattgagcgccggaaaacggattcctcaatcgttgggaacttcagtgtttgatcgccagtaatctcaacatccacgcctttagccaagtcatcgggaatgacatagccggttggtgctttggtttcaactaactggtacttgccttcatacagatccaaatccttgaaagtaaccgttccgtcgttattcgtgataacagtatgccatgaacgactttgatcaagcttgccatcttcttgataacgataaagcttaaactcagctcctgtcatcggctgacggtcagggaacttgtcatccttgatcgtttcagcctgtttcttaatggctagttgacccggcttcttctggttggttgcagttaacttcacttgggtttcatcagccttgatcgtaaagtcaacgctcccagcagccaggctcttttcccaagcatccttctgagcgccgctggtgtgttccttctgatcagtcgcatcgccttcgtaatgcttcggcgcttcggtttcaactaggcgataggcccggtcaggcttcaggccgtcaatggtgtattcgcctgccttaagtggggtgtcaaaactgcttgctgctccaaacttcaactggccgtcatcattggtcttcaagtcagccttcaaagtcttgttggttacagtgtccaccaatttatacgtagcattcggcaacaagtatttcttaagcgtcgctgcatcatccgtcttcttgacgcggttatcgtacttggtcaaggtgacctgataaggatcatcagcaatttgcttattcaccgtgatcggcgttggtgtaatcgctgaagataacgtaatcgcatgtactgttggatctaaccgataaccacttggcgctttaatttcagttagtgagtaattgcccaacagtaggtcgccaaatgaggcaatccctttttcatcggtggtgacatcgcgactgtagcctgtgctgttagtgaggcggaagaccgctcctgccaatacatgatctgaataggtgcgatcgactttctgcacgttcaacgttttgatctgatagttcgtgacgccgactgttatcggcttctgcttgttttgtgttgccaaatccgcagccgtttgcgttagatccgtttgtttaatggtaaacggatgtttgtcagtgtttggccgatatggcggtaacgtcttagtttccttaaagtaatacgagcctgccggtaagttgaacggcaagttgacttggcctttttcgtttgtgactaagtctttggctaattcagtaccgtcttcacgataaagggcataagtgatcccagcaattggattgccaaaattcccgtcagtcttgttcaaggcgattgagcgccggaaaactggttcctcaatcgttggcaatgtgagtgtctggtcaccagtgatcgtcacatctatacccttagccaagtcatcaggaatgacatagccagttggtgctttggtttcaactaactggtacttgccttcgtacagatcggcatcgttaaaagtgacggtgccatcgttattggtgatggtagtcgtccaagtcttgtcccgatcaagagtgccatcctcatcgtaccggtaaagcttaaactcagcaccggtcatcggctgtcgatcagggaatttgtcatctttgatcgtttccgcctgcttcttgatggctagctgtccaggtttcttctggttggtcgccgttacctttagctgcgtctgatccgtcttaattgtgaaattgacacttccagcccgtaagcttgcttcccagcgctgacgttcagcaccggttgtcaagtttgcttgatcgctggcatccccgcgatagtgctttggtgcttcagtttcaactaagcgataagcacgatcagattgtaagccctcaaccgcatactcaccagctttgagtggcgtgtcaaaactgcttgccgcgccaaacttcagctggccgtcactgttagtcttcatgccagctttcaaagtcttgttcttcacggtgtccacaagtttatatgtggcacccggcaacaagtatttcttaagcgttgctgcatcatcagacttatcagcgcgattatcatacttggtcaaagccacctgatacggatcatccgcgatttccttggtcaccgtaattgcgcttggggtttcaccagaagccaaagtgattggataaacggttgtatcgagtttataacctgctggtgcttttacttcagtcaatgaataatgacccagcagcaggtcgccaaatgaagccaagccgtctttaccagttgtgatgtcacgactgtagccggcactgttagtcaaccggaaagttgctccggccagcatgtgatccttatactggctatcaacctttttgacattaatcgtcttgacctgatagtttgtgacatcgacagtgatcggcttttgcttgttctcagtcgctaaggctgctgccgtctgtgtttgatcggtttgttttacggtaaatgaatgcttatcagtatttggccgatatggtggcaatgtcttagtttctttaaagtaatacgagcctgccggtaaattaaacggcaagttgacttggcccttttcgttggtgactaggtctttagcaagctcggttccattttcacgataaagggcataggtgatcccagcaattggattaccaaaatcaccatcagtcttgttcaaagtgacagcgcgtcggaaaactggttcctcaatggttgggaacttcagcgtttggtcacctgtgatctcaacgtccacacctttagccaaatcagttggaatgacatagccagctggtgctttggtttcaattaattgatacttgccttcatataaatcattggcgttaaacgaaacggtgccatcggaattggtaacagtggcttgccacgacttatcatagtcaagcttgccatcatccccatagcgataaagcttaaacgctgcccctgtcatcggctgacgatctgggaagtgatcatccttaatcgtttctgcctgcttcttgaggtccaactgtcccggtttcttttgatcgtaggccgcaaccgttgctgttggcgtttcatcgctaatggctgtcgtgacactgccggcattaagactgtcgatccaaagttgcttatccggtccgctggtgacattggcctgatcatgggcatcaccgcgataatgttccggtgcttcgcgttcaatcaacttataatgccccggcttaagcccttcaagcacatattggccggccttcaaatctggcttaaagtcatcattcgtgtaattacctgaaaaacttgtcgccgtgccgaccgtgatctgaccatcatcgttagtcttcaagtctgtcagtaatttcttctgggtgtccgtatcaatcaaatcgtaagtggcattggcaagctgatattgtttgcggttggcttctgactggccttcagcacggttatcatacttggtcaaaatgatttgataaggttgattttcaacttcttgcgtctggatcgcggtgccactgtcagacgtggtattcaatctaatcttttgtggtgccattggtttgtaacctgctggcgtattaagttctgtcagcgtgtaatcaccaagtggtaagccttggaaagtggcggttgaattttggctattcgcatctaatttagttgtcgcttcaaacgtgtgggtaccatcactgacgcggaatttaacgccagggattggtgcgccgctaacgctatctttcttttcgaccactaaattggccagttgggtaatggtttcaccactgatgccggaatcccatgaaggtaggaaaccattcgtagtggcaattctggcattttcaggtacaccgtcacttggttttttagtcgtttgacttccatcccacgcaaccgcacttgtgttgccaacagttcctgaattcttactactcgttgcataataaacattgacccgatagttatttaacggattgccatcggtttgtgtcaaattaccaaaagttcgatggaaggtgaccgtgaagttattaccgtccaaggcaaggtcataatcttttcctttatctaaagtgacttcatctgctgaaccgacttgtagcgtcactttaaaactggtggcattgatttctgcgccgcttccgtagggttccaaggtgtccgtaatgattggattcaccattggtcggtatttatcttgaatattctccagttgaacatgccaattaagcacattcttctgcttggcatcttcgctaactgttttattaatcggcgtccagtaactctgcgccgatttagaggcagacggattaaacgttggaatcgtcgttgtcgtcttagtgtctgtcacggttgcttggttcgtaaagttaggatcgttatagttccattgattagcacgttttgtcttgaaaacaacccaaacacgaccggtgtcgatattgggaaaatcgaaatccaattgttgggttagatctttattgttcttaagccacgtatcaggtggattggtcggcaataagctttgctgtttagcatcatcagctgttaatgcggtggatacccagccactagtgccgtagtatggattggttttgatttcttttacatcaccggaagtcgttggatcaccggtatttgatggatcaacgccatctggtcccgtgacttcataaaacttgatggagtcaggaattagctcgtaattaaccccatcgaatcgcggcaaaatgtcagtcaaatgcaaatgaccatatttaaggcctagctgattgaccaacacaccccaatactgcgtgtctggtgcatcactccaggaattcttcaaggcaccgctgaaggaacctttttgtggcgttggtgttgaactcccacctccacttgcgacttcatcatcacctggtggtaggtcaaagaagaaaaaggcgcgattgttgagcgctttagctaaagcatcgttatcgtgaccaacttgccccaacttcagcatatccagctttgtatgcgtataaatgacgatttgagaatcggtttcggcatacttgcctttgagtgtcacgacaaatccacgaattcccttttcttgaccattagcatcgatttgaccgatcttgtctttatcgttgtattgtttgacagcagtctgaacatcgccatcgttagtactcatggtatagtcggtttccggtttcagtaaggttcgattcccatctggatcctgtgcgtaaactaaaataccgtcatttgcaccatcgtcatcatctttagtcacatactccccagagatagtattgatattggcggcagtcggatcagtatctagtttgtcgaccccatccgggaataaatcaaatatctttccatcgcgcatattacggaacgttcgattagcattaatccgccatgtcatttgcccaagatatgcatcaatcttgccactaactttttggattgcgcttggcaatctaacgggataagtggcatgtgtgtaatgatttctttgatcattgacaatattggatatgtcactgccgttttccggtgtattttttagcttcgtttgatattgaattcgaaatgatgcattgtcaggtaagtcgccgccacccagataagttaaagtaaactcaccgttacctttatccgttaatttgaaatattttgcaatatcatctttcgaaacagtgggatttgcattttggtcgaacgtaacctgaaagactttcaaagattgggtatcaagcgactgattatcgtctttttcaatcttgggctgaccatgatcatcggttccattcacctgtttaccaaaacgatcggttaaagtagctccagccttcatcgtgtccatgctaaagtcccaatcaatctgccagttcattgcccgaaagttgttggtaatatcgccggatttggtgatcgccacgcctgaattacgcatcgtggcgctcttgtaaccatacccgttatttgtttgcgaaccggtcagaaaacgatacccttcaactaacgcgctgcccattttaccggtatcgtccaaagaacgatcaatacttgccgtgtaatctacttgatagccagtggactttttaaatccgcctgtcaaataaatcttaacggtacgtttgtcatcggataagaccgcgtgataatctcgccctgctaccagcgattttgtggcttcggtaaagtcacctaacacattcacgggtgcagatgaaaccttaattttcgccaaatcgctatcactaaaagtcagtgatttcggataggtttcaccgctgccttgtgcggtcaaggtcagttccatgtccgcgtttttagatagcttagctggatcactgtcccatttagtcggatcggtcttactagtttcagcgccatttaaattaaacttagcactaccttcaataccagtcgggttgaaactttgcggtgttgccttagggtcagctacctccacaggctccgcattcgatttgaagctgattgggatcttggtatcgtgatctttcgtgtgaaataccagtgtctggtccagtgagtcattggctgtgagctgcttaaagttggtggtgatgttcaccttccaagagccaaagctaacagccttcaatagtttgatggtcaactgagcagtggtgtggtcaaaactgtattcagctacgtccccatcaaacacaccgctaccatcttgggcaaagtcaatctggttttttggcagcgtcgttgtaaatgaagcgcctgctggaaacggcgtacttgtttccggtattataaatgtcatctccagcttgactgtactctgctgctcaatctctgtacctaatggttgcccattgccgtcttttaaaacaacattagtgaaaatattgggcaatttaacatcatcgtttgtctctgctgctgcgcttgcatgagtgcccggagttgccgcctttgctgacgacgaagctgaacgctcactgttactggcaatcgtggcagatgcacggctcttaaacagtaacgtggtttgctcagaagctgcgacgctaaagtttttcgtctgttcaatggctgtataacctgcgacagactgtgtttccgtggcagatagtttccgactggcaagttcgagatggttgcttgcccgtcttgactgatactgctagttgccacaacttgatgggattcattgcgaatctcatacttagccccatttaacggtgagccttgttcatcttggttcttaatcgtgagtgcaccagtcactgcttgtgtcgggttctcggctgcaagggtcagtgctggtgaaagcagttgcacgatcatgcctaggatcacggtaaaataaaccccaaccttaaacatgaagtgccatgttttcttgacacctagctcctccatgattttcctcttcctcctcctagaagatttgtctggcccttccccatgaggccattaagttataaattatgcatgtattaattaaccttaagctcaccattattgtataacactttttataatattgaagcgtttatatgaaatactcatcaaatatatattttcccaaaataatattttggttaaccgtggccttttttctcccacgatttagcctgaaaagtttttaaaaatgcaggttttaagagaaatacatttgtcattttacttactttttgttacgaaagcgttgtcgatattgctaaatcgatcatattgcatcgttatcaagcgccatccattttttagcgaaatttattctatgaagtgaggtggtggctttgattctaactttatttttactaaccgtgatcagcgtaacaaagcgtttaactagcattaatcagtcagttcattgtgttttggcgattcttttagggataagcagtacgacctggttaccttttttcctcagtatcggtttgcttatgtttagcattgctgattggcatgaacgcagcgtttcactcatcaatttttgtggctggtggtttggtatcattgtggtttttccctgcaatttgtttaatttaatgatgttaggttccatggttggcgggttagcactgatgtcgcacggtttaggcagtgctgatgttttactgattgcattattaggtggcgttctgcaattagaagctgccttggtcatcacgttaattgcttgtatcagcgctggcggtcactggttcattacccgtttagagacgttaccgatgattagtcatatagcgatcggttacggttgctttagtttggcagctaattgccttggcattttttgatcgtggtcatttgtgtacaagtcaaaacgtatgccttggcacagagattggtatgtaagcagctcgtgaccgttccagctcgcgtgcatataaaaaagcggcgcaagtatctttttcaagatacttacgccgcttcttttgtggccagatgcttcagtttgaccaccgacaaggcgattactgtttatcagtgtcgctttgctggttgtctttttccttcatctgcttttcgatgtctgaaatcgaataaacactgtcggaaactgtaccgacactcttaggttcctcgtgacgataggtggccatcccggtaccagccggaatgatcttcccgatgatgacattttctttcagaccaaccagtggatcgttcttgccgcgaatggatgcatcggttaagacacgcgtggtttcttggaaggaagcagctgataagaagctgttagtttccagagaagccttggtaatccccagcaagaccggacgacccgttgccgggatcccgccactgatgattgcttgcgtgttcttttccttgaagtccgcaatgtcgagcaaggtgcctggcagaatattcgtgtcgcccggatccatgacgcggatcttacgtaacatttgccgtaccattacttcgacgtgcttatcaccgatgtcaaccccttgcatacggtaaactttctgaacttcagaaagcaggtagttttcggttgccatcacatcgcgcaccttgatcaattgcttaggatcaattgaaccaccagttaagcgttcgccacggttaatgtgatctccttctgcaacggccacactagaagcatatggcacgctgtaagtccgggtatcggtgtcacctttgacggtaatttcacgcgtatgctcggctgggttttcatcaattgccgttacttcaccagtaacttcagtgataaccgcttcacctttagggttccgtgcttcaaagatttcctgaacacgaggcagcccttgcgtgatatcttcgccaccagcaacaccaccggtatggaagttacgcatggtcagctgggtacctggttcaccgattgactgtgccgccacggtcccgacagcttcaccgacttcaacctgttcgccggttgccatgttacgaccatagcacttctggcaaacaccatgcttcgtgttgcaggtaaagaccgaacgaatggtaacggcttcaacaccagcatccacaatcttctgagccatgtcttcatccataagcgtattgcgtttaaccagcacatcgccagtctttggatcaagaacgtctttcatcgtgaaccggccaaccaaacgatcatacagcggttcaatcatttcgttaccttcacgaattgcacgaacaaccaacccacgatcagtaccgcagtcttcttcgcgaacaatgacgtcttgggcaacatcaaccaaacgacgggtcaggtaacctgagtcagccgtcttcagcgccgtatcggtcatccctttacgtgcaccgtgagttgacatgaacatttccataacggttagaccttcacggaagttcgagataacaggaacttccatcatccctccgttaggcgcagccatcagaccacgcataccggcaagctgagtaaagtttgagatgttaccacgagcaccggaatcggacatcatggaaattgggttgttcgggtcaaaagaatcaaccagtttttgctgaatttcatctttagcgtcgttccagatctgaatgacccggtcatgccgttcatcgtcagtaattaaaccacgacggaactgcttagaaaccgttgcaaccttcttatgggctgccgccacaatctctggcttttccttcaagttcgtaatgtcggcaatcccaaccgtcaaaccggaattcgttgactgagtatagccgagtgtcttcatgtcatccagcaagtcactggtccgctgaactttataaaccttgaagacttgggcaatgatgtcagacaggaatcctttcttgaatggatcgatcaaaggtgcatcttcaagataagcatggatgtcttcacctttgtctatgaagtatttatccggcacaccattgacgatgttgtcctgagtcggttcgttcaaatacgggaagtcttttggcatgatctcgttaaagatcgccttgccgacactcgtcaccataatcttttgtttctgctcatcagtaaacggtttgtccgtaaaggagttcgccgcaatcccgacacgactgtgcagatgaacatagccattttgcaacgccatcaacacttcattggtatccttgaagatcatgccttcgccttcgcggcccttctgctccatggtcaggtagtagttacctaacacaacgtcttgagaaggggtaacgattggcttgccgtctttaggtgccaaaatgtggtgcgctgccagcatcagcatgcgcgcttctgccattgcttcatcagatagcggtacgtgaatcgccatctggtcaccatcaaagtcagcgttataagcttcgcagaccagtgggtgcaagcgaatggacttaccatcaaccaagacaggttcaaatgcctgaatacccagtcgatgcaaagtaggcgcacggttcaaaaggactggccgttccttaatcacatcttcgaggacatcccagacatcatcatcttggcgatcaatcttccggcgagcatttttaatattgcttgccatatcgcgcttaaccagttcgcgcatgacaaatggcttaaagagttccaaggccatttcacgcggaacaccacactgataaaacttcaaccatgggccaacatcaataaccgaacggccagagtaatcgacacgcttacctaacaggttttgacggaatcggccttgcttccctttcaacatgtgggacaaggacttcagcgggcggttaccaggtccggtaaccggacgtccgcgccgaccgttatcgatcaaggcatcgacggcttcctgcagcatgcgcttttcgttttgcacgataatacttggtgcattgagatcaagcagacgcttcagacggttgttacggttgatgacccggcgatacaagtcgtttagatcagaggtcgcaaaccggcctccttcaagctgaaccattggccgcaaatccggtggaataacaggaatcgtgtccataaccatccatgccggatcattaccggactccttgaacgcatccaaaatgtccagacggcgaatcgcacgggtccgtttttgaccctgagctgatttcaggtcttcttttaattcagcgacttctttttcgagatcaacatcctgcaacaattccttgatggcttcagcacccattttggcattgaaggtctgtccatattcttcccgcttttcgcgatattcgcgttcggttagcagctgctttttctccattggcgtatcgcctggatcaatcacaacataggaagcaaaatagatgatttcttcaagtgaacgtggcgacatgtcgagtaccagacccatccggctaggaattcccttgaagtaccagatgtgcgtcaccggtgcagctaattcgatatgacccatccgttcgcgccgaaccttggaccgggtgacttcaacgccgcagcgatcacaaacgattcccttatagcggattcgcttgtacttaccacaggcacattcccagtctttggtcggtccgaagatacgttcatcgaataagccgtcccgctcaggctttagggtccgatagttgatcgtttcgggctttttgacttccccataagaccagctgcggatcttgtccggcgaggctaagccgatttgcatactttcaaacttattgacatcaatcaaagggctaacctcctatttcttatcgtcggtactattgtcggcagactgaccgtcacttgcttgggttgcggcttcgtgtgccttcttttcttcttgctgagctgcgaacttcgctaatgcatcgacagaaacaacatcgtcttcgtcatcgtccatgtcgcgcaattcgatttcctgcttatcagcacctagaaccttcatatcaagtcccagcgcttgcaattccttgacaagcacacggaatgattccggtacgccaggctttggaattggatcgcctttaacgatggcttcgtaggtcttaactcggccaacaacgtcatcggacttataagtcaagatttcctgtaaggtatacgctgcaccataagcttcaagggcccagacttccatttcaccaaaccgctggccaccaaactgagctttaccaccaagaggctgctgggtaactaagctgtaaggtccaattgaacgcgcatggatcttatcatcaaccatgtgagatagcttcatgtaatacatgacaccgacagatacccggttttcaaatggttctccggtacggccatcatataagactgacttcccatcagatggcatgccggcttctttaacggttgcccacaagtctttatcgttggcaccgtcaaagactggcgttgcaacatgaatgcctaagttacgagcagccatgcccagatgcaattccagcacctgcccgatgttcatacgacttggcacacccattggcgacaagcaaatatcgactggggtaccatctggcaagtatggcatgtcttcttcaggcacaacgacggaaaccgtccctttgttcccatgacgaccggccatcttgtcaccaacttgaattttccgcttctgcgtgatgtaaacccgtaccatcatgttgacgccaggagataattcatctccagcttcacgggtgaagattttgacgtcctgaataataccgccgccaccatgcggaacccgcagcgatgtgtcgcgaacttcacgtgctttttcaccaaaaattgcgtgcagcaggcgttcttcggcagataattccgtgactcccttaggcgttactttaccaaccagaatgtcgccatcccgaacttcggcaccgacacggacaaccccgaattcatcgagatccttgagggcttcttcaccaacgtttggaatctcacgcgtgacttcttcaggtccaagtttggtgtcacgtgcttctgattcatattcttcaatatggattgacgtgtaaacatcatctttaaccaaccgttcagacagcacaatcgcatcttcgtagttgtacatgttccaagtcatgaaggcgatgattgggttttgccccaatgccaattcaccattttgcatggctggtccatcagcaatgatttcatcgacatcgacatggtcaccgatcgtaacaatcggacgttggttgtagttcttaccggcgttactacgcttgaatttcatcaatttgtaagtgtccaaggcaccgtcttcacgacgtacccggatttgcttagcatcgacatattcaaccgtaccggcattgttagccaaaaccgcggttccagagtcatgggcggctttgtactccatcccggtcccgacaagcggggcatgcgggttgatcaaaggtaccgcctgacgctgcatgttagcacccatcaacgcacgattagagtcgtcgttttccaagaatggaatgcaggcggttgcgactgcgacaacctgcttaggcgaaacgtccatgtagtcgactttgtctggtgaaatttcaatattgttatctttatgccgggccaaaaccgtgtcatcaacgaaggacccatcatcgtttagtggcgagtttgcctgcgcaacaatgtagttatcttcttcgtcagctgtcaggtaatcgatcttgtcggtaaccttatgcgtatcccatgaaacccgtcgatatggcgtttcaatgaagccgtatgggttaacgaccgcgtatgaagccaagctgttaatcagcccgatgttcgggccttcaggggtttcaatcggacacatccggccataatgggtgtaatgaacatctcgaacttcataacccgcacgatcacgagtcaagccaccaggtccaagggcagacagacgccgtttatgggttaattcgcccaacggattggtctgatccatgaactgtgacaactgggaactaccaaagaattccttaattgaagcgacaactggccgaatattgatcaattgctgcggtgtaacggttgcggtgtcctgaatcgacatccgttcgcgaacaacccgttccatccgcgaaagcccgatccggaactgattttgcaataattcaccaacggaacgaatacgacgattacccaagtggtcaatatcatcaaccgtgccaaggccctcctgcaagttcaggaagtagttcatcgatgccaaaacgtcagctggcaaaatatgcttaactttcttgccaatatgcccattgccaatcaaattaatttctttatccggggtcacctgtgagtaaactttaatactctgcagctcaatcggatcggtcatcacaccttgatcagaaggttgataagtgaccgtcttgaaatcatcccgatccaagtacggtgccagcttatccatcacttggcgatccactttggtccctttttgggcaaggacttcacctgtatccggatcagccagtgtttccgctaaaacctgattcaatagccgggtcttcaggctcagcttcttgttcaccttgtaacgcccaacagaggctaagtcataacgcttcgggtcaaagaagcgggcatacaaaagtgaccgcgatgaatcagcagtcttaggttcgcctggacgtagacgttcataaatatccttcaaggcttcatcagtacgggaatcatccgtattcttatgcacatctttttcaagcgtgagcatcaacgaatcgttatccccgaacatattaataatgtcttgatcggagccaaagcccaatgcgcgaaccaattcggtcagaggaatcttccgcgtgcgatcaatccggacatacgcaatgtccttcgcatcggtttcatattccaaccatgccccacggttaggaatgacagtcgtgccatacgtcacccgtgaattcttatctgtttcactatggaagtaaacgccaggagaacgaaccagctgggaaacgataacccgttctgccccgttgataatgaacgttccttgtttcgtcattaatggaaaatcaccaaaaaagacgtcctggctcttgatttcgccagtttcatgattcgtcaaacgtaaggttacatgcaatggtgcggagtagttcgcatcgtgttggcgtgcttcctcgacagtatatttcggttccagcagttgatagccgacaaattccagtgacagtttcccctgaaagtcatcgatcggcataatatcgtcgaacatttctttaagaccttcatcgaggaaccattggtaagaattcgtttggatctcgatcagattaggaagatccaaaacttccttgatccgggcataagaccggcgtgtccggtgcttaccataattcactaagtgtcctgccaaattattcaccccttgtaagattttccggcttgatgattgtaaaaataatgtaaatattgttaaatttacatgacattgaccatcccgcagacattttgagcaaaaaaaaaccaaaaacagatcgaccttcaaccagcctgctgtttttgcttttttcattagtcagaacggacaatagatcgtcctgacagcctgtccaaaccgaaatgcgattgatttaataatacgcgtgcggagtaacaatgtcaagcacctgcttgtcaaagtaatgcaaggtgtcgatcgtcaaagtaatgcaaggccagatagcatcaaaatcgcgtcccgccatcactgactgttttggcaaaataaatcggtcccagagataatgcttcacctctaagaccgatctttttaagcgttattagtggaacctgacatatttgagcctgctattgatcatgccttgacaggttctttagaagcgccgttttctttatgcttacctttgttttccttgactgtaaacgtcagcttgccttttttagcgccgatttgaatcaaatcaccggttttagcctgacccgtcagcaatagctcactgagttggtcttcaacatccgtttgcaaggcacggcggatcgggcgcgcaccatattcaggatcaaacccagccgcggcaatcgcatcaatcccggctggcgtaattttaacgtcaattccttgatctttgatacgactaagcacggttttggtcataatcttgacgatctcatgcaactcagccttgttcaagctatggaagacaacagtttcgtcaattcgattaagaaattctggacggaagctctttttcagttcagccaacatccgactcttcatggcattgaagtcggctgttgaatcttttgcaccaaatccaactgtcttatcatcgcgaatggcagttgctccgatattgctggtcataatcaaaatggtattccgaaaatcgacccgccgacccttagcatcggttaaatagccatcatccaagacttgtaacaaaatgttgaagacatcaggatgcgccttttcaacttcatcgagtaaaacgaccgaatatggcttgttgcgaaccttttccgtcaattgaccgccttcgtcataaccgacatagcctggcgctgcgccgattaaccggctcgtactgaatttctccatatactcggacatatcgacccgaatcatggcgtcctcggaaccaaacatcgcttctgccaacgctttagctaattcggttttgccgacgccggttggtcccaagaacatgaaggagccaatcggtctggtcggatccttcaacccggaacgagcacgccgaattgcccgtgcaactgctgaaacggcttcatcctggccaacaactcgctgatgcagaatcttctcgagattaaccaaccgttcagattcctttttctgcagttgcgtgaccggcacgccggtccattgcgatacaacttcggcaacgtctgcgcccgtgaccttgatatcggtacgaacaccactttcattcaccggttcaggcgtatcggcaagtttagccttgacgcccgcttctttagtccggattgtagcagccgtttcgaagtcttgatgatcaattgcatcttctttgtcggcaaccagtttagctaattcatcctgaagtttatcagctttggtctccacgttagctttatcaaggcgaactttagccgcactttcatcgaccaagtcaatagccttatccggaagaaaacgcgttgtaatgtaacgtgacgacaacacaaccgcttcatgcagcgcttcatcggtaatcgtaacgccatggtgtgcttcgtaacgcggacgcaaacctttcagaatctgttcggcttcttcctcagtcggttcgtcaacttgaattgttgcaaaccgccgctccaaggccgcatctttttcaatgtacttttgatattcatctaaagtcgtggcgccgattagctgaagctcgccacgtgccaatgccggtttcaggatatttgaagcgtcaattgccccttcagcaccgccagcaccgatcaatgtgtgcaattcatcgatgaataaaatgacattgccatctttataaatctcatcaataattttcttcagccgatcttcaaactcaccacgatacttagtgcctgcaaccaacgaacccatgtcaagcatcatcaagcgtttgttcagcatatcatccggcacttttccagccacaattttttcagcgaagccttctgcaatggccgttttgccgacaccgggttcaccaatcaagaccgggttgttcttagtgcgccgagccaagatttgaatcaagcgccgaacttctttgtcgcgaccaaccaccggatccatccgattttcgcgcgccatctgggttagatcacgggcgaggccatcaagcgttggtgtcccctgaccgtcttggcgagcgccgccacgtgccattggccgccgctttgccgccgtatccgcaatgcccattttcttgaagaccatctgacgcgtcttcgagagactgagccctaagttttgtaaaatccgcgcagctaaaatatcgtcttctcgcaatagtcccagcagaatatgctcggtgccgatttttaacgcccctaagcgttttgcttcgtccccggcaaatgccagaatttccttgccttttggtgagtatggcaaataactatcgctagcttgactggcggcatcaacagttccatatcctgtgaagcgctcgatctcgtcatggacatcattttctgtgacccctaactgacgcagcgtcttaccagcgataccatccttttccataaccaaagccataagcaagtgttccgtgccaacagcatgatgatggaagtacttcgcttgttcctgggctaaaagcaacacatttttagcactaggggtaaataagttgtccataagcacgctccttttttaaaaagccaattataaactgttttatctttcataccgcaaacgatccaaaaatgcaagaaacaaacgcgatcgtaagtgttcttctgtttcttgatcaagaattcccaaagtctcatgattgatcacggctagcattaaattgccggactgttgggaaataagcccattatcaaacagttcctgcagcaaatcccgtgcatcgcgtaaccgcaagcgactaggaatgtgctggcgcatgatttgaatgagatcctgatcatctgtcaatttgaccttcacgatccgaatgtagccaccgccgccacgcttactttcaacaatgtacccacgtgccggtgtaaaacgcgtcttgataacataattaatttgcgaaggaacacaattaaagcgccgtgcaatttccgctcgccgaatctcaacagccgcttcctgtgccagtatcgtttttaagtatgtctcaataatatccgaaatattttcgcgctgcatgccattcaatcctttttgactttgaccaatcttgactattacacattatactggcatcaatgtatttatacaaatatatgctttgaggtaaacgaaaacagtaccggttagaattcagaatgtgagtggctgtacacgttataggcgctgagtttacggtcacctacacgcaggcagccaccatgaccaatgttttttggagaacgaaaaaaggaccacgattgtcgtgatccaagaatcgggaagacaagattcgaacttgcgacccctacgtcccgaacgtagtgctctaccaagctgagctacttcccggtaaagcggaagacgggattcgaacccgcgacccccaccatggcaaggtgatgttctaccactgaactacttccgcataccgaatatgaaatttgatcagcgccacagcttcatagcgaccaatgatgcacccagtaggagtcgaacctacaaccttctgattcgtagtcagacactctatccaattgcgctatgggtgcttcaacaaaatgccgaggaccgggatcgaaccggtacggtcatcactgaccgcaggattttaagtcctgtgcgtctgccaattccgccaccccggcataaagtgaaaagcggaagacgggattcgaacccgcgacccccaccatggcaaggtgatgttctaccactgaactacttccgcatatcaaagctattcaattgtgaccgaggagcagcctttagagcccgagcaaatcatgtaagatacaatgcgggtgaagggactcgaacccccacggtcaaaaaccactagaacctaaatctagcgcgtctgccagttccgccacacccgcaaaaggtgggttaaatgagccgtgacaggctcgaactgtcgacccactgattaaaagtcagttgctctaccaactgagctaacggctcaatggaggatacagggctcgaacctgtgaccctctgcttgtaaggcagacgctctcccaactgagctaatcctccatatgtaagcgtggcagcttcctaccctcgcaggcagtctcccaccaactactctcggcgtgaagaagcttaacttctgtgttcggcatgggaacaggtgtatccttcttgctatcgccaccacacttatgagaactttgcgctctcaaaactggctatcattgttgttgtttttaccggaacttaacgtatttcatcgaaacgcgcgctggcgttacgccagtttgcgctttacttggttaagtcctcgaccgattagtactggtccgctccatgcatcgctgcacttccacttccagcctatctacctgatcatctttcaggggtcttacttccatataggaatgggaaatctcatctcgaggggggcttcacacttagatgctttcagcgtttatcccttccgttcatagctacccagcgatgcgcctggcggcacaactggtacaccagcggaacgtccatcccggtcctctcgtactaaggacagctcctctcaaatttcctgcgcccgcgacggatagggaccgaactgtctcacgacgttctgaacccagctcgcgtaccgctttaatgggcgaacagcccaacccttgggaccgactacagccccaggatgcgatgagccgacatcgaggtgccaaacctccccgtcgatgtggactcttgggggagataagcctgttatccccagggtagcttttatccgttgagcgatggcccttccatacggaaccaccggatcactaagcccgactttcgtccctgctcgacttgtcagtctcgcagtcaagctcccttctacctttacactctgcgaatgatttccaaccattctgagggaacctttgggcgcctccgttacattttaggaggcgaccgccccagtcaaactgcctacctgacactgtctcccgccacgattagtggcgcgggttagagtgttcatacagctagggtagtatcccaccaatgcctccatcgaaactagcgttccgatctctacggctcctacctatcctgtacaagcggtaccaacactcaatatcaagctacagtaaagctccatggggtctttccgtcctgtcgcgggtaacccgcatcttcacgggtactataatttcaccgagtctctcgttgagacagtgcccaaatcattacgcctttcgtgcgggtcggaacttacccgacaaggaatttcgctaccttaggaccgttatagttacggccgccgtttactggggcttcaattctgggcttcgcttgcgctaactcatcctcttaaccttccagcaccgggcaggcgtcagcccctatacatcatcttacgatttagcagagacctgtgtttttgataaacagttgtttgggcctattcactgcggctgaccttgcggtcagcaccccttcttccgaagttacggggtcattttgccgagttccttaacgagagttcgctcgctcacctgaggatactctcctcgactacctgtgtcggtttgcggtacgggtagtttatttctcactagaagcttttcttggcagtgtgacatcaggaacttcgctactttaatttcgctccccatcacagcttgtccttaaggcggcaagcatttcactcgctaccggacttactgcttggacgcacttttccagccgtgcgctttccttagcctcctgcgtccctccatcgcttaaacaaaataaactagtgcaggaatctcaacctgcttgtcatcgactacgccttgcggcctcgccttagatcccgactaaccctgggaggacgagccttccccaggaaaccttagtcatacggtggatcagattctcactgatctttcgctactcatgccggcattctcacttctaagcgctccagccgtcctcacgatcgaccttcaacgcccttagaacgctctcctaccgcgcaccctgacgggtgcacccacagtttcggtattatgcttagccccggtatattttcggcgcagtgccactcgactagtgagctattacgcactctttaaatggtggctgcttctgagccaacatcctagttgtctgtgcaacgccacatccttttccacttagcataaatttagggaccttaactggtgatctgggctgttcccctttcgacaatggaccttatcgctcactgtctgactcccggagtaagatcaatggtattcggagtttatctgaattcagtaacccttgacgggcccctagttcaaacagtgctctacctccatgatccatcttccgaggctaaccctaaagctatttcggagagaaccagctatctccaagttcgtttggaatttcaccgctacccacaactcatcccagcatttttcaacatacatgggttcggtcctccagtgtgtttcaccacaccttcaacctggtcatgggtaggtcacttggtttcgggtctacatctacctactgaagcgccctgttcagactcgctttcgctccggctccgacttttcatcttaacctcgcaggcaaacgtaactcgccggttcattctacaaaaggcacgccattacccgttaacgggctttgactaattgtaggcacacggtttcaggaactgtttcactccccttccggggtgcttttcacctttccctcacggtactggttcactatcggtcactagggagtatttagccttgggagatggtcctcccggattccgacggaatttcacgtgttccgccgtactcaggatcctggacggagagtccgccgtttcgtttacagggctttcaccttctatggcgcagctttccagctgacttcgactacgtcgaactttggtaactccaatgtccagtcctacaaccccgagaagcaagcttctcggtttgggctcttcccacttcgctcgccgctactatgggaatcgagttttctttctcttcctgcgggtactgagatgtttcagttccccgcgtctgccgccaacaagctatgtattcacttgcaggcaatacactgatgtgtactgggttcccccattcggaaatctccggatcaaagcttacttatagctccccgaagcatatcggtattagttccgtccttcatcggctcctagtgccaaggcatccaccgtgcgccctttgtaacttaacctgtactgacttacgtcagcggttatgcgatgcgaatttctattattagaaactcatacaaatacgctgtgttctcggcaatttaaaacatttacaacaatgatatccagttttcaaagaacaaagaatcgccaactaacgtcaacgatcggcctgacggccaatggaggataacgggatcgaaccgatgacctcctgcttgcaaagcaggcgctctcccagctgagctaatcccccataagggttgtttaattaacaagcgaacgcttgatgggcctagatggacttgaaccatcgacctcacgcttatcaagcgtgcgctctaaccaactgagctataggcccgataggcgtgtagaaagggtaatcccctcaaaactaaacaaagtttcgtgtgtgcaggtttccgtcagactttcagtctgtttccttagaaaggaggtgatccagccgcaggttctcctacggctaccttgttacgacttcaccctaatcatttgtcccaccttagacggctcgctccctaaaagggttacgccaccggcttcgggtgttacaaactctcatggtgtgacgggcggtgtgtacaaggcccgggaacgtattcaccgcggcgtgctgatccgcgattactagcgattccgacttcgtgtaggcgagttgcagcctacagtccgaactgagaatggctttaagagattagcttgacctcgcggtctcgcaactcgttgtaccatccattgtagcacgtgtgtagcccaggtcataaggggcatgatgatttgacgtcatccccaccttcctccggtttgtcaccggcagtcttactagagtgcccaactaaatgctggcaactagtcataagggttgcgctcgttgcgggacttaacccaacatctcacgacacgagctgacgacaaccatgcaccacctgtcattttgcccccgaaggggaaacctgatctctcaggtgatcaaaagatgtcaagacctggtaaggttcttcgcgttgcttcgaattaaaccacatgctccaccgcttgtgcgggcccccgtcaattcctttgagtttcaaccttgcggtcgtactccccaggcggaatgcttaatgcgttagctgcggcactgaagggcggaaaccctccaacacctagcattcatcgtttacggcatggactaccagggtatctaatcctgttcgctacccatgctttcgagcctcagcgtcagttacagaccagacagccgccttcgccactggtgttcttccatatatctacgcatttcaccgctacacatggagttccactgtcctcttctgcactcaagtttcccagtttccgatgcacttcctcggttaagccgagggctttcacatcagacttaaaaaaccgcctgcgctcgctttacgcccaataaatccggataacgcttgccacctacgtattaccgcggctgctggcacgtagttagccgtggctttctggttggataccgtcacgccgacaacagttactctgccgaccattcttctccaacaacagagttttacgacccgaaagccttcttcactcacgcggcgttgctccatcagacttgcgtccattgtggaagattccctactgctgcctcccgtaggagtttgggccgtgtctcagtcccaatgtggccgatcaacctctcagttcggctacgtatcattgccttggtgagccgttacctcaccaactagctaatacgccgcgggtccatccaaaagcgatagcttacgccatctttcagccaagaaccatgcggttcttggatttatgcggtattagcatctgtttccaaatgttatcccccacttaagggcaggttacccacgtgttactcacccgtccgccactcgttcaaaattaaatcaagatgcaagcacccttcaataatcagaactcgttcgacttgcatgtattaggcacgccgccagcgttcatcctgagccaggatcaaactctcatataaatatgagctgtttgaatagctcgatttgttgttctagcgaattgacttcgcaaatgttactttttgcctcgataccgaagtatcaaggaccctgcacatttaaacgaaactttgttcagttttcaaaggactaccttgtcaaaagacaactttgacatattatcacaagcgatcaacgcttgtcaataactttttttgatgttttgttgcacatcagcgttgctcatttacgacgctttttatcataccaacggtttgcgctatcgtcaacaactttttcaattaaaaaaaggtatccggatattttttatcgaataccttatatcattcgtaaaatgatcgtgagagcaccacaaaagtgttggaactttcggaaaataaaaatgccgcccaaaatggcgacattatcacataactacgggcgcaatgttgggaacaaaagaacatcgcgaattgacggtgcatcggttaacagcataactaagcgatcaatgccgattccgagtccacctgttggcggcatgccatattccaacgcttcaacataatcgtcatcaataccttgtgcctcttcattgcctgccgttttttcagctgcttgcgcttcaaaacgctgacgctgatcaatcggatcgtttaattcggtgaaggcattggcgtactcaccgccaccgacaaaaagttcaaaacgctcaacaaatcgtgtatcttttggattcttcttagctaacggggaaacttcgattggatggccggtaatgaaggtcggttgaataagcgttgattcaacaaactgatcaaagaaggcactgataatatgcccgaccttccaataaggttcgtagtgaacttcatggtcatcagctaacttacgcgcttcatctacagtcatttccggccagaagtcaacgccggttttatccttgatagcgtctaacatgttgatacgggcaaatggtgcatctaagtcaatgtccatcccttgataagttagtttcccggaatcaaggactttgtgggcggcaaatctaaagatgccctcggtttcgaccatgacatcggatagatcccaataagcggcgtaggtttctagctccgtaaactccggattatgtttcgtgtcgatgccttcgttgcggaaaacgcggccgatttcataaacacgctccatgccaccaacgatcaaccgcttcaagtgcaattccaatgcaatgcgcaaataaagatcgatatccaacgcattatggtgcgtgatgaatggccgcgcattcgcaccaccggcctgattatgcaaaaccggagtctcgacttcaagaaatccgtggttatccaagtattcacgaacagcactcacgattttggtgcgtttaacaaaccgatcaaaactgtcaggattcgaaataaggtccaaatatcgcttgcggtacttctgctcgacatcggttaagccatgccacttatccggcaatgggcgtaatgctttggctagatgcgtcacgtgattggctttgacagtcagctcacccgagtcggttttcatgacttcgccgctaatacccaaaatatcgcccaaatctgccttcttaaagatcatgtagttttcatcgccaaccacgtctttacgaacatagatctgcattttaccgctgcgatcacggatgtcagcgaacccgactttacctttaccgcgtttggacatcatgcgtccagcaatcgtcacttccggcttttcttcgagtagcgtttccttgtcgtcttcgccaaattcttcacgtacctttgctgcagagtgcgtgcggtcaaaccggtgaccgaatggatcaattcctgcttctcgcaaggcatccatcttttcccgccgcgcaatcatttgatcgttcatttctggttgctgtccgttatccttagccaacacaagttcctccgtttcaatttataccactctttgatgatgacaattttaccgctaaaaagcaaccttctacgcattaaaagacgttcgccatgattaattgtcaatcaatcatccttgaacgccttttatcatcaaaggttttatggcttaatggctgccttgacgctgacgggcgcgcgcttcagtttgcgccacaaagtcatcaaaaatatgattgacttctgcttgcgtatcaaccatattaacggctgctttggtctttgccgagcgtggaatgccttttaaataataggctgcttgcatccggaattcacgaacggcctggtgttctccgtgcaggtcaaccaaccgttgtaactgtaacttggcagtggcgattttttcgcgcggtgttggttccggaatcagctcgccatgatcaagataagctgccatctgcttcaagacccacggatttcctaatgctgcgcggcccaccatgactgcatcggcgccaacctcatcaagcatccgtttggcatcttgtggggttcgcacgtcaccattcccgataaatggaatgctcaggtgttgtttgacttcttttaagatgttccagtcagcatgtccagaatatagctgcttgcgtgtccgcccatgcatggctaatgcggcagcgccaccgcgttcagctgccaatgcattttgaaccgcataaatgtggtcttcatcccaacccgtgcgcatcttaaccgtgaccggctttgaaaccgcatcggtcacagcagccaccatttcgtaaactttctccggatctaaaagccagtgtgcccccgcatcggttttggtaactttcggtacagggcagcccatattgatgtcaatgatgtctgcagccgtgttttgatcgacaaacttagctgcattcaccaacgtttccttggtgccaccaaaaatctgaatggaaatcggatgttcacgcggatcaacaaacagcatacttaacgtctttttatttttgtacatgatgccgcggtcactaatcatttcacaaacgaccaaaccagcaccgaattctttggctgtcacccgaaaagccgcattcgtcacaccagccatgggtgcaacaacgagtcggtttgggatctcaacatcggcaatgtgccacatacaagccacctctttcttgctttcgcgttgttaactttacttaaaataagcaaatactgcaactattcatgccgggccaacaaagcttcaagatcggccacactgtaatgatattgattaccgcagaacttacaggtcgtctcggcaccgccgtcttcatcaatcatttcctgcaattgtttccgcggcaaagtggccataatatcgccaaaatgtttcttggaacaattacatgcaaaccgcaatgcttgggtatccaggaagcgaacgggctctttgcctgcaacacgttggataatctgctcgggagtcaggccactttttaataactccgatacaagcggtagtgttttgacgtttgcttccagttctgacaattcggcatcggtcgcaccgggcaacgcctctagcatgaaaccgccagcaaccttaatcgtgttatcggcattgacaaatacagagagtccgactgccgcgggaatctgctcagacttagctaaataatacgtaaaatcttctgctagctcacctgaaaccagtggtacctgtcccgtaaacggctcgccgattccgatatctttcgtcaccgcaagcatgccgtgtttgccgactgcttttgccacatcgattttaccgacgagattgaggggaagattcacgtgcggctcctgaacatacccgcgaacggttccgagttgcgtaccatctgtgacgatcgagccaaccgggccatcccctttgatacgcacagtcagcaagtcattcgtgttttttaatcccgatgcggctaataacgctgtggcaattaaagttctgcccagcgcagccgaagccgcactccaggtgtcatggcgtcgttgtgcttcgcttaccgtttgcgtggcgtcgactgcgaaaattcgaaaatgggcgttgcgcgacaatgcactcgcgatgtagtcactcatgttggattgatcctcttttctgaaagttaaacgtggctattctaccaaaaattgccgttattgaaaagccggcgcagaaacccacatgtcaaaaccttgatggcgatggtcaaagtccgatcatcacatttatggccacttatgttctggcttatgcccataacgcgctcaccggcgcagggatctgcgtgtaaggacctcgaacgcgatggccaagaccgggccatcacgtccgaggccgcttacactccgatccctaaccgcgccggttcgcgcttaataaaaaaacaccaccaacatttggcagtgtttttatacttaggcttgcggattctgatgatcgtcatcggacgggttactgccaggtgttgtgtcgtctggcttttccacactgtccgtcgtattgtcatcatgcgcatcttggtctgtttgatcagcattcgactgaccctcagacttagcatgtgcttcttcgtctgcttgcttttctttatccttgtgttccaaggctgctttggattgctcaaaagttgcggccttttcacttggaaattcgtcttgatcgcgttctggcatcttgccgtcattgaacaagctgagaatttctttttcattcaaggtttcgtacttaagcaatgcttcggcaatcaacttgtgctggtcacgatgggcttggataatttcgtaggcctgtttgtgggcctcgtcaataatccgccgcacttcatcatcaattgccgttgcggttgtttctgagtatggcggtgtttggccatactgagcacccaagaacggctgcccttcagtctcaagctgaacggttccaagccgatcagacatcccatactgtgtgaccatactgcgtgcaatttgcgttgcctgttcaaagtcattggaagctccagtggattcaacgccgaaaataatttcttcagctgtgcgaccaccaagtaaaccaacaatttgttcggtcaattccttcttggttagcaggaattgatcgtcttttggcagcataattgcatatccgccagcacgaccacgcggaatgatggtaactttgcgcaccgttcgtgaatcgcttaagactaaaccgacaatggcgtgcccagcctcgtgatacgcaaccatcgtccgttctttcgggctgatgacgcggtctttcttcgccggcccagcaatgacacgatcttcagcttcatccacatcagctgcatcaatctgcttcttacttcgccgcgctgcaaccaacgccgcttcattcaacaggttttccaagtcagccccgacaaaaccaggagtctgacgggcaatttccttcaaatcgacatttggtgccagcggtttgttctttgcatgaaccttcaaaatggcttcacggcctttaacatctggtcggccaaccaaaatcttccggtcaaaacgacctggacgcagcaaagccggatcaagaacatcggaacggttcgttgcagcaatgacaatcacgccttcattacccgtgaacccatccatttctaccagcaactggtttaatgtctgttcacgttcatcgtgaccgccgcccataccagcgccacgctgacgaccgaccgcatcaatttcatcaatgaagatgattgaaggagctgcttttttagcctgatcaaaaagatcacgaacacgcgaagccccgacaccaacgaacatctcgacaaagtcagaaccggaaatcgagaagaacggtacgccggcttcaccagcaaccgccttggctagtaaggttttaccagtaccaggaggaccctcaagcaaaaccccggctggaatacgggcacccaatgccgagaatttacgcggatctttcaggaactcaaccacttcaaccagttcctgcttttcttcttctgcaccggcaacatcagagaagcgaactttattggcatttttatcggcttgtttagcccgcgacttgccaaaactcatcacgcgaccggagccgccgccttgacctgcctgattcatcatcatatagaagaagatcatcatgatgacaatcggtacaactgtaatcaacaagctaaaccaaacaccggactgcgattcctcctgcgtattggtcttgacattgttggcattggtcattttttggatctgactcaaagttgcatcattcgtcggaatataagtcgagaatttggtaactttggttgactgattgccaaaaaagctcagagagttgttcgtaccggaagacttttcagccttcttgtattcaccgctgaccttataaacgccaccagatggctggagcgaatagcttttgacattgtccttttttaattcggacataaaggtgcttgtttcaatttcttgggacgatgttgtcccattatcgcgcatataatacgcaaaaccggtgaccagcagcacaaaaatgatgatatacgtcagcgtgctactgaacaggccgttttgttttttcttcatttagaacctccggcaacattcaattagttccttatatactaccacaaacacggcgcttagattaagattttgccgcatagacttctggctttaataccccaatataaggtaagttacgataacgttcggcataatccaagccatacccaaccacaaattcgtttggcactgtggttcccacatagtctgcctgaacatcaacaacccgtccttcaggtttgtccatcagcgcacaaatgcggaccgattttgctttgcgggttttaaaaatatcggttaagtacttcaaggtgcgtcctgtatcaacgatatcctcaacgattaagacatcgcgatccttcacgctggcatcaagatctttaataatcttgacctcaccgctagattcagtcgcatcaccataacttgacacgtccataaaatcgagttccatataatcatcaatttcgcgaacaagatcagtcatgaacatgatggcaccttttaaaatgcacaccactaacggattcttccccgcgtaatcacgcttaagttccgcgccaagtcttgtcgtgatggcgtgaatatcgtcttgagaatacaaaacctttaaaatatcgggattcatcatttatcctcacttctgtcaacatctggcaatttcaccagtacaacatggagtatatcagtttgagcagggagcgacaatcgttctaaaggctgaccttcaatccaaaaaatctgatgaccttgcgctaataccagtaattgatcgcgtgttcgggccggaacctttgcattgataaaaaatcgccgcagcttctgcttcacgccattaggcaggtaaacaatatcaccggcctggcgggtccttaatgtaatcggcaagcgcacacgtaccggaataccttggtcaccagccacttttgttcgtagctgaaatgtaccgcgagcagtttggcatttttggccaatacgagaaaatgttgccggcgctagttttggttttggcaccaacttcacaattttggccgcttgaaccgcaatcgtcacgccagcgccaagatcaaatcgtcgttcgcgagtatcattcaggcttttcaggatcggcatgagcagtccgtggttaactctcggctgccattggcgtagcaaggttgccagcagcatcagctggatcgtgcgcggctgatttgctgccgcgcgccaatcaattgtcaccgaattaatccgcaaccgctgctgccattcagtcagttgcatttgagccagtgcaaccaggccagactgttccgttgtaaatctttggacatgccgcaacaactcgggattttgctttttaaatgccggaatcacttgatggcgcaactgattgcgggcataacgcgtatcggcattggatggatcgtcgcaaaaatccagaccgtgcctgcctgcataagctcgaatatcatctttactaaaattcagcagcggacgcaccaaacgctttttacgccacggttgatccggacgaattcctacaagggcggccggatcaccggagcgtcctaaccgaaacaggaccgtttcaagttgatcatccgcgtgatgcgctgtcatgatcaccgtggctgcctgagaatcggcactcgcattcaagaagtcgtagcgtgcctgtcgcgccgcagcttcacttaccgcagtggcggccgatcgctgccatgttccagtcacaaccggaacatgataacgcgctgctgcagccgccacaaatgcttgctcctgtcggctttctggccgcaaacgatgatcaaacgttgcgacaacgacatccagattcggtgctcgaactgccaggtccaacaagaccatcgaatccacgcctccggaaacagccactaacacccgggtatgcggcgtaaactcaaactgttcaaaaagctttggactcatgtgtctgctcctccgcttagcatactcggccaagcatattgatcgcataaccaccatcaaatcggcttggcaacaaaataggcccagaacaaataaccgtttgtcccagacctgatttttttaactacgccgaccgcctcggccgccgcgtttgccttcggtgttgcggcgaagaacacttaggcgatcttcgctttctttcaaatagccggacatcatcgcatcaaaatcgccttttaccggttgggctttgtggccgaatcgattgccactattgcgtgcgccgccttggaagcggttattgccagcatgtggcgcgggtgcgtgtctgttttcgtgataatgatcattttcacgttgttgcggtttgtcaactgctttccggatagacaggccaatcttaccatcttggatcgaaaggactttaaccgtcaccggttcgccaacatgcagcacatcatgaatatctttgacataagcgtcagagacttcgctaatgtgcaccaatccggtcttgccatcgcctaactcaacgaatgcaccgaatttcgtgatcccggtgactttaccagccactttcgtaccaacttcaactgccataaaaaaagaagtcctcctaattaaatgtatctataagtatagcatgagtgaaaagacacgcaagcacgacgtattagcctagccaaagcaactgaatgcagtcgtcaaaggcaattcgccatgaagaaaacatttcagcgtctgtgctccccgccaatgcttgccacctcatcaagaataccactgaatctcaaaccaacaactctaaagtagccaaatgactgcagggacgcgaatataaaaaacgaccggcacttgcgtttattgcaacccgtttatcgcgtcattgggtaacgtttaagtccggcactttgtttgctttatccggcaaattaaaaataatctctcccggtttcgaatagaggtatttttcacgaatcagcttggccgtgtaatcgtcattatgcaattggtcaacctgaactttaagggcggctttgttcgcctttaatttattcaaattagacttggctttggcaaccgcctgatttgtttcccccagtgtcatttgcgtgcgcattaaactgacgccgcctaagcccaaaatagcaaccatcacaattagcaaattacgaattcgtttcatatgtaccgcgtgtgcccgcgacttaggcacacgtgtcgacttttgcctgtgttcacgtgtatatgcattatttaattgactgatattatttttcgccatctgtctgcaccctcgttttcaccagccgtgtatcactacttcagtaaatcaagtataacaaatcagaggggctgctgttcaataaatcggcattaaaatgtttctttataatcttctttcaaaaccgtgtacatatcggccgcttcgttctttttcgttgtttcaactaaatcgtccgcacgtacggtcaatgttttgttaccgaaattaatcaccagcgtgtcgccaactccaacatcggtactcgacttggcaactttaccgttgatcgtgatccggcccttatccgcaatttccttggcaacggtgcgccgtttaatgattcgtgagactttaaggaacttatccaatcgcatgtctttttacctcgcttttattcgtcgtaacaatcgtaaatactttttcccgcctggcagatctagcatctcgcgtaacgtcaacaatcgcagccatgttccggcaatcaagaagaccacgacgccgatgacaacgccaagcaacgtgacaccgactgccacagttcttgagctcagcggaatccatcccaccgtaacatgcacaataaccgtcataatcccggtcacggcaacaagcttgggtacaaacagccgcagtgcacttctgcctttgatcgtctcaggaactgcataataaatcaagcacaggatcacacccaaggccaaaattgtcgccccgcttgctcctgctgttccaaagcgcatcaccagtggttcattgctcagcgccttcaccacaatgccgagtaataaggccacactgatccctgtataccgatcaaggctttgcaaaatcgcattatacgcgttgatcatggcaacaacggcaatggcaagtgcatataactgcaaggcataagtgccagccgtatcgccaaacaataatagattaatcgccggcatcaagacaatcagtcccgaagccgccgccagcgcaaaggctaagttgaaatggactaattcggctccgcgctgaatgaactggcggcgctgtcgtaattgccgcgcctgagtcagactgggtagcaacgttgtagacaaagacgctgccaccaccaaacccaattggaccagtggctggccgcgatcataaaccccttttaagctcttggcagttgccattgcaatccctgaaccagtcaaacctttcgtcaccgtgaagctgtcaatcagctgtagcaagatcaacaaagccgcataaagcgtaatcgccccaccttcacggataaaccgactaattaagcggccgtatgcgtgaagcccgggaaattgatactgctgctgaccaaaaacttgccgataaggccgccataaagtcaaagcagcggcggccccgccaaaaaatgccccactcatggcaacagcgcccatttgataaacgctccagtgatattgcagaaaccaccaagccgctagcagaatcaccgccacccggacaagctgttcaaccacttgactcgttgcggtttttaccatatcaaaagtgccttgaaaataaccgcggccagttgccagtagcggcatggttaagaacataaaggccaccatttggattaacggcaacaattccggatccgccatcgcctgcgcaattgcggccccaaaaaattcgagtcccaaaaataacgcccacgaaatccaagtcaaaatgacccgactttgatgggccactgttcgtttggcttcgagactgtcagcttctgcaaccagcttggagatataaaccggaaaccctgacaacgcaaacgtcatgcccagtccataaatcggataaatttgctgataggcgtaaaacccagtgtcgccaaccatattctggaaaggaacgcgataaacggcgcttagaatctttgcaatcaaggaactaagactcaagatccacgcaccgcgcatcaaatgtttcatttgttgattatgcatggtgatctcctatcaacatcgctgcatcgctgtgccaaaataacgcagcgcacatcgatatccagcagttcatcttattaggcggcaggcttttttcccggctgcggattcacaaccgccagcaatcccttcatgaaagcagttagttgccctagccactcgtcttctttcatggttgctggcacagcgagcgttaccgtcagctttccatcggcaattgctacttgtgctttcaaagtcgtagccgccaacgccttgaagatcggttcgccttgtgctttagcagtcgcttgcggggttaacaccaccgtcattttctggtcgtttttctggacgtgatccacccaagccaaatcagcgaaacgtttcagatgtgcgattgccaaaagattcgtcaccggctgtggataatcgccgaatcgatcaatcaaatcttcactaatctcggtttcggcttcatcactgtctgcttcacgaatccgtttgtacagttcaattttctggcgcgagtcggcaacataatccgttggcaggtatgcttccagacccaagtcgatttccgcatcggttttttgaacggttttaagtccgcggcgtttgttaaccgcctcttgtaacatctgcgtgtacaagtcatacccaaccgaatcaataaatccatgctgttgtttgcctaacaagttccccgcaccgcgaatcgacaaatcacgcatcgcaatcttaaagccgctacctaattccgtgaaatccttaatcgcctgcagccgtttttcggccacttcattaagtaccttcatcggttgatacatgaaataagcgtaagcaacacggctggaacgcccgatacgtccgcgtaactgatacaactgggacaatccataatgatccgcattttcaataatcagcgtattggcgttcggcatatcgaccccggtttcaataatggtcgtggtcactaatacgtcatacgcgccatgcagaaaatcatagatgacattttccagctgggtttccgtcatctgaccgtgggcatacccgatgctagcgtcaggcactagctcttccaattgactcacggttcgctccatatcctccacccgattatgcaggtaaaagacttgaccaccgcgttccatttcgcgttcgatggcttcccgaatgaccccggggttttgctccatcacaaaggtctgaatcggatagcgatttgtcggtggcgtctcaatgacacttaagtcccgcacgccaagcatcgacatgtttagcgtacgtggaattggcgttgccgtcagcgttaacacatccacattgcttttcagttgcttaatccgttccttgtgcttcaccccaaaacgctgctcttcatcaatcaccaacaaaccgaggtcacgaaatgccacatctttagaaagcagtcgatgggtgccgacaacaatgtcaatcgtgccgtttttgagtcctttaatcgtcattttattttgatgcggtgtctggaagcgcgataacaagccgattttaaccggaaaatcggcaaatcgatccttcatggtgtcaaaatgttgctgcgccaagatggtagtcggtactaaaattgcgacctgcttaccatagtcaactgctttaaatgctgcccgtaacgcgacttcggttttgccaaagcccacatccccgacaagcaagcgatccatgggtttgggtttctccatatcccgcttaatttcttttgccgatcgcagttgatcaggcgtctcgggataaggaaactcatcttcaaatttttgctgcagatcatcatccggcccgaaagcataacctttttccgcttcccgttttgcgtacaagtcaatcagctcgtcggcaatgtcttcgattcgagccgccactttgcgtttggtcttttgccactcggtaccgccaagcttattgacgttaggcgttttgccatctgcagaaacatatttctgaaccagatttaattggtcaaccggaataaacagtttgtcattgttgcgataaacgatggtgatgtaatcgcgatggacaccgtcaacttcaagcgtctccatgccggtatattgcccaatcccgtggttgacatgaacaacataatcgccaggctttaattcattatagctgcggaggcgttccgtatttgccaacgtctgatggcgagcccgccgccgctgccgagcattgaacagctcgtgttctgtcaccactaccagcttcaaatccggcaattcaaagccgttcttcagactgccatcggttaactgaacttttcctgaaagcagctgattaggttcggtcaccacattactaatctcaaaatcatgtaaagtagcactcagcttatccaaacggttcttatcggaaaccaggaaaaccacggtctgcttttgtttcacccaccgatccgtttcggttttgagcaatggcatctgactaaagaattgttgaacattgcgactcggcacgttagtcaagctatccaaccgcaactgacccattcctttttggaaaaggctcaagtaaagccgcggatgccgatcacgctgattaagcgcttggatcgtaggattaggtgttttaggcaacaaacggccttcctcttgcagctgtgaataccattcagccgtatcctgcaccaaattcgtatcactatccaacaggcgactgtaatcatcaaacgctaccagcgcatcaccggcaagataatcagtaatgcggtgatgttccggatacagctccggcgcatacaatgccaggttttctggccgttctaatgcttgtaactgctggctggtcgtcaacaagccatcggtaatcgcttgctttgccgctgcatccttgactttcgctttgtaagctgttgcctgcttaccgattcgcgcaccggcatcggtcagcacctgatcggaagcgatcatgtcagtagccggtgcaatgacaatctgatcaagctttttcaaactgcgctgggtagcaatgtcgaagctgcgaatcgagtcgatttccgtatcaaacaactcaatgcgaatcggatcatcctgatttaatggataaatatcgataatcccaccgcgaatggcaaattggccgggcgcactcactaatgaatcacgccgataacccatcgccacaagctgcttggcgaccgtttgcggatcaagctctgaatccatatcaacaaccaactcacttgccgcccatgcagccggtgcgggtaaaattcgcttatatcctgccaggctggtaacaataatgcccggttggccgctttgaataaaggtcagtgcgttgatccggtcgttgcgggtttccggtgaactgaccgccacttcagccgccaatacatcttcaaccggaaaatcataaacaagcgcatcgcctaataaactactcaaatctgctgccaactcgtctgcatgaaaccgattattttcgacaatcagcagctgctttttttgctgctgcaagagtgcgccaaaaaagaccgtcttggccgaacctgatagtcctgtcaccaaatggcggcctgtctcgagcttaggccataatgccgacagttccggatctgcctgcaccatgtcgattaaattcatcgctccacctgcttctttcatattcttcaagtttacccattaccccaagcttcatcagccagcgaggggcaagttttaattaaacttattcatcaactgggcaaatggcatgccgtttagccaatcttccaatgcatcatccgctttagtgatagcagcatcaatcactggttgatcggttttggcaaatggggtcaacacccagtccacaactcgctgccgctgcgggtgctgaatgccgatctttaaccgatagaattcgtcacttcccgtagcgctgataatgtccttgataccgttgtgaccgccggctgatcctcgctggcgcaatcgtaacttgcccaatgtcagatccatatcatcgtgtaccactagaatttcgtctaacctaatctggtaatacatcattaactgccgcactgcgcgtcccgacgcgttcatataggtctgtggtttaaccaggaaaactttttcatcatgaacacgtgtcgttgctgtggcagcatcgaattcaagcttgttaagggtgagccccattcgctgtgccaagccatcaaccaccatgaatcccatattgtgcttcgtgcctgcatattgacgtccgggatttcccagacccacaatcattttcatattatctcctcatcgtatcgagcttaaattcatgcaatcctgcttggtttaccggtgatgctgacacttaaccaagccaagcgaagaacaccaaacgcctaacccagataaagaagttagctgcttggtgttgcttcgccgaatgttaaatgctgcatgtccgcgcactgttttctattagtaagtagtataacacatgccggctgactgactgtatgtctccctttctgcgaactgttaagttttgttaattcgtgaaaatagatgttgcaagcgtttacgttcctgaaagccagcttgtctcaggattcacaagccttggcattgtaaggctcagccccgctttttaacaatgacaaaatcatgaaaaagtcagtcaattttgtttcagtgatttgataatgtgttatactcacaatgaaatgcagtttgcatgcacataagaaaggatgatatcaccgtggcaagtattacggataaggatcaccaaaaagttattctcgttggtgatggcgccgttggttcaagctatgcctatgcaatggttttgcaaggtatcgctcaagaaatcgggatcgttgacattttcaaggacaagacgaaaggtgacgcaattgatttaagtaacgcgctcccattcaccagtcctaagaagatttattctgctgaatacagcgatgccaaggatgctgatctggttgttatcactgctggtgctcctcaaaagcctggcgaaactcgcttggatctggttaacaagaacttgaagattttgaagtccattgttgaccctatcgtggattctggctttaacggtatcttcttggttgctgctaacccagttgatatcttgacttatgctacttggaagctttccggattcccgaagaaccgggttgttggttcaggtacttctctggacaccgctcgtttccgtcaatccattgctgaaatggttaacgttgatgctcgttccgtccacgcatatatcatgggtgaacacggcgacacagaatttcctgtatggtcccacgctaacattggtggcgttaccatcgctgaatgggttaaagcacatccagaaatcaaagaagacaaactcgttaagatgtttgaagacgttcgtgacgctgcttacgaaatcatcaaactcaagggtgcaaccttctacggtatcgcaactgctttggcacggatttccaaagcaattcttaacgatgaaaatgcggtactcccattgtccgtttacatggacggccaatacggcttgaacgacatctacattggtacacctgctgtgatcaaccgcaatggtatccagaacattctggaaatcccattgaccgaccacgaagaagaatccatgcagaagtcggcttcacaattgaagaaagttctgaccgatgcgtttgctaagaacgacatcgaaacacgtcagtaatcttcaccataactgattttaaaccggcgtcaaccgtgatttaatcagtgagtatcaaagtggatcaaccccagagatgaaaaacgtctctggggttgatttcgtttacgccaccacaaccgatgcaggtggcgtcaaccaataccgaagatggccgactcaattcccatatcatcaccagtctgtgcttttcaaagtcattggcttgcgcttcgtttcataatgtttttttaagtttaccgttcattaactgtaagtggtatgataccgcagttccttcaccaccgttcgagaggcgttgcttttatttccggcgttggtatcttataataagtaaaaataacgtcatttttaaggaagtgcttgttacgaaacaggaacaaacaagaagcaggaggcagcaatcagtgaataagaaaaaatggtggctcctcgcgctcggcgccgtagtcattcttctaggcggattctatatcttccgaagtatgcactaccgcgatcattttttgcccaatacagaagttctgggcgttgatgtttccgatcaaaccgttagcgcggcaaataagaaactcatccaacaatttagtgaacgccaatatacctttgttgaagatgataaaaaagtcttgaaagtcaaaggcagtgctttgggtatcagtcaagacttcaatcaaggacttactcaagtgctgaataagcaaaatccttggcaatggacaacttccatttttgcgggccaaaaagcccatgccgaggaagacccgtcaattaataagacggccttaaccaagtttgctcagacgactgctgacaagcttaatcaagggcgtcaggggccggaaaatgcaaaactagtcgcggatggcactaaatataagattcaaaaagaagtcaacggtacccaaatcgatgcggataagcttgcaacaacggtaacgaatgtccttgataatcatcagcaaaccgttaatctggccgctgcgtacaagaagccgactgttaccgcgtctagtagcagcttgcaaacaaccgaacgcgacatgaacaagctggcagggactaatgtttcattgcagattcagaccaaaacggtgaccgttccgcaagcaaccgtgatgagttggatcataaacgataatggcaaggcaacggtttcaagtcaggccgttaccaattacgtttctgccttatcgcaacagtacagcaccatcaaaaaaacgcgtcaattcaactcgcaacaacaaggaacagtgagtgttcctgctggcacctatggctggagcattaatgttagcgccacaaccgccatgattgttgccagtgtcaaagccggacaggatctcaataaagaaattgtccacaacggttccggttactcaacagacggcgacattggcaacacgtacgttgaagtatccaaagaaaaacaacatgaatggtatattaaagatggtaaagtcgtcatggactccgacattgtcaccggtaagccaggtcaagacaccccatccggcgtcttctatgtctggtccaaacagcgtaacgcaacgctacgtggaaaaaacgacgatggcagcgactacgccagtcctgtttcgtactggatgccaattgattacaccggggtcggcctccacgatagtccgtggcagcctaagtacggcggcgactggtacaaggaacacggatcgcatggatgtgtcaacaacccgccagacttcatggcaaagttgtatgccgcagttgacgaaggcacgcctgtgatcgtgtattaagacgtacctgataaaatgaaggtacaagaaatggcttgattccaaactactacggaatcaagtctttttttggccatgattggacgtacatgtttatccaatcagaattacagctgtcacctcgaagactagcggtgctctgagtcgtttccctttggctcgtctgtctgtaaatatgcttttaacgtcttgatctgcgcctcatactcggcaatgccaaccgaaaaagaaagatgctgggttttagtcatgtttggccattcttttagccgcaactgtaatttgtcaatttgcattcctaaccacccaatttgctgttgaatcatcgcttgtaaggctgtatccgattcgtattcaccaaagtagagtcgcatcaagaaatctgaatgacgggtatccggaacaactgacgcatcaagcgagtcttcaaaaacctttttaccttcttcagtaatggcatattgatttttatttggtcgcccactttggacgaccatttttttggaaacaaggccattcttctctagacgtcgcaaggttggataaatcataccaaaagaagcgtcataaaaatgactgaaaatatttttaaagacttcgttcaattcgtaccctgttctcgaatgtttatatagcaagccaaggataatctgctcattattcatgctaaaacctccaatgatgttgtctatatcttaccacgttaatattaacggaaacaatattaattcttgacatataaatgagggcgcgttaatatccttttatattaatcccgttaatataaacgaaaaaaatatggaggcgcaacatgattaaatcagaatggttatctgtcttaaaacgaccaatggtgatcgttgttcttttcttcattactcttattccggcaatctattcaggtgtctatctctcttcaatgtggaacacctacgagcacacgaaggatttacctgccgcaattgtcaataacgacactggtataaccgacaacggtcaagcggttaacgccggaaaagatcttgtcaaaggggtgctcaagtcagattcaatgcattatcacgtcacttcaaaacaagaagctgaccgcggtttgaaaaatggcgactattatcttgtcattgaaattccaaatcatttttcaaaagactcccgatcacttttaacgcaacatcccacggccatgaatatcacgtacaaagtgaatccaggaacagatttctttgcctcacaaatagcaaagggcacggccactgctattcaagccaagctcaaccaacagatttccgctatttactttaaaaatctaacggcaggggtcgtttctggaacccaaggcaacgcaaaattactaactgccattgatgcacttaatgccggcagtcaagccttatccactggtctgtcgcaacagaaaacggcgatcaccgcactcagtaacaaccttccgagtacagcccaaccgttggcaacgcagctaacctcatcgaacattgcactatctaacgctgcgacctcgctaacagctggtacggcaaaggttcaaagtgccttaacccaatcacttaaaacgcagcccagactagccgtcgcctccaagaatattcacttattatccgcccctgtcactttaacccgtgttgacatttcccatacacctactaacggcgtcggcatggcaccattcgcgattgcaatcggcctttatgtcggctgcatctcgcttagttttatgtacgacatgtactcaccaaaaacaaaaccaaccaaagcaattgcatggtggtggagcaaatatagtctgctgttagttctaattgggattcaagtaggctgtcaggccatcgttgtcatgagcctaggactaaaaccgttatccattggcaacacttgtttagcaatgttggtcacggctatcaccttcataacctgtgtttttggcctaaataccattcttggtgctttcggcaaatacctggtcaccattttattgattcttcaactaggtgcttcgaccggcgtctatccgttggaaacagccaatgttttcacccgtatctctagcccattcttgcccatgacctatggcatccacgccatgcgcgaagcaatttcaataggcggtcaaatgacccacgacttggttgtcatgttagtagtcacccttgtcatcaatggtttagtcattgtcaaacttgagttggatcgtaaacacgaaaagtttagcgatcttgttgatgatgtcgtgtcatccatcaactagtctcgctggcaatcagcaaaaaagcagatcgcatgtcatcatccaggaggcgtcacaaggaatatggccactaaattaattttgatcgtgtattgtcacccttacacccacagctttaatcatgctgtgttaacgcacttagaaaaaaacctcaccgatcatggtcttcattatcaactcatcgacctatacggcgatcactttcaacctttttacgatattgaagagttgcgcttgttccatcaagggcaaacacatgatccgcttgttaaacattatcttgatcaattaaaaacagctcaagggatcattttcgtcacgccaatttggtggaacagcgtccctggcatgctcaaaggtttcattgataaagtgatgaaggaaggcgacggtttaacgcatactgtcaccaaaactggcgtccgcggctgcttgactaatttaaaacgagcctatgttttcaccacttctacatcaccaacattttggttccgtaccacatctggaaacagcattcagaaaatcttcatcaataaaacgctgaaacaattgggcattcagaaagccaagtggtataacttcggcaacatcagtcatgcatcgaaaacccaacgcgatcattatctggtgacatgccagaaacgacccctgctcttttgaaagtcagagttattgaccggcactcatcaaacatagctatcaggtcgctgacagtcttcttccgcatgaacaccccagaaaaacgttacaccgccagcgaactatggtatcataaagcaagattagaacattttaataaagtgatagttgtttgatggaggaaagcgcatgttaattaagtcgttagtattaaaaaaggaattcctgaccactgtcaaggaaacggttacccttgaagaagcgctgaagatccttgaagactccggctttcggtgtgtgccgatcctagatgagagcggcacgatcttccgcggcaatatttacaagatgcatatctatcgccataaatctcaaggcggcgatatgagtttgccggttacttatctgctgaagaatgcaaccaaaaccattccggtcaatgcgccattctttaaggtcttctttaacatcaaggatctgccgtacattgctgttttagatgaaaatgccaacttctatggtattttgactcacgctaaactgcttgggatgctgtcagaagcttggaatgtcgatgtcggctcttacgttttgacggtcatgtcaactggtgaacgtggagacctggcaaaaatgagtaaaatccttgctcgctacgtttcgatttccggttgtatcacgttggatgctaagcgtgacgagtttgtgcggcggacgcttttcaccttgccggccggtacagatgaaaatacattaaatgaaattgtatctcgactagagaagaagagcttccgggttgtcgaaattgatgatctccaatccggtcagccgcttcgagtagacgaagagctttaatctgcccaatcacgtgcgccatcagtacaaaacaagcgtgtaagaacctcggacacaaccattaaggccacttagccgttcgtttccgactagccgactcacgcttacaaaaagctcggcagcattgactgtcgggcttttgtgatggttgaaaaatgccatgatgatacgagcaaaggtgctggaatcgtgcactggtttggactttggcgatcctttataatacagtgaacagtgaagttgttttatttttattgctgcaaatgcatcaagtgcgaatagaaaggatgctacatgtgaaacgaataaccgaactgatgcatcatcttgccgcgatgatgcattaccttcattcacatcatctgaaaccaaagtaccggaatcgcctgcttttcattgctgtcttcataacggtgtgtttgatcgcagtctttaccggacaacatgctaaagagtcagcttcgacagcgtcaagctatgcatcggtcacaaaactcgccaagactaaccacacgccgagttacaccgctgctgaaattactcgggttacgcctaagaagattgactggaaagcaccttccgaaagtcggccttatcctgacgtctccaagcatcccaacctctctttgcatgtaaacttgaaaaagcagcgggtatttattaaagatggcagcaaaacgctttatacaatgtatgcatccacgggcattgacgacacaaccccgcacggtgactttaccattcaggatgagcgcggttatgaattctttaatcctaacgagcaaatgggtgcacattattacaccagtttttacttacatggtacctatctttttcattccgtaccgacagatgtcaacggtaactacattcaatccgaagcagcaaagttgggtaaaaagccgggatcacacgggtgcgtgcggctgagtatttctgatgccaaatggatttatgaacatatcccaacaggaacgccggtttcaattcattaacagatgcctatcaaaaaagtcccctgtagcaacttattcgttgccacaggggacttttttcaaaggctaaaccgccaacctataacgcttcacttgccaatgtttgcaaggatgcatcgactttttccgcacacatgcggccttcgtgaatcccccaaataaccaagctggggccgcggcgacaatcaccagcaacataaacctgggtatcattggttgtgaagttagtattcttggcagtaatcccaaatgcatcaaaaacatcggcttccggaccggtaaagcccatggccagcactaccagatcaactttgactttcttctctgttcccgcaatcggtttaaaatgatcgacttggctaatctcggcttcactcacttgaccatgctcgccaaagaaagcagtcaccgtagcggcataggtggtcacatcgccgccaaagagcgcttttgcctccttctggccataaccggcttttaacgtcatgggccactctggccactgattgccagcagtacgcttgggtggtaacgccggggtaatttcaagttgcgtcacaccggcacaaccttggcgaatcgcggttgcaatacaatcattgcccgtgtccccgccaccgagaaccaagacgcgtttacctttcaattgggtattcgcttgggtaccatctttgaggactgtctgagttgctgtcttgagaaaatcaactgcctgaacaataccgcctaactcgcgccccgggactggtaactcacgagcctggcgagcacctgtgcaaacaataacccggtcgaattgctgcttgagttcatctgcggaaatatctttaccgacttccgtattggcaactaattcaatcccgacttgcttcagtgtttcgatacgccgctgaacaacgatctttggcagcttcatgttgggaatgccatacatcaaaaagccaccgaagcgatcatcccgttcaaatattgtcacggaatggcctaattgattaagccgccacgccgcggaaatgccagccggaccactaccaatgaccgccacttttttcccggtacgttgcagcggctttccggatgcaacaacccagccatttttgaacgcctgctcgatgatgtacttttcattgttacgaatggtaacgccgggaccgttaagtgcttgaacgcaggaaacttcacagggtgccggacaaacgcgtcctgtcatatccggtaacatgttggagcgactcaaccgttcaaacgcgcgcttgtcttctgcacggtaaaccagatcgttccattcgggaatcagattgtcattgggacacccgctgaccgcgcgaccgccaccataaaagacgccatgatgacaaaatggaatgccacaattcatacaccgcgctgcctgtttacgtcgttcctccatgctgacgtccagttccaacgcatcaaaatccttgacccgctgcataattggacgcatgggattatctttgcgctgatacttcaaaaagcctttgggatctgccatcacgttgccctcctcatatcattcgtaggtacttctttagtcgtgcttttatcaaaatcatcggctagtgtccattgcccatcgccgtgtcaaaagcctgctcaatgacctgttcttcagacaactcgggcttggtaaacttttgaatgagatcgcgcatcttatgataatcacgcggataaactttcacgaactttgttttctcggtttcccagtgtgtcaaaatcatttcggccgtctcggattgtgtatattgcacatgctttttcaataaatccagcagcacactatcatcgcctgcttcatctagccggtacaagtccacgagctcctggctgcaatttttggcaaagtcatgtgtccagtcgtaaacatacgcaacgccaccggtcatcccggccgcaaaattgcgccctgtgcgccctagaatgacggcaaccccaccggtcatatattcgcagccgttattgccgacgccttcaacgaccacttgtgccccggaattacggacacagaaacgttcaccggcccgcccgttaaagtaagcctcaccgcctgttgcaccaaagcatgcaacattgccgacgatcggtgaatgcgtataaagttctcgcgcctgttctggtgccgccacaatcaaccggccgccagaaagccctttacccacatagtcattagcttccccgaccagtttgatggctaatccttgcgtaataaacgccccaaaactctggcctgccgtaccgtgatagttaaactgcagctgccccggtttcaacccattattgccaaaatgcgcggcaatccatccgcctaggcgcgttccaaccgcccgatccacattattaatcggtaaatcaatcgaggtggcattttgctgtttaagactggtttcagcaaaccgatccaaatccggccagtcatatttcggcttaaatggattggcttttttacgcgcaatcggaaccgtcttgcctaacattcggtcataattcaatgtctttgccttgccatatggcacatagcgaggttttaggtgttctccgtgtccaaccatttgatctacggtgcgataacccaaagccgccatttgttcgcgcagatcttcggctaaaaattgcatcatatgcatgacgttttccgggcgtccggcgtagagtttgcgcaattccggattctgggtggcgatgccgaccggacaggtgttgagattgcattttcgcatcatcacgcatcccagcgctaccatggtcagggtgccaaaactgaactcttcggcacctaacatgatcgcaaccgcaatgtcgcgcccggttaagagtttaccgtcaacttccaaagtcgttcgctgccgcaatcgatttaatgccagcgtctggtgggcgtctgccaatcccatttcccacggcaagccacagtcacgcgtggagtttcgaggagcggcgccggttccgccgtcataacctgagatgacgaccgtatccgcgccggctttcaccactccggcggcaatcgtgccaactccggtcgaggacacaagcttaacgttgatcttggcataaggattgacttgtttgagatcgtaaatcaactgggccaaatcttcaatcgagtaaatatcatgatgcggcggtggtgaaatcagctgaacaccggcaatcgaaccccggatgctcgccacccacggatatgccttgccagcaggtagttgcccaccttcaccgggtttagccccttgcgccattttaatctgaatttcttcggcactcatcagatactcggtattgacgccaaatcgtgccgtggaaacctgtttgatcttactgttgcggttgacgccatctgccccgacatggaaccgattgcgattttcaccgccttcacccgagttgcttcgggcgcccagccggttcatcgcaatcgcaatggtttcatgcgcttcttctgaaagggcaccaaaactcatcgccccggccttgaagcgtttcacaatggcactgaccggttcgacctcactcaaaggaaccgcttgttggccgcttggcacgatcgtccacatcgaacgcaaggtgaccggagttgttttggcttcctgttctacttcggctgcatactgctgataggcctgatagtcaccgcttctgaccgctttttggaactggtaaatgctcttagggttataaagatgcgcttctccatccgccttgaattggaagctgccgcctgaaggtaaatcatcaatggcatgatgactgaaagccagttgatacttctgatagtactcattttccaactgattcaggttaatcccgccgattcggcttggggtgcccgtaaagtattgggcaacgacatcatccgccagtccaaccgcttcaaacagctgggctccttgatagccggcagtcgtcgaaatccccatccgactcataatcttaataatgcctttggtggcagcagcacaaaatgacggcagctgctggtcatagccgcgctcacgcaaggtggcaaatgcgccataaggatgaatggccgccgcaccatacccgaccaagcaggcaaaatgatgaatttcgcaagcttcggccgtatccaccactagcgatgccgctgtccctttgccttggcgtaccagataattgtgcaatcccgacacggctaaaagaaccggaatcgtcagctggttatcggcaactggccggtcagtcaagattagaatcgtcgccccgttatcaatcgcattttctgcttgggtaaacaattctttgagcacatgtgccaggcgatcaggtcggtctgtcaaatcgtaggctaaagataacttagcgaccttcaaaagcggcaaatccaaactaagtactttggcgtatgcttgatcatccagaatagggctatcaattttgagtttgtgacaattgtccgcagtatcgcgcgtgcaatcgccatcgcggccaagaaaaccaaatgttccaatgactactttttcccgcaatggatcaatcggtgggttagtcacctgcgcaaaagattgtttgaagtaggtgaagagtgattgcgggtggttacttaaaactgctagtggcgaatcaaaccccatcgccaagacaggttcgccgccgttttcagccatcgggatcaacgctgtctgaatgacttcatgcgtatacccgtgccgcaaccatagttttttgagctgatcaggtgcaatgtcttctttaggctgaacctctggcaattgatcaagtgtgagccgattagcattgatccattgttggtatggatagccttctgcacaatgccgttttagctcatcggttttgaaaatccgtcctgtacttgtatcaagcagcagcatttctgcaggtgccagaatccccttttcaacaatatcgccgggatcaatatccacgaccccggattctgatgcgacgaccagttggcgttggttggtcaaggtataccgcgatggacgcaatccgttacggtcaagaaatgcgccgacttgaatgccatcggtgaaacataaagcagcgggaccatcccacggtgccataaacgtcgcattatattcgtcaaacgcgcgctgttcatccgacatttcggtacccgcaccccaggcttccggtaccatcatcagcaatgattgtggaattgaacggccgtgtcgatataagtattccatgcagttttccagcttagcagagtcggaatcggtttcgtcataaatttcgatgccgtggcttgtcatccaattttcggcgcccttaagcgtattaatctcaccgttatgcgccagaaaacgaaacggttgtgcccgatcccagctgggaaacgtattggtcgaaaaacgcgaatgaatcaggcagatagcactttgcatttgtggtcgatgcaaatccggataaaaaagactgacttgatacgcatgcaacatgcctttatagactagcgtgcgactggaaaaagaacaaatgtacattgattgccgatcaaaggtcttttccaactggcggcgtaacgcatataaatgatcctcaaattcacgcccggcctttgtgtcagccggacgttgcaccacaatctgaacaaaacccggcattgcttgttgcgcagccgggccgcaattttcataaataaacggcacattacgggtccgaagtatcggaaagcccgcgtcgtcaatttgatcaaccacagcctgcagcatggcggcctttttggcttcatcatggggtaagaacaattgggcaaccgcatagtcacccttagccggcagtgtcaatcctgcttgcgtcatttcatcgcgaaaaaacgcatccggcattgccatcaggattccggcaccgtcaccggtatcaggttccgcgccagtacccccacgatgattcatccgctgtaacatagtcaatgccttttccacgatttcatgactggcatgaccatcaacttgggcaataaaacccatgccacaagccgcatgctcatattcaggcaaatacattagattggtatcatcttttaatcttttcatagaatctccgccttattcattaacgtccggtccttatcagcgttattgttctcatattattctaatcatgtctcattgacaagatttttttgaccgaacacgcgtgatgattgcgcatatttgttttgtcatgcacaaattaaattgccgtcataaccacaaaaaaacggctccaagcaggcaacttgctgctttagaaccgtttatccgctgtaccatgacacgcttataacttcaaataagtcttcaagattccaaataaaccctgtatcacgaaagaacttaggcaccatccctatttttgcgccatggccgtccgaaaatgaacaatccgatcaagtgccagcatcactggggcagaaagagtcatgacaatgaactcagacagcatcagagatccatatgttggcaaaaacatggtggcaaacttcaagtgaccggtccaaataatctcaactgcaatcaacgccatcgtcagggtcatgaccgcaatattcaacgcaaaacgttgccataattgctttagcttaggcgccaaccaagctaccaccgataacccaattaggctctgaccgccaccaaagacaacatccagccagcctaatggcgaaaaaatcgcgttaaaaatgacgacgccagaaaccacgccgatcaagtagcgacgatcaaagaccactaaatgattcaagctttccgagagtcgaaactgaatcgccccgctggcaagattaaggctggccggtcctaacgataaaacaatataaatagccgccaccaaagcatttaaaacccaaccgcgaatacccatttttgtttgcttcatgccgtttaccgctcccttacttaagcttggttatgtattacttattctccataacacgctccctggtgcaaggatctgcgtgtgaggaccttggttgcaatggccaaagcccggccatacgtctgaggccgcttatgttctggtttacgcccataacgcgttcgccagcccagaagcctgcgtgtagggaccttgggcgcaatggccaaagaccggccattgtgcctgaggccacttatgttctggtttacgcccataacgcgttcgccagcccagaagcctgcgtataaggaccttgggcgcaatggccaaagcccggccatcacgcccaaggccacttatgttctggtttacgcccataacgcgttcgccagcccagaagcctgcgtgtaaggaccttgggcgcaatggccaaagcccggccatcacgcccaaggccacttacactccggcttctaaccgggctggctcacgctcatcaaaaaagcgcctctttttcatcgaggcgtttgcttagtttttattatatgttttcggcttaggcaagctgacgagtccgaccgatatcgccagtgcccgatccaccgctgccattttggcacttgaaagagcggtaacgcgtgcctgtaaccgttgcttatcaattgtacgaatctgttcaagcaaaatgactgaattacgctcaaccccgtcttgcttggcgcgcaaaccgacatgggtgggcattttgggtttttggattttggaggtaatggcagccacgataacagtggggctataatggttaccaacattgttttgaataataagtacgggccggttgccgccttgttccgacccgacaaccggcgataaatcggcgaaaaatacatccccgcgtttgactgttacatccatgctttggcccccttgctgcttatcgaatatgggcgtatgcctcactttcgcaggcggagaaagcatggctgatttccgtattgatttgtcccattgccacatagccagaaatcaattgattgatctcaggtgcttgtgactgcaaaaacttcgccactgcttcagtaatgacatcctgaacacccatatcattcaactcgcaataggcatccaaacgcgctttgatagcactatcaagcgcgaccgttactgacgtttccttcttcatgacaacttcctccaacttcccaagttcatggtgatactttagcacaaaatcagctgatgggctacctgtcaaaaaaatcgattcatctaagccagttacttaaaaccgatattaacgcgcaatcgggttgatactttgacgtttcaaccgcgatgttaaattgcaggcaatttcataatgaatggtgtggctatacttagcaacgtccagaagcgtaatctcctgatcgccactttgcccgattaacacaactttggtacctgccggataagcttttggcaagcgaatcatgaactgatccatgcaaattcgcccgacgatttcacacggatgaccatcaactaagacgtgaaagccctgtaaccgccgcagccagccatctgcataaccgactggcaccgtcccgataaactcatcacctgtagcgcgatacgtcaccccataagaaatcccatcgccggcatgaacttgcttgcaaaaagttaattcgctctccagtgacaaagccggctcaagcggaaacggtgtggtcggaatcacatcacctgatggattcaaaccgtaaattgccacaccataacgaaccatattgccgttacatgctgcatgccaaagacttgttgccgaatttgacacatggacatagcgtggccggtgcggtaacaaagccaccatatggttgaatttggcaacttgctgtttgaagtaagcatcatcaggatcatcagccgtagcaaaatgcgtgaagatcccttcaattgtgaacgccttgggatgcgcttgaatgaaggcaacggcatccaaaagtgtctgatcatccgtaaaaccaatccgccccataccggtatctaaagcgatatgcagccgcaatggtggtaactccggttgcgcctctaaaactggcaaggcctgcttgagccagtcaacactactgagcggtaacgaaaccatctgcgcagccgcaatggcagcatactgactcggaacgattcccaacaccagcactggctctgtatagttagccgctcgtaaatccaatgcctcatcaagcaacgccacacaaaaaccgctggcaccggccgctttagccacatgcgccacccgcaacataccgtgtccatacgcatccgccttcaccacagcaaacagttgcgtctgcttcttcaagcgcgctacctcatgttgaacattatgcaaaattgccgtttcatcaatcaaaaccgttgctggtcgcaagttaccgatcgtcacgttcaggaccttctttttctaatattacctcggtaaacaccaaagtctcactatgggaaatggaaacaaatgcctttccgggaaagggatgtttcgtcacaattggcttgccgagttcgttattcaaaacttccacatcttgcaaggcaactttacccagccctgtcccaaaagcttttgagtaggactccttagccgaaaagcgaccggataaatactccaccgcccgccgaccatcgagttgttgataattcgccaattctttcggcgtcaaaatcttagcagcaaatccatggttcttctcttgagccgcttgaatccgcgccaagtccgtcacatcaactccaataccataaatcatggccgcctcccaaaaatctgtgataccgctattttaacatttcaccaaacaaccgcctagtgagcacgaaaaaacgatcccggaagatgcagacttgcatcaccaggatcgtttttcagcgctggtcattgattcgcatgaatgaccggtctattaacgtactggtgattattcacccgtacggattttgaaattacgcttaacgtttttacgtttgtcgccaaagttgcgcttcttgtcataactgcgcttgccatcgcgattaccttgatagccgccatcgcgccgcttgcctttgtagccgcctttataaccgccacgattgttaccatggccgtgattgttgcggccgcgacgtggtaatggacgttctggtgtaattttaaccggaacggcactcgcatcgtcagggctgactgccttgagatacgccgaaaccagctgcaacggggtgtagttttccaacaaggtttcagccattgcttcatacttttcggtatcgttagcttcaacttgttccttgatggttgccaagccgctggagatctggcccattaatgcttcttcagctgtcggcggcttcatcggtaacatccgcttcttggtgagatcctcaatggtgtgcagatattcaatttcatttggcgtgacaaaggtaacggatacccctttatgtccggcgcgtcccgtccgaccgatacggtgaacataggaatccggatcttgcgggatatcatagttgtaaacatgggtgacaccagaaatgtccaacccacgagcagcgacatcagttgcaaccagaaaatctaattggccgctcttgaactgccgcaaaacgctcattcgcttttgctgggttaaatcgccgtgaataccttcagcccgatatccgcgcgcctttaatccccgtgtcagttcgtcaacacgacgcttggtccgtccaaaaatcagcgccaagtccggatcctgaacgtcaaatagtcgtgtcatgacatcgaacttttcatagtccttggcccgaacataatattgctcaacggtatctgctgtcagttccttagccttaatcttgacaatcacaggttctttcatgaacttgttggttaaacgcatgatcgctgccggcatcgtcgcggagaacagtagagtttgacgctcagtcggcatttgttcaacaatcttttcaatatcgtcaatgaagcccatatcgagcatttcatcggcttcatccaacaccaaggtatcaaggtgttccagctttaaggtatgacgaccaatatgatcaagaatccgaccaggtgtcccaaccacaatttgcggatggtcagcaagctgacgaatctggcggcgaatatcagcgccgccatagacagcctgaaccttgatcttcttgtcgcggcctaaacggtaaagctcttcttgggtctgaatcgccaattcccgagttggggaaatgaccaatgcttggatactccggtcggctttatcgatgtgttgcagaattggcaagccaaatgctgccgttttcccggtaccggtctgggcttgaccgatcacatctttgccttccagaaccagtgggatcgtctccgcttgaatcggcgtcgcttcctcaaaacctgactgggcgattgcctttaagagatcatgatccaaacctagttctttaaacttcaaatgagttcctccttgagaattcttgcacgcgtttacccaagcgtgttttcaagaaatccgcgggcgtcacgtgcattttcagtaaatgacaaaaaaacatatcccaacaatagtagcacgtccactatcgaaaaacaaggacggcgattgcgagatatgttaaccaggcacaggtaatgcccactttcatctattaaaagtagtaaaagcttttagtattttcaagaaaattaaacttactgatgcccctcaatatcttgttcaaagtccgattcacgcatgtccgcctgcgaccagcgcagccaaaacagtttccagatgcagaccatggctcgcttttagcaacaccatgtcatcgtgcccgacatcgttttgcaaatcgcgaatcatggtacttttggcatccagcgggtaatagtgtacttgatcttgcggatactttgtcgttaacgcttcggcaagtgcctgcatttccgaaccgtataagtaaacctcctgaatttcgtgcggatcaagtgcatcggctagtcccgcatgcaacgcccggctttgatcgccaagttcaagcatgtcacctaaaacagcaatgtggcgtcctgccgtctgaaattcgctaaaatcatggatgactgctttcatcgcggttgggttggcattgtaaacatcgctcagaatctgctcgccgacatcgccaattaaccattgtgtgcgattagccgtcacctgaaaatgcgccagtgctttttgcatggcttccggtttgacatggaaacgccgacctactagcaacgcagccaaagcattgaccacattgtattcacccataataggaattgaaaaggtcaattccggccactgttcgacggtaaattcggtatgattgcgatggccgctaatcgaatgggcaaaaagcgtattttccggatgtaaaccaaatgtttcttgtgattgggtgacttgcttagcgcggctcaccaataacggttcgtcaccgttaaaaataaaggtgccatcctctttcaagccatccgtaatttccatcttggcatctgcaatcttagcgcgcgtcttgaaaaattcaatatgggcctcgccaatcatggtaatcactgccacatccggttcggccaacgatgacaatgcatgtaattggccgggccgatccatccccatctcaagcaccagcacttcggtattgggctccatactgagaatcgtcattgggacaccgatttcattattgtaattatccggcgtcttcacaacatggtattgcgttgccaaaatcgccgcagtcatgtcttttgtcgtggtcttcccattgctgccggtgatggcaacgactttagggttcactttcattagcaaataatactgggctaacttctgcatggctgccagcggatccgggaccaccaatgttggcagtttagtcgtcattggcagatggtcctctgccacaaaagttgcgactgcccccgcagcagccgccgctggaataaactcgtgcccgtcacgctcgccatgcaatgggacaaataacattcccggcttcaatcgccgcgaatcaaatgccaccccggttgccacttgcgaaccgactgtttcagagagtggctgggcttttacgacacgtgcgatctctgccaatgtcattttcatcattaactcgactccaattcttcaacttcacctcgtttttcaacaagatgacaaacatttttcaatcaaaatcacggaacaatttgcaattacaacaggttcttcctgcctaaaaacacgaaactgccccacaacaggcagtttctttagcgctcggttttttcttgatttctatcgggatctagcaaccattgattcttttgccgcattaaaactagcttaccgagtttacgggccgtctcatccggaaaaataccatccggaataaaccgctcatgcagcgccagcaacggaatcgtgatccgttcacgcgaaaactgaacgtgacggaaatcaaataccacaccatcttcaagtaaaggtagcagctgcgtataggcaccgtgcgacaaatgtgaaaagtgttgttgtcgcagccgcaaccaaaatggctgttcattggcaattcgtcgtaagtatttattgatcgccgcagctaaaaaggcctcaaataagctttcatgccgtaaatacatattgaccgtgccattacgcatcggcaaataaaccagctcattttgcaatttatagtaaaacggtgagttcagatgcgttttcgcatgacctaagtatagcagttctgcgatctcattaggggtcagttcctgcaaaaaccgcgaacgcgaataatccaaccagcagcgggtttgcccttccttactacgcaaaaaatcccgcacttgatccttgccattgataatattaaaccaagtgtgcggatcaatctgttcctgttcattgacaggtggcaacaggagcaaatgttccggcagtttttgctggctattcagcaaatcactcgccgaaatcccataagtcaaaaacaaatgggctaatggttcatggtgaacataaatcagtgcattccgcatggttaaaaccccttaatactcccaccactattatacgactttcgcggctcttcattcatgcagtatgatgaatttaaagcgcacgtgacatcgacaaactgcacggttaggcaccggccctctctgcagctatgaaaacacgctaaaaagcgcacccatcgcctaggtactggcgctaacaagaaaagaggaggttgcaacatgctaccatggccaaaaaagatcccacaacctaatttaccaacaattccagaaaccgacctcataccttcgacttatttttcaatcattcaaaatgggattttccctaaaaattggtggttgtcgacatcggagccgacaagcgatggtttgaccggcgtcggccttcatgcactggcaacacccggtccggcaatcacctcagacgacctgccatcagactttttgccttttgcccacactgctcaccaatacttcggctttgatttgcatcatgaggttcgccgaatacgttacattgacaccgaagtcgaccaatggctgacggttgcgccggactttgatacgtttctcaaacgcctgcaaccgcacccgattcagctacctgagctaccggtcgacccacagattttcggtcacatggccgtgatggcaacggcttcagattggccggccttatttgatcacgcccgcgaatttatgtctggcgaaacactcggccaatggttaatgtggctagccgccagcgatgatccggctaaacgccaagctgctgcagaagagtaccgttttctcgtgcgctatcagcccaacttgcttacgcccaatgtcaccatgaacctgcaacatttactgcattaagtagcaccaggcaactcatttatgacgagtttgatgcggttgaaaagcaaacgtcttcaaccagcttaagtcacgtttaatgccaaaatagccaaccaacgccaaccctaatgaacccagaaagtccatcaataaatcacccatcgtatccatgagcgcagcccgaccacgtaatagttcaccaccagcagccatatatcgctgcatgttcatacccaataatccatcaaatgtaaactcataaaactcccacaataccccgatggttgttccaaacgcgagggcaaataaagccatcagcaatggacttgtcgcggccaaccgttttgccggcgtcaacgctgtaaaaatagcaaagccaagcccagcaagcatcgccgcactgaataaatgctcaaacttatcccagtacggtacgctatagcattgcaatcctgtacccagtaaaacactcaagaggataaaaatttcaaataagtaaatcaaactcggcggaaaacgaaaatgccaccagtgctccatcaaacgcggcaaactaacaattaagatgcctgatgccacctgagcaagtagcatcatctgaccatgaaacaaagaatgaccactaagataaagcccgccgacaatcagtaagtaaagcatatcgccaccgatgtttaaccaatacaaaaaattcgatcgtttagtcatcattttcctcttttctttgtgattgtgaaccagcttggttactcctggcacacgcagaagcaacccgcgctttttgtttatgtctgtttccggctcccacttccatcaatatgggggtcgggagtgcgccatttaagtcgtgggttttggctcaggagcaaactcgagaaacgaagcccgccattttctggcatcagtgcaattaatatgcttttgtaagcgcttggtgtagactcagctttaggaggtgattccatgccaatcaaaacgttacccgaagatcaacttattgccatgagccagtccgtcgtcaaagaagtcgccaaagcgtttaactttccttattatgtcaatgatctgacgcatgatgcaaattttgacactgatcacactacgaccaagctcgaatttgagctcaccttgttgaacgaccccgatccagagcgtaccatcagtttttacagtgacgccagcgccgatccaattatgggcggcgccgcttctgcacaagtgacgattgtatctgatatcacgtttatttatctaaacgacgggtacaaggattcgtatctcattatcatccatgatggtaaggttgttcaaaatctcaaattagaacaacagattctgtcaggccccgaaattgaaaacttaatcaaccaagttatcccgcaagcccaataagtcttagcgtaagaaaagcagctgaaaggctgtttttttgttatcctcggttttgttaatcacgtaaccttcagtttagccgcaaaaaactttatcgaagcaaaatatacctctcgacagaattcacattttaacggccgatttagggaacccataaatattttatattaaaaatataatgcccacgctcaagactttgagaacacaaaaaaaccaccattaaaggtggaaaagtttgggggaacttttttgggagtgtaagttaatgtgtaagcttaaggctaaaatacctctgccttattgatttaagtatatcaattccttaatgatatgtaattccattttcaacaagaaatatgtttaataaataaaacggcttatgcttatataagttgaagctaacaaaaaagcaacctcaaaaggctgcttttttgcttatttcttgtcgaagccgtacttcttgttgaaacgatcaacccgaccatcagcctgcgtgaacttctgcttgccggtgtagaagggatgtgaatcagatgaaatttcaacccgaactagcggatattctttgccatcttcccacttaatagtttcttttgaagttttggttgaacccgaaataaatttgaaaccagttgctgagtccataaatacaactagatgataatctggatggatgccttgcttcataatcaattactccttttgccctaaatcattgcctgatctagagatactctgactacaactctaacagtctatcacgcgcaaacagcaaacgcaatctcaatctactaattcaacatctgcacctaaaccacgtaatttcatcacaacccggtcatagccgcgcaagatattgtcgaccttcgtaatcgtggtggtgccttcagccattagcccggcaatcatgagacacgcaccggcccgaatttcctcggccgcaacttcggtcccttgaagatgatcgcagtggtgcaaaataatcacgtcattttcaatcgtaatgtcagcgcccatacgtaacaattccggtatatgccgaactcgtttgggataaatggtgtcgataatcaagccttcaccatgcgcttttaacataagtggcgtaatcggttgttgtaaatccgttgcgaatcccggatacggcattgttttaatttggaccattttcaagtcgccggatggatagacgaaaatgctatcctcgcccacatccatcaccacacccatttcttccaacttagccaaaaatgcatctaagtgttcggaaatgatgttcttaactttaacgccttcgcctactgcagccgccatggctaggtaggtgcctgcttcaattcggtcgggaatgatcgtatgcgaattatgcgcctcgagcgttggcaccccatcaatgcgaataacgtccgtgccggcaccgcgaactttgccacccatattgttcaggtaggttgctaagtcgataatctccggctctttagcagcgttttcgatgaccgttcgtccctttgctgtcaccgccgccaaaatgacattgatggtggcgccaactgaaaccatatccagaaaaatacgggcaccatgtaagccttcagccggcgccttaattgccatcgccccgtgttcattgctcactgaagcacccaacgcttcaaatcccttaatatgctgatcaataggccgcggaccgatatcatcgccaccaggcagcccaacaattgctttgccaaagcgccctaataacgcgcccataaaataataggaggcgcgcagactcttaatcttaccgtttggcagcggcacatcattgatttcggttggatcaatcgtcagaacattttcggtaaaatccgatttaacattcatatcactcagaatcgccatcaaattatagacatcctgaatatgcggcactgaatcaagcgtcaccggggtgcgcgacaaaattgcagccggaatcaaagcaaccgtgctgttctttgcaccgccgatcacaacttcaccggataatttctttccgccgtggatcagcattttttccatttgaattaaatcctcacttaaggtcgttcatttcaagtaggctgaagctgacctgcattttatgcttcaaatatcaatcacgaacactggtaggcaagccatgacccattcgccatgcactcaatatacaagtttaatgaatcagcacgcaaaaaacaaggactaaaagttagtgagcgcgaaccggcgcgcttagggatcggagtgtaagcggcctcggacgtgatagcccgggtttgaccattgcgttcgaggtccttacactccgatccctgcgccggtgagcgcgttatgggcgtaagccagaacataagtggcctcagacgtgatggctggccgggctttggccattgcgcccaaggtccttatgtgcaggtttctgggctggcgagcgcgttatgggcgtaaaccagataagtggccttaagcgtgatggccgagctttggccattgcgcttaaggtccttacacgcagacttctgcgccggtgagcgcgttatggacgtaagccagaacataagtggccccagacgtgatggcccgggtttcgccattgcgtctgggggtccttatgtgtagatttctgcgactgtgagcgcattatgggcgtaaaccagaacataagccgcctcagacgtgatgacccgctcttggccattgcgctttaaggtccttacacgcagacttctgcgccgctgagcgcgttatggacgtcagccagaacataagcggcctcagacgtgatggccagggtttggccattgcgttcgaggtccttacacgcagatccctgcgccggtgagcgcgttatggacgtaaaccagaacataagataagccccctcggccccctcaaccgtgacgactcgcgcaatccttctcccaaatacaaaaacagcctcaaggacttaacctcaaggcagttttcaaacgcaaaaatactaatttttaaaatcgccagctgattggatgaaggctttgaacagtccttctggcttgtttggccgtgattggaactctggatggtactgtgaggcaacgaagaacttattcttcggatactcaatgatttccatcaaacggtcgtccgggctaacccctgaaaagaccaagcctttctcctccattggcttacggtacttggtgttgaactcataacgatgacgatgacgtttctcgatttcatgagcattgtcataagcctttgctgcgacggatcccggctttaagacacatggataaaggccaagccgcagtgttccgccaagattcttcacgccgacctgatcacgcattaaatcaatgaccggatccttgacatcaggatgtgtctcggttgttccagcatctttgagtcctaagacattacgtgcaaactcaatcgaagccatttgcatacccaagcagatgcccaagaatggaatatcattctcccgtgcataacgaatggccgcgatcttgccttctaatccgcgatcgccaaaaccaccgggaaccaaaatgccatcaaaaccttgtaacagactttctacattgtcatcattaacgtcttcagcctgaaacatttgcaagtcgatatcggaatcccagtagtaaccagcatgcttaagtgcttcggcaacagagatataggcatctttcaacgcaacatacttaccaaccaaggcaatcttagtttgatgcgtgagatgttgaaccttgtgctcaagcttagtccaatcagtcatatcggctggcggaacatcgaagccaaagtggtcaacaacaatctgatccatcttttgggcttgtaaggctaacggaattgaataaagggtcttggcatcgcgtgattcaatgacggcattttccggcacatcagtgaacaacgcaattttcttcttcatctcttctgtaatcggtttttcggttcgtacgactagcatgttgggctgaatcccgatactgcgcaattctttgacgctatgctgagtcggcttggttttcatttcatctgccgcgcgcaagtatggtaccaagcttgcgtggatatagaaaacattttccgagccaacatcacgtttcatttggcgaattgcttcaagaaatggcaaggattcaatgtccccgacagtaccgccgatttcggtgataatgacatcggaatcgctatgcttggcagcgcgcataactttttccttgatcatgttggtgatgtgggggatgacctgaaccgttgcgccgagatattcaccgcggcgttcgcgttgcaggacttcagaataaattttcccggttgtgacattgctgtacttgttcaggttaatatcaataaaccgctcataatggccaaggtcgaggtcagtctcagcaccatcatcggtgacaaacacttcaccatgctgataagggttcatggtgcctgggtcaacgttgatatatggatcaaatttttgaatcgtaatcttcaaaccgcgattctttaacaaacgacccagggatgcagcaacaatccctttacctaatgacgatacgaccccaccggtaacaaaaatatacttggtcatagccagtctcctttttaaattaatcgggaaaaacaaaaacaagctccctattcatacgaacagggagcttgaaccgtattggctttacacttctgtaaagcgcccaaaatgtatattaaccaattgtacgagatccgtcaagcattaatgaaaaaaagtaagtatcaaaaccatgaacgaaaaactcaaacctaactgaataaaaggatacgtcaggtcaacgatgctccatcagtgaattttatcagtctcctgaggcccatgtccatcatctcgcctgaagcttggtaaaaacacgctcactttttcactcaatttcctaaaatatatgagcctaacatttgtgaatagcaataagattgttacaataaggttgtggtcaattgaacgcatgtaaaaacaattttgtaaatgaggaagtggtaaatcaatggcagatgttgtcattttaggtgccggatatgcgggcattcgggccgttaaaactttgagtaagctcgcgccaaaaggaacgacgctcacagtggttgaccaaaacgccaatcatgaagagcgcacacagcttcatgaagtagcagcaggtaccgtgcctgcaacgaaaattacatttaatatccagcaggttcttcccaaagatgttcagtttatccagtcaaaggtcagcaaggttgacgtgtcgagcaagctagtgatactggaaaatcatgcgccgctgcgttacgactatctcattatcgcgctcggcttccgctctgaagactttgggctacctggcgccgcagaaaacgccttgccactggacaatgtgacctccgccgaaacgattgccaagacaattgaactgcgtgtcgccaattacaagcagtcacaagatcccaaagacttaacggttattgtcgcaggcgcagggttcaccggggttgaattattaggcgaattgacacatagtctgccggcattagccaaaaagtatgatacgccacctgtcaaaatcatctccatggaaatggcaacgcgtattttgccgatgttcgatgaaaagttagcaaattatgcaatggattatctaaagagccatggcgttacgatgatgaccggttccaagattaccaaaatcgaacccaatgccgttgtttatgctgacggcgatcaggaaaagaaggtcgaaggcaacacgatcatctggacagtcggtgtttcaggcagcgatgtgatcgccgattccggcttcaaccaacgccgcaatcgcgtagttgtttccaatcacctgaatctaaccgaccatcctgaagtcttcatcatcggggatgtatcggcagtgatgacagacgctggccgaccttatccaaccacggcgcaaatctcctcccaagaaggcgatcacgccggcaagaatgtcgccgcagcactaaacggtcaaccgttaacggactttgtttacaaatctaagggcactgtggcatcgcttggcagtcaagacggcatcgcccaaatcggcaagagccacaagtacaccggcttcattgccaaggtactcaagcgtgtgatcacagataagtcactgcttgaagacgccaatttgagcacgatgttgaaacaaggacgttggccgctttaaacgttcaggtaaaagcaacaagcacgtactaggtcaatgatgatcacaaaaaagcagcgaatatcgctgcttttttgatgcctaaaggtatggtattaagtcattccccctgatttgcatttctatcgttttggttaacggcttcctccatcttgcggacagcatggttatattcagtaatgagtagcctgatggtaatgtaatcaaccttagattcattatctgaaagcggtatttccatgacctgaatccgcaacggcagatttgattgttcaaaaaaatcggatagtgccgcaagaaactggagtgcatgcatgaggttgtcataagatgaaagattgttaatgaaataaatgacaaaggtttcaatttcttctttttctagaaggttatctactttagaagctttagcaaagttattgatggctctatcaaaatatgtcatagcgttcctccaactaatagcggctaattaaaaacaatcttagaaaccgaatcgttttccaccgtttgcatttttattagtttgattgacagccttctcaagcttttgaacggcatgatgatactcagatttgagcagctttgtgacgatgacgtcaaccttagattcattcccggaaagtggtatttgtgtaacctgaatttgcagcggcagacttagctgttcaaggaaaccggccattgctgaaagaaaatttagcgcgtgcataaggttgttgtaggatgaaaggcccctaaccttaaagaaaacaaagtcatcattctcttctttttctagaagatctgaaacctgacatgttttcgcaataaaattgacaatcttatcaaaatatgtcataaaaaatctccgcaatcatggtgactgaacgttaacgatcctagaaactggttccaacgtcagggataacactcaataagcatcccgctgaatgtacagcttgccccgacaagccggtatcgccaacattcttttattcgttttaacaatacccaaaacttcgcctatccaaagattaaataaataattgtttcaagatataccaattatattttttacgtcaacggttttgaaaattttctaatgctgctcatgaacgccttgaatctggtcgtctaggcgtcttattacgataatctttatttttactttgccgaaatgtcgtaaaccactgatcaagcattgccggatcgattttcaattcctgttgcgcagtacggctaaacttttcccaagcagccttgtttgccgcttggtcgccatgagcactgcgcaaatcgcgaatgtattcacctacaagccgccggaatcgcatctgctgatctcgattcatcttcaagtaattccgctgccctgttgtcgccatctgctgcataccggtgagttcgcgggcatcgctgtcgattgtaaaaaatgagcggattggaatggcaatgtacaaaatataagcagctttaggtaaaaataccgccagtaccataattgcggcaatcatcaagaaattttccaagttgtgggcgccgtaaatgctcgtgtagatttgttgcatttcagccttattactagcttgctgatgcacaattgttcgtgaaataatgcgaaaaacggtaatcactaaaagatacagtgcaccataaataaccaccgaaagcacttcaacgtcaccagacatcaagcgcgtcaatgccggtaccagcgaaagtaggaaaactaaaataaattcccagatgacaattcgccgcgggatctgtttgacctgactaaacaaagttgcttgctgataccaaatatttgctacaaaacagaaactaactgcataaatgccaaccgctagaaaaaacgcgctgatatgtgtatgattttgccaactctccgccggcaattccaaaaccatgatcgtaataataatagcaagaatagcatcgataaacgtatccagacgggttttaagatcctctgaaatcataaatagcctcctgagtgtgtgccagcgtacttagaatcgaagtgtaagcgagccatcagcttggatcattgtggctgaggccctcacacgcaaatttctgcgctgggaaacgcatcatgaaaagcgtgagtcattacactatgatggcagtatcagcttttcagaaaaaatgtcaagctcgtgaaaacaaaaaagccacaccttaaaaaagtgtgaccgttaagccattaatgtttatcgttgtcgtcttcatcgtcatcattatcgctgtcatcatcgtcatcgccggagaagtcagctgtgatgtcatcggtgtcgtcatcgtcatcgctgtcattgtcgccaaattcagctagctgaccttcaatgccatcgggaagtccatcatcaggatcatcatcgctgtcatcgtcactatcgccggccttgccgatcttatcatgaaagccagtgctgtcatcatcatcgaaatcatcgtcatcgctatcagcgtcgagatcttcatcttcaggatcatcgtcgttgtaatcgatcacgtcatcgtcatcggcaacatccgccaagaacgcattaactttcttacgtttcttgcgacgcggcacttcttcttcgtcttccggatggttaacttcttcatcaacggaatcgtatggataccaagcgcgcaggccccaaacgttatcgcctaaagaaatgaagctgccatccacattgagatccgtatagaattgcggcaaacgttcacgaatctcttcgtcactcttaccgagataattctggatctcattggccagatcaacgaacgccatggtatcccctttttcttcgaggatctcatgggctacttcgatcattgataattctgatttatcggcattggcaaatgctttgagtttcaaccgatacacgccctttccacagtctttacagtctgttttctatcatacccgctcaggccttaaattgcaatcgcaaccgataatttcctaaatgttggcgattggcaaaaagctcatactcaacataaatttcacccgcaaccggttccgtggtcattcgcacatcaatccgaggtgtcaccgtttcaaccggaataataccgtatggcgtccgatagcgggtcaaaacccgtttttcatccgcaaaaaacagtttcaactgggtatcgccattactgctgccacgcgaaagttgaatatcaccgtcttcgcgcagtttcatcgtgaccggcatgctcgttcctgcatcctcgtccacttcctgatagcgaatataaagtgcgttccccatctgtaccaacgttccaggttcatcaaaaacatgtgtctcctgatcatcaccttgcgtcacaaacgtttcaaggtgaatctgaatcggcactccttgtgaaagatccataatgtcaatcctttctatagagtattgtacgctcacaggtcaagagggtcgagtacagagcgtgagccagcccggttagaaaccggagcataagtggccttgggcgtgatggccgggctttggccattgcgcccaaggtccttatgcgcaggtttctgggctggcgaacgcgtttagaaagtgagcgcgagccggcacggttagggatcggagtgtaagtggcctaaggcgcagatccctgcgccggggagcgcgttataggcataaaagagaacacgcgcccaagaactctacacgccagacttccgcacccccaaacacctttatcccaatgaaaatggctttgtgcctgacgtgttcggtcaccttcgctataatataggtaatctattattatgaaagaaggcgcacaatggacctaacgtcgctggctggtcagcaagcagccatcttccagcaagacttcaccaaagatgaggcgccgctcagctttgcccacaccaatgcgttattagcccatcccgagctccatccaccgctgatgctgcatttctggacggctgaacaaaccgtcattctcggtatgcaagatttaaagttaccacaattggggcatgggctgccagtcctgagcagcgaacaatatggcgtctttgtccgcaattccggtgggctagcggtgattgccgacagcggcgttttgaatgtctcgctttttttacccaatgaaacgcgcctgaccatcgatactgcttatgagcttatgacgtcactatttcggacagcatttccagcgctgaaaattgccaccagtgaaatcacgcattcctattgtcccggcaaatacgatttgagtgtcggcggccaaaaattcgccggcatggcccagcgccggaatcaggccggggtggtcgtgatgctttattgcagcattttcggtgatcaaaatgctcgctgcgatttactacgtcgattttatcgggctggacatgccagcgccagtccccatttcacttttccgcttatccgttcagaaacgatgaccacccttagcgatttacttgatcggccactgacgcgtaatgaggcgattcttgccatattgaatgccttagcaacttacggcatcgcagccgacatgaactcgatgccggcaatattgcgcgatcctgcttaccatcaagcgctcgctgcagccaccgccgatttacgtacacgcaatcgcaacttaaaaaagatgggagaacatcatgcaatttgaaaaattaccacgggaaaaagtttttcgcgatccggttcataattatgttcacgtccaacaccgcgtgattcttgatttaatcaataccccggagtttcagcggttgcggcgaatcaaacaactaggggtctcggattatgtctttcaaggagctgagcatacgcgctttgcccactcacttggggtttatgaaattgcgcgggagatgtgcgacaactttgtcattaactatcccagtcaaacgcctggtgatggcctttggaatgacgctgaacgtccggttgtcctgtgtgctgcactgttgcatgatattggccacggcgcctactcacatacgtttgagcatattttcgggacagatcatgaggcaattacccgcgctattctcacggatccgcataccaatgtcaaccgtatcctgcgtggtgtgagtgcggaatttcccgagcaggtggcttcagtgatcaaccatacttatcccaatccgcaagtcgtccagatgatttccagtcaaattgacgccgaccgaatggattacttgctgcatgatgcctactataccggcaccaaatacgggctttttgatctttctcgaatcttgcgggtgatgcgaccttattctgatggtatcgcttatgaagccaacgggatgcatgcggtagaagattatgttgtcagccgctttcagatgtatcaacaagtctattttcaccccgtatcccgcggcatggaggtcattctcttccacctactaaaacgggctaagtttctgtatgagtccggacagtttgaacccgggttttcaccacgcttactggtgccttttttcgagcaatcctttagcttaaccgactacctcaagttagatgacggcgtgctcaacacctactttacgtactggttagattatcccgacagtatcttaagcgactttgcggatcgcttcttgaatcgccgcccactgaaatcagtgacatttaccgatcaaacggccgcgctgcttccaaaactacgcgcgttggtggctcaagccgggtttgatccgcaatattacaccgctgaaaatgatagtttcgacttgccatatgatcaatatgatcctgcctcagcgaacccgaaaacccaaatcgaaatcatgcaaaaagacggcactttagaggaactgtcaaccttatcaccattggttgctgcgctgagtggtcgggcaacaggcgataaacggttttattttccaaaagaaatgctcgcctctgaagatagcagcctcttttcacctatctatgaaaagttccaacgttatctgctcaacggtggtgtgattgatccacacttaacggattagcaaggtgggcttcactgtttgggttgctgggcgagccacttagccacggcccagcgatgtgttggccgtttcaattcggccaaggccagatcgatcggcatgagcatcaatgtattgaaggtttcaagtggatcctgtacaaaagccagttcatcacaggcaaaaaacgtcgccggatggtaataggcggtttgacgatgatgggaataaaaatactcagacgatttgccgagctttttggtcacatgcacggttgccccaaattcttccaacaactcccgtgccagcgtttcttcgggggtttcgcctttttcaacgccgcctcccggtaagaataatgcatggttcggcgcttgcaaaatcagcaaccgcgcgccgctatgatccggaatgacgccatacgcgccaattcgggtgtgataatctaactttggatcttttcgaccaaacacaggatcaatcatattgcatccctccgcttttaatcacattataccctaatcaatttctaacctctacacaaggagacttttcgatgtcagctcaggaaacgttatttgtctttaccatcccccttttgctgggaattatttttgctatcagcttcaccattgaaccgcggcgtttgcttaacggctggctgttcaacttattcgccgtggtatttttgatcgctttggcagccgcgattctaaaatccggtaacctactacttattgctgtaaccggaacgctttttgtgattacggtcttaattgtgttcttgctgtttgccttgcacttattttggctgctatggaatgctatccttgtgtggcggcgtgaaggccattcgttaagtaacatgttgacgctttatattgccatcggactgttgttgttggaaattgctgcttcgtttggccgccgttttattcccgaacctttatacgtcgccttggcagtcttctttggcttaggcgggttatatgtcttattaacgctttataacttcttgaccgcgttaatcctgtacaatctccggccacaaccgcataatcgaacttttctcatcgtgcttggcgccggactactgcatggcgatcaagtgtcaccgttacttgccagtcgcattgatacggccattaagttttatcacaagcaattaaaaaaaggccgccccgctccaaaaattattttttccgggggtaaaggcgcagatgaggctatttccgaagcactcgccatgcagcgttacgctttgggaaaagggattcccgaggccgataccttacttgaagatcagtcaactaccacccttgaaaatatgcggttttcaaaacggttgatcatccaagagattggagaagctccttataaagccagcttctttaccaacaactatcacttgcttcgagcgggcattttcgcgcggatggcgggtattgctgctaatggcgtcggcggtaatacatccttttattttctgcctaatgcggttattcgtgaatacctagccttggtggttttgtacaagcgccggcatgccgtggctttcggcgtgattgttctgatcgcgttagggcaattcatccgggcctggcaactgggttgagcgcttaacgtgcagagtaggtggcaatttcggtacactaactatacgagggggttatgttgatgttaaaagaattccgtcaattcatcatgcggggcaacgttttggacttagctgtcggggtgattatcggtagtgcctttaccggtctggttacctccttgactaagaacctgattaacccgattttatcaatctttgccggtaaaaccgatcttagcggtttatccgttacgttattaggcgccaaatttacatacggcaattttcttaacgatgtgattaactttttgattatcgcctttgttgttttcatgatcgttcgcagtgtcaatcgtttcttgcccgccaagccgaccaaagctgccgggcctacccaagcggaattgctcacggagattcgcgatttattaaaggagaagaacgaccattcgcaggtttaattgattaaaaaagtcaataaaaatcaaatggctcaaggaagacgcagcagcgttatccttgagccatttctgtttattcccatcatttatgaaccttcaataacctgctgcgaaaacaactcagaaaccgtccgcatagcattctttacggtcactgtcgcaagtggatcctgtgccatgcttgctgaagttgtctgaagccaagcgccagagtccatagtatgggtgccgtcaagactagcaatacctgaaacacaaatttgacaatcacaacgccaatagtgtcaataccgccgctttctaggattgttgccattaccggtgtcgtcgcgtaaataaagtcttgataaagattcatattcttttccatgtcagctacataatctttggttgaacggccagtagaagcaaatcgttgggcgctgtggtcaatttgatcaaggtagcgcggtgccaagaccagccagctgatcaataaataaccatcaccgattgtgggcgtgaaatcgaacccacttgttttcttaaggtgaaagaaaagcattaacaagccatacgctgcaatgagtctcagtcgtttgtgcataccagccaccccacacatcacctaatcaagctaccgggtcctatctgaatgctgatatcataagccgaacgatcacttttgtatagggttagcccaaatgaattgccaaaacgccatgttttttctcttgttgcggcgtataaatgcgataggtgtcagcgaccattttagccacggaatcggttggtgcacttcccacggcggtaccctgatattgctgataaagctgggaaaaggttccgaacttttcaagctgagtgactttcttggtaacttgttgctgagtggcgagatcctcgaacacaatttgatcaccaacctctagctgtgggcgcttttggtcattgaggcgaatttctattgttttagttcctgcttgcaccaacagaaactgatcatgcgcgagtcccatttccataccatttttctccttgtcatcacgttgctaagtccccgcgccacacctgagccatcaaaaaagcacaccttacagtgaaggtgcgcaaacttgatgttacttggtgaatcgattttcgaataatggagtcacggagcggttttcctgaatccgcatgattgcgcgtcccattaatgggccaacagaaacaacatctaacttatccatgtgtttatcagctggcaagttaatggagtccgttacgaccaccttttcgatggccgagtgggtcaaccgttcaactgccgggccggagaaaattgcgtgggtggctgcgaccaagacttcggttgcaccggcatctttcagcgcttgggctgcaagggtgatggtgcccgcggtgtcgatcatgtcgtcaataatgatacattgtttaccggtaacattgccgacgatgttcataacttcagcaacgtttggccgtggccgccgcttgtcgataattgcaatcggcgccttgagaaattctgctaatttacgcgcccgggtcacgccgccgtgatcaggcgaaaccacaaccgtatcagcgccgtcataatggttgcgtaagaagtagtcggctaacaatggtgcaccgacaagatggtcaaccggaatgtcgaagaagccctgaatctgggcagcatgtaaatcaagcgctaagacccgggttgcaccggcacgttcaagcatgttggcaaccagtttagcagtaatcggttcccgtgaccgcgctttgcgatcctgacgtgcatagccataatacggcatcacgacattaatcgtatgtgccgaggcccgccgtaaagcatcaatcataatcaatagttccatcagattgtcgttaaccggactggacgtggactgaatcagatacacatcatcgccacgaatactttcttcgatgttgatttgaatttcaccatcgctaaaccgcttcactgacgactttcccagttgcacaccaacctcggcagcaatcttctctgccagtggtttgttcgaattcaaggcaaaaatctttaatctcgggtcaccgtattgctcagacatatgttcctccacgaaatattataggctgcgaataattgttccacaaaaatcttagcggattgacgaaaaaaagcaagcatataaaacgaattataacctaattccaatctggatcgttcgcgagcggcagtcgtttccagtaatcttctttggtcgtttgacgcgcacgggcaatcgccattgcgtgaaacggtacatcttttgtaatcgtcgaacccgccgcaatgaaactatgatccgccacttcaactggggccacgatgttagagttagaaccgataaaggcatggtcgccaatcgtactattccatttttgaacgccatcatagttaacaaacacaacgccgcaacccacattaatatcgctgcccaaggttgcattaccgacatacgtcaagtgaccgactttggtgcgtgcaccgatcttggcttttttaatctctacaaagttaccaagatgaccgtattcgccaatgtctgcatctggccgcaaatgtgagttggggccgatatcactgtgtgcgtgcatcaccgcgtgttcgatggtggaacttgtcacggtaacatcatcttccagcgtggcatccagtagttctgaatgggtaccaatgtggcaatcttcaccaatcatggttttacctttcaaatagacgcctggttcaatcacggtgtcggcaccgattttcacatccgtatcaatgtaagtcgttgccggatcaatcagcgtgacgccattacgcatatgctgctcgttaatgcgctgctgcatgagccgggtcgcttgtgccaatgcaacccgatcgttaacgcccagagattcggtgtaatccggcatttgataagcagcaaccttttcacccgctgcccgtaaaatgcctaagacatccggcaaataatactcgccttgtgcattgttgttcttaacctggtgcagcgctttgaataacgcctgattatcaaaaacataaaccccggtgttgatctcggaaatcaatgcttcttccggagtagcgtctttttgttccacatttttaatgacattaccgtcagtatcgcgaataatccgaccatagccagtaggatccggggcattggcagtcaaaatggttgcattggcgcctttagcttcatgataagcaaacagatcattgagagtcttagccgtaaacaaaggcgtatccccgctcataatcagcgtggagccttccttttgccccaacaatggctctgcttgtaataccgcgtgaccggtgcccaactgttccgcctgcaacacgaattcagtccgctttccaagtgtcttttcaacttcttcggcaccatggccaacaatggtcacgatagcgtcaggatgaatggcttccacctggctcaccacatgctcgaccatgctcttaccacagaccggttgcaaaaccttataatacttcgatttcatccgcgtccccttaccggccgcgagaatgatggtgaatttctttgacatatgaatactccattcctaattatcttatttcataatagcccagccagccgatactgacaacaactgagcgcgaaccggcgcggttagaagtcggagtgtaagcggcctaaaacgtgatggcccgctcttggccattgcgttttaggtccttacacgcagacttctgcgccggggagcgcgttatgggcgtaaaggtggatgtacgtcctaaaacgtgatggcccgagctttgaccatcgcgccagatccttacacacaaaaccctaccctctcctaaaacccaaccaaaacaaaaaacaggcccgtcgacatcccaagcctgttttccaaatactattcattcaacctgtcatgcttttcatccacatccgatttcgcatcgtcaacctgctgcttaacctccgctggcacttcaaacgtactaacttgagtcgtatcagcccacgcatcatagaagaagcgaaaatgccgtgagcccacttcccaaacaaaattaatcatgaacagaaagaccaaaactgcaaagaatcctaacgcagccagattaatctgagttcgttgaaacttagcaaaatacgcaataaagaaattgttcaaccctaccaagctggaaaacgccaagccatatagcagtccttcgcgcaataaaagccgccaaaatccgacagcttgaccatcagtacgcacaattttaatgcgcaccaatccttttccaagtgtctggccgttgttaaaggcaggccaaatgacgaagacaaaaaatagcggcaaaacatcttcactcaaaaagtccggcaattgatccaaccctaacaaatgaaataggaatttgatcataagtccgataacttggctgaataagacaaaatcgactaaaaaagcggctaatcgtcgggcaaaagtcacccgcgcaccacgagcctggcttttggcgtcaatggtatcgcgggatggcaacgcccgcatcagaatcggcgccagcaccccgccaaccaaaccacctgtcgtgttaagaatcaaatcgtccacatcaaatagtcgataaggccgcggataaaagccatataatccggacagctgtgtcagctcgaagaataaactcaacccaaaactcatcacaatgatctgcggtacgctgcgtttaaagtagtaccgcaaataaaagccaaatgggatcgttaaaacgatattaaagaaaggttgaatgaaactggactgcttgagcgcggccagccaggtgtgaggattgctcggcacaaagacggtcgtatgaatgaaataccgcagtgccattagcggcgtcagattatacttcgccccagtaaactgtgcgacagcctcacgagccggcaatggcagaatgatcagaaaataagccgacagcaggtaaaatacaaacgaataaatgacaatcgcccgccaccagctaaacgcaccgtaacgccgataaacaaccaccagaaacggtagcgcaagcagcagcgctaaaaacggaaatgtgactactgctgttctaaccggtccaaggtaagcactcattgatgactcacctcaagcaactgccgattctggctaagaaaattaccggctgtggcatgcagcgtatttgcctttgtatccactttgtcaacgcgaataagcgaagtgtaatcgttcaccatgcgatcgccgtcaaacttgccctcagcaaaaaccgtaattccgaccatttttgcgttaaactcatcgatcaacgccttcatgccgttaacggtgccgccgcctttcatgaaatcatcgacaatcaagacccgcgaattagccggcagactgcgcttactcaactccattttttcaatccgagccgaggatccggaaacgtaattaaccgaaaccgtcgaaccttccgtgatcttggagtcgcggcgcacaataacaaacggcacattcagatattggctaacactttgcgcaatcggaatgcctttagtggctaccgtcatgaccgcatccacattggcttcgcgatactgggtcgcaatcagccgcccgatttgacgtaaaacactcggtgtaccaagtaagtccgagagatacacataaccgcctggcaacagtcgatcagtctcggaaagtcgcttggccatggccgcaatgaaattttccgcctcatcttcacccatgattgggatataacgaaccccaccagcggcaccgggcacagtttcaaggatgccggtttgtcgctgggcaaaagtccggcgtacgatagccaaatcctcactaatagatgacttggcactttcatagcgttttgagaaaaaagtcaacggtatcagtgtgtgaggccgttccaacaagtaccttgtcatgtcgattaatcgatcgctgcgtctaactttcattattccgctcctaactccgaatatttagctctgtattaacattgtgggataatcttatccagtataaatgcttttaacgaaaatttcgacccttttacgacaaattctcaccgaacgttcgcatttgtccctagttcactcagataatttttaagtcgtctcagtagccttgtatttatttctatattagaatggttacaaagaggggtggagaaatcatcatgaactgttttgaattacatcatatgacctttgcaccaacgcaaacagctattttaaacgacatcaatctggatattccttgggggattgatctgaccattgcgggccattcgggttctggtaaaagcaccttgttgcgattgttggcgactttattgacgccaactaacggaaccattctatacaacggtaaagcccaagccgactacgatccgatcgcttatcggcgtgaagtttcttactgcgcccagcaaccggcattatttggcgccacggttgctgacgatctgcggtttccatttatgattcgcaacactgaaatgccacgcgaacaagccgaagccgcgcttgaaagtgtcgatttggctaaaagtatgctcgatgcgccaacgcaaaacttatccggtggtgaacgccaacgagtcgctttgttgcggcatcttttcttcccgcctaaagtgctgcttttagacgaggtcacaaccggactcgacccggatactaaaacgattattcatgaacttctgaatcgccaaaatgaaaaaggcatcacgttgattcgtgtgacgcatgatgaaggtgaactgcagaccgccaagaatctcatgacgctggttgccggtcaatttgaggaggttgccaaggtatgaatagtcagttaatcgtttcgccgttagcacttttgttggctttagcgctagttgtgattgcattggtcattaacctcaaagaagatctgggcatgaccaaggatctgatcgtaggggttctacgcgcggtcatccagctaacggttgtcgggtttgttttgacctatattattaaagcggatgccgtttggctgactttagccatggtagccatcatcattttcaacgctgcctggaatgccaaaaaacgtgccggcaccattcctgctgcgtttgtcaccagcctgttagccgtcaccactgcaactgggttaacgctgctcatgttagtgtcggtaaaggccattcggtttattccggcacagattgttccgatcagtgggatgattgccagcaacgtcatggtcgcgatcggtttagcctaccgcagcctcaacaccgaatttaaagacttacgaccacaagtacttgaacgtcttgcattgggcgccaacctcaaacaagccagtcagacgctcatcgtcaatgctatcaaaactggcatggcgccaacgattgattcggctaaaactgttgggctcgttagtttaccgggaatgatgtccggcttgatttttgccggtatcgatcctaccaaagccattatgtatcagatcatggtaaccttcatgctgctaggcgccaccagccttggtagttttatcgcggtctatcgcagttacccccgcttttataatgatcaaaagcaattacgttagcggccttgtcctccgaaaataaaaagttgctgcagaagcgaatctttttgcctctgcagcaactttttatattgatgcgcttttaccagctatcagtaaggattctccattttgttatccggtaaatacggcccatattcaacttgaatcgtggtgtgggcaatgtcaaagctttctcgcaacgataaactcagtgcgtccaagaaggcgtcattgccttcagcagttgttcgcaccacatgtaccgtcaacgcgacatcagttgtactcagcgcccagatgtgcaggtcatggcaagatgcaacggttggataggcgttaaccaatgttttaaccgccactggatcgatttccttaggcaccgcggccattgctaaattaacggcatcccgcaataaatcccaagtcccgatcaaaaccacaattgcaactaaaatggacatgaccggatcaagccattcccagccagtcagcaggattaatcccccggctaaaacaactcccagcgacacgccagcatcggcagccatgtgcataaacgcaccacgaatgttcaaatcatgttgcgagccgctatgaaaaagaattgcagttgcgccattgaccaaaatcccggcaccagcgacgaccatcatccagccgccttcaaccggggcattttgtgacaatcgggtaatcgcctcgacaataatcgcacccatcgccaccagtaaaaatgccgcatttgctaacgccgctaaaatcgacgaactcttatacccgtatgtacgctggacagtcgggtgccgattggaaagccactccgcaaaccacgctaagcccaagcctaggacgtcgctcatattatgaatggcatcggcgaccaacgcaaccgagccaatcccgattccaaacgcaacctcggcaataatgtaaatcaaattaagcagaataccccagaaaaaggctttgtttggctgaacttgttccatcttatcatcagctcctcagtttccttttccatcatggtttagtgctacctaaaaatcaaccccttagccgatgactattcgttgacaggcaaaatggccgcaacagataaacctcacgacaaaatcccttcatgctgttgtaaacccgcatcgcccgagaatgcttctgacaaagaccaaacacagttggaccgctacctgacatttgagcgatttctgcgccgtacttttttaaccgctgtttcaatgcggtcatttcaggataacgacttgccgtaatggcctctaaactattccccattccgctaatcatttggttgaaatcatggttttgaaccccggcaacgacttcaggtgtattggggtgcaaaaggccggcctgatagtcaattgcattaagaatacttggcgttgacactgacacccgcggcttagccaaaacaacccaaaagttcggtaaacttcccaatggggtgaccacatcaccgcgtccggtaaccaaggccgtctccgagtaaacgcagtaaggcacatcgctatcaacctgtaagccgatgcgagccagctgcgagcgactataacctaactgccatagtgaattcaagccacgcaaaacggcggctgcgtcactcgaaccaccgcccaaacctgcagcgacgggaatgtgtttttcaatatgaatccgcgcaccttggcggatattggcatggcgttggagcgccaatgccgctttataggccagatttcgcggatcttcaggtaaaaaaccgctatctgtggaaacctgaatgctatggctaggcttgatgctcacgtaatcagccaaatcaactgatgtcatcaccatctgccactcatgttcgccgtcagcatgacgatacaaagcatccaaacttagattaatcttggccggtgctttctcgatcagttccatctaaccaccagtctctggcgatgcatgtatttgcaggtagatcagcacactgcaaacgccgatgcatgcatcaaccgtatcgttattattttcagtatactgttttgcgtccggattttcattgccgcgtgtcaaaaattcgtcaccttgtacagatcagtctttcaagaagatagcaaaaggcctcgatgccaatgacatcgaggcctgctcaaagtaaacgatttaatcgtcggttagtatctgaaattatgacgctttttcttcgccttcgaaggtgatcttgattgacttagtcagaagatccgcgtaactataagagacacgctcgaacgcattttcattctggtcgagatcgaccacaaaaatagccggataagtttccttcaaggtcccccgacgccgagtaaccttcttgcgtcctgcttgtgcaacgaccgttaaattctcaccgattttcccatcgagcttccgtttgatgcttgctagtgtgattggcatgcacttcacctcttgcaatatatcataacatgaatgcaagaaatttgcaattataccatgtgtttcttatttcggcaagatttttataggaagtaagcgcgagccggcgcggttagggatcggagtgtaagtggcctcaggcgtgatggcccgggcttggccattgcgcctgaggtccttacacgcagatccctgcgctggggagcgcgttatgggcctaaaggagaacgggtggccttgggcgtgatggccgggttttggccattgcgcccaaggcccttatgtgcaggcttctgcgccggggagcgcgttatgggcataaaggagaatacgtggcctcaggcgtgatggcccgctcttggccattgcgcctgaggtccttacacgcagatccctgcgccggggagcgcgttatggacgtaaaggagaacgcgtggccttgggcgtgatgacccgggcttggtcattgcgcccaaggtccttacacgcagactcctgcgccggggagcgcgttatggacataaaggagaacggatgacctcaaacgtgacaacccgctatcccgcaatacccaagccttcaccccgcaacgcctcatccaaccgtgcaaaatccgtaatcgccaactgttctgcccgcgtctccggtgcaatctccgccaccgagagcgccgtacgaatagcggccttattcggtttaccaaacaaagccaccagattattccaaagcgttttacgccgagacgcaaacgccccacggacaagccggtcaaaactgtctggattttttaccgctgccaagggttctgggcgctgggtcaacgtaacaatggccgaatccacatttggtgccggaacaaacgcatgccggctgacggtaaaagctgtcgccacatctgccaccagttgcacggcaatacttaaactgccataatccttcgatccaggggtcgcacttaatcgcgctgccacttctttttgcatcatcacggtcatgctgtgcagtggtaaatgtgcccgcaacaagtgcagtaaaatcggcgtcgtaatgtaataaggcaaattagcaacaacttttagcgtgtggttcccatcaaaatgtgtcgctaccagctcggtcaaattcgtttttaaaacatcttcgttgaccacggttgtattaggataatctgcaagcgtctccgcgagaatcggcagcagacgatcgtcaatttccaatgccaccacctgatgcgcctgatcagccagaaactgcgtcagtgcaccaattccgggaccgatttcaatcacatcatcttgctcggagacatcagctgctgctacaattttttgcaaaatctgcgggtcggtcaaaaagttctgccctaaccccttacgcatatgaaagccatgccgcttcaaaatggcattggttacggctggttgtgccactttttcatgcatggttattcgctccttcgttcaactgggcaactgcggctagaaaatctgcgcgactgatttgaaattcagtcagccgccgtaaaagctgtttgccatttgtataaccgatgtgcagctgttcgcctagctgttcccgacgctcgcgagcaccggttccaccgatcaaatgcgctgccaataaatcctgctgactgatcacttgcggagcatcgggcacttcagtaaacaagtgctggagtgcagcccgcaacgccgctggagaagcatgctcaaccccaagcgaccctttatgatccggcacgccttccgcccgcggtaaaaatgcatgggtaacacctggtacggcacgcgaaatggttttgcgaatcttttcaccaggaaagtcaggatcagttaagacgatcacgccccgttttgcttgggcttgccgaatccgcgccaatgttgcttcatcaatggcactaccgcgagtttcgatggtatcgatcctgccaaaagtttcttttaatcgcttagtatcatcgcggccttctacaaccacaatttgtttaatcgttgtcatgcgtcttcctttaacttgaaaattcggtgggcattatcccatgtctgtttagcaatcgtttctggggtggtttcgcgtagtttggctaaagcctccaccacatagcgcgtatagcccggctgattctggcggccacggtaaggcgttggcgttaaatatggggcatcggtttcaaccaacaagcggtcactggggattatcttggcgctggcatgttcttccggagcatttttgaaactgacgatgccggaataggaaatatacatccctaagtccaaaaaccgccgtgcccagtctgcttcaccggtgaaactgtgcataatcgcgccaaattcctcaacatgcgccgtttttagaagcgtataggtatcttcaaaagcatcgcggctgtggatggacaccggtatatgcagcgagcgcgccagttccagttggcgccggaatacccgccgttgaatttcacgcggcgaagtattccagtgatagtccaacccgatttcgcctaacgccaccactttaggatcagctaattgttccagcaatacggcttctttagcggcatcatagtccttgcttgattccggatgccaaccgacaattgcatataagttggcatattgatgggctaattgcagcgcgccggcgttcaacgtcgtatccgagccgacaatcgccattttcttcacgcctagctgccgcgccgcttcaatatagcttgcttccttgccatgataaggcgtgtcattcaagtgggtatgggaatcaaaaatgtccatcaacgcttactccttttccgttgctgccagtaattgtggcaacaactgctcaacttgggtcggttttctggccgcaaaaagccgttgtagtttggcaaccggcgactgggtcaaagttcgaattaactgtgccattcgtaacggttgttgtttaagctcgggattgaacaacataaaggcccagctaaccggtaaaatccgactcacatcggccaagtctttgaaggcaaccgggatttcaaaatgtaccaccactaagcagcccgtctgcaccaatgagccttctaaatgtggtatcgcaatattaggcaaaccactggcaatctgattcaattgcataccggaaggaaatgtctgctcccgggcaatcagtgccgcttttccctctgtctgcatcacattgcgggcaaccagtttgcgactaatctcatcaaaaaaactttcttgggttggcgtctctaaaaagtaaactaatggggttgtactaaactcagccaagcatttcacctatctttacataaactcaatatggttagagtatagcacgccaagccaagcagctcgcaggtggttttgggactaaagcttctattattgactgactttctttgagtttcatgaaaatgatcggcgaaaaatgtctattattgtcattttgttctatactaatcgtgtactgaacatttaaggattacctaggaggtatttttacatgtctgttaaacttactgctggtcagttagagcatttgaagcaattgtccaatgacaacaacgtcatctcggctttagccattgaccaacgcggttccctgaagaagatgcttgcagctgcagctaacaagccagctgacgaaaccacgattgttgatttcaagaaagctgtttctgaagaattaaccaaatacgccagcgcgattctgcttgatccagaatatggcctgccagctgccaaggttcgcgatcctaagtccggcctcttgctttcctatgaaaagaccggctacgatgcgactgaacctggccgtttcccagatttgattgataaccaaagtgctttgcgcatcaagaacgaaggcggcgatgcagtcaagttcttgctgtacattgaccctgacgaacctgatagtatcaacgatcgtaaatatgcgtttgttgaacgggttggtgctgaagctaaggctaatgatttgccactgttcttggaattagtttcctacgatggcaagaccaacgaaaccggcaccgctgcatgggcaaaagcaaagcctgaaaaagttatcaagatcactaaggaattcagcaagccgcaatacaacgtttctgttttgaagcttgaagttccggttgatcaaaagtttgttgaaggctacaccgatgaaggcgtaacaccggtttacagcaaggaagaagctgctaagtactataaggctcaatccgatgcaaccgatttgccattcatcttcctgtccgctggtgtttccaacgaactgttccttgaagaactcaaattcgctaaggaagccggttcaacctttaacggtgtgctttgcggccgggcaacctggaagccaggcgttaagccatttgctgctgaaggcgaagctgccggcaagaagtggctgcaaacggaaggtaaagctaacattgatcgtttgaacaaggttttggctgatactgctactccttggacagacaaggttgaaggctaattctttttaactaattaatcgtttaaaaaccagccacagatgcggctggttttttatatggtgagcgtgagccagcccgtttagaaaccggagtgtaagtggccttagccgtgatggtcgggctttgaccattgcaaccaaggtccttacacgcaggtttctgcgccggtgaacgcgttatggcgagtaagggccaacgcaaagataaatcaccgacaaccattgcagcagactggcacagtggtagactgatagatgaatgcgttttcttattttaggaggttgttaagcttgatcacaattgagaatcaacaatttaaagccagcattgccgaacgcggtgctgaactgcagtcactcgtcaacaaaaccgataactatgattatatctggaacggcgacaagactttttggaatcgccacgcaccgattctgttcccggccattggtaaatctaacgaagaccaatatcggctaggtgccaaaacatttccgatgggccaacatggttttgctcgtgactatgattttgaggtcagcgatcatagcgactcagcggcgacgttcacccagcaccaaaattcagaaaccttgaaaaagttcccgtttaaatatactttagccgttacttatatgctaaccgaagatggtctgagcattcattacaccgtgacaaatgatgacagcaattcgatgccgtttgcgttagggttccacccagccttcaacgttgcactgaaggcggatggcagctttgacgactacgatctgacggttgaaccgttgaatagcccgttgcagcgctttggtatcgggccggtaccgtttcgcaatggtgacgttgaagatattgcaggcgcagaaggcaataaattgccactcacacatgatctgttagacggtgggttagtgattcttgctaacagtgaaatcagcaaagcaaccttatcctccccgcatcacaagcacagtctcacgcttgatatcaatgacttcccttatctcactatctggagtcctgaacataaaaaggctccgtttattgcggttgaaccgtttgacgggttacctgaccaagccggcgaaccatccgattggtacaccaagcttggcaacaccacactctctgcaggtgccaataaacagcttgccttgaaagttgaattgcactaaacaatcttttgatgccgcctgaagtttatgcagacggcttttttgtgcacactttttgtacaaacaccatcactaagcggctgcaaaatagttgcggtacaatagcaccaaagcggtgaaaggaatgaagggttcatgcacattgcagtcattgatgatcaagcagcgactagagaagcaacggtcaagctcattcggcagttagcgcaaccgtcacagccattgcaggtggcggcttattcaaatgccgagcagttcttgtttgcagaaaaaccagccgatctgctgttgcttgatattaagttgggatctggcatggacggcatggcgcttgccaaaaaaatccgccaacatgatcccgaaaccgccatcgcttttgtcagtaactatgatgaattcgtgttcgatggttacgacgtgaacgcgattgactacatcctcaagccgcttacggtagcaaaactcaagcacctaattgaaaaggtagctggccagacgcagccaaaactcttggcattgcaaaccgctgccggtctagtacgcgtgccaatgtatgacatcagcgccatcgaagtcacggatcaccggcttcaagtccatacgcaaaaaaatcactatctggtaaacggacagttaaaagactttttaccgcgcttagatgacaactttattcagatttaccgctccatcgtcattaacctgaatttcctctcgcagctggataaacgaaccgttgtgatggcagatggcaccacttatcccgtttcccgccagcaggcaccgctagttaaacaggcattcttcaagcattttcgggggttgacccatgacagcaattagttggttctggctggtcgcctttgggttgctagtagtaggttgcatgtcgcagttatggtggatttttcggcgccagcaaaactggccggtgcgctggttaaacctcatcattgtcatcgtatcgttgagcagttggtggttatggccgcttccggttgtccgcggcttgctttttaccatcactgtgttagcaggcagtttggagttcatcttgattcgccaatttctcaacgaccaggatgcggtgtttgcccgcagtcttgataaaatgatggctcaatattcagaagaagtacaagaactttatgcgaatatgcgcggctggcggcatgattatcacgaccacctccaagctttaaaagcctacttagacaatcaagatactgctgccgcgcgccaatatctaaatgaactggaagacaagcttgatgcggttgatccactcgtgcattccggtaacgccatgcttgacgccatcgtaaatgctaaattgacgttggccgaacgactgcacattccggtaaacgaaaaagtcattgtcggcaacaccccactgatcaaggatgttgaccttgttgtgatcttaggaaacttactcgataacgccattgaagcaatcagtgaacagccaccccacgaaaaacgtcagctacggctttacatcggcatcgttaaacagcaattttacatctcggtcaccaacacccggccggccgatcaagtcattgactatcaatatgcctcaaccaaaagcgataaacgaggattgggcattcgccgggtcaataaattagtggcaaaatatgacggcatgatcaatcgtcagtatgaagcttcggtttttgtgaccgaaattgccattcccattcacgcagccaaaccgaccactcacgcataatttgcgtcagcgagtcggttttttggtaggttaaagtcaacgaggtgaatgcgatgaaaaaatatagcctatggaataaccttcgctggtactttgccaatttacgcaaatccaaacctgctttggcatggacggcaagtggcttggctcttgacaaggcagctgcggctttgctgggcgtttttacacctgcactgttggtcggtgccattaccaatcatgctaccttaggcgaattcgcccggctggcagtgttaaccggactaggattggcactgaccagtgaaatagcgtatctgattatgacccatgacggtgttgcaagttctgcagttcgaagtgacattggaatggacttccaccaaaagcagtgggatcttgattacgatcaaattagtagcggcacactccaagaactagcccacactgcttttaaaaaaggattgagttacacgttagcgggagccgaagccatctacatttacggtcgtggcactttggttgacctgactaccttgatcgtctttctagcgacactgtcgtttgcggttccgtgggttttcgcactggttttaatcagtgcggcaattagttacgccggtatgagctggtatcggcaatggtatcaacaaaataacgtcaggtggaacaagttgggacgccaacaagattacattacccgcaatgcctatgctttggaaaatggaaaagatatccgcatgttcggcatggccgactggtaccatcaccatctcgatcgcctgttgacgttgcaagatacctggcaacgccgcaactcgctccgacgcttcttaggcgaacaggcggggcaactggccggcttggtgcgggacgcaattgtttatggcaccttaattgcggcgattcttcgcgggcgtctttccatcgcccaattcaccttgatgtttggcatgaccaatagtttcatcaccttgctggatcaattactcactgattttaacggcttgcaaaatgccagcatcgacttacaagaggtacgcgaatttatggcactacaaccgcaaacgccggcacggacactgacaaaagcggagcaagctcaattagccaagcgtcctgtcaccatcacgttttcgcatgtgacttaccgctatccggaagcaaaaagtgccagtcttaacgatgtcagcttcacactcacagccggtcaaaagttggccattgtcgggatcaacggagccggcaagtcaacgttggcccggctgatgatgggactgctgcatcccactgaaggcaccattaccattaacggtttggatgcgaagctaataccgctagcagctcggtttgctttgttcgcaccggtttttcaggaaaccattgtgctggctcagagtttagccgataacgtagcaatgaccaaccactcagacgcaacccgcgtcatgagcgcattgaaagccgcaaacttagacgcactcgtagcaaccttaccgcaaaaagccgccacccccatgacgcgatacaccagcgatgatggcgttgaattatccggtggtcaggcgcagaagttgatgctggctcgggcattatataaagacgcaccagtgctcattttagatgagccacctgccgccttggatgccattgccgaaaatgaaatctatcaggattacgcccaactagcggccggtaaaacctccctgttcatctcgcatcgactggcttcaacccgcttttgcgatcgcattttattcatggaccacggacaggtacttgagtccggcactcatgaacagttgatggctaaggccggccactatgcccacatgtatcagattcaaagcaagtattaccaaccagctgcaaaggaggtaacggctaatggcaacttctaatcattctgaaccaaaaccttcaaagcaaaccgcaaaccgggcactgcgagtggttcgcatcatccaccagctcgataaattagccatcccgattgaatttctccgcgctttgacaactgtcggtatcccctatttaaacatcgccttcttaggggtggtcttgaatcaattgcagcaacatgcaacttttcggcaagtcattctcctcattggtggctttttgcttgccagatatctgttgcaacttgccagtaattggtttgccaaactggctgaagaccatgagaccggcgtaaatcgacgacttgatcgcgccaccactgaaaagctgctcaccgtgagctatacaacgcttcaagatccgaatatgcgtaatcaatacgccggtgccgtagaaggtaaggcttttagtggcgggatcacatcacttatgaaagatggccttcaagacttcttctcgctagtgattgccatcggttttgcggtcgccactttaatcaacctcacgcaggcaaccaatcatgcagctacttggttcaatgatgcccgttatccgcttttgatcatcgcgttacttcttttcccaatcatcgtggggagttggagcgttcatcacagtaatcagatccagcaacaactcatcagaaaaattctgccaagtaaccgccaattcacctatttttcaaacttcacgcaaaatatggacaatcatcaagtcattaggctttatcaggcatccgcgcttgtcatgaagaatgaacgtgacagcaatcaccgctttatgaatcagcttcagagtggctactggaaaattgctaagttcggtcattggcccaatgttgctattgccttatccgtcatcggtttgtacatccttgtcggagccaaagccttaatgggggttctcgccattggcagcgtcatgattgccgttgggtattttcagcaactcatgacagtcgcttatcaatttctccagcaagttgccatgtatgtcaacatgattgactatttgcaattctacgttgattttctcaacttgccggaccatgatcagtctggcacactgccagttgaaaaacgcaacgacaacgaattcgctatccagtttcatgatgtcagcttcaaatatccaggcagcgatcaatgggccttgcgccacgtgaatctgacactgaacatcggcgaacggcttgccttagtcggtcgcaatggcagtgggaaaacaacgctgatcaaactactcgtgcggctatttaaacccactgaaggcatcatcaccttaaacgatatcgacattcaaaaatacgatgaaaacgaatatcgcagtcttttgggtgtggtttttcaggatttccggctttttgcctatagcattgccgaaaatgttgccgctactgctcaccccgatcgtgaacgggtctggaaagccctgaaagtagccgatgtagccgaccgggttaagcgtatgcctaaaaccatcgatacgccgattacgacggcgctgagtgatgacggcgtgaccgtttccggcggtgaagcccagaagattgccattgcacgggcgtggtacaaggacgccccgatcatgattcttgacgagccaaccgcagcactcgatcccatctcggaatatgaaatttaccagcgctttgatgagctcatcgagggtaaaactgccatctacgtctcccaccgaatgagctcaacccgtttttcgcaacgaattgttgtactcgatcacggcaagattgttcaggacggtactcacaacagcctcatggcagaacccggtatttatcgcgatttattcaatgcgcaggcgcaatactacaccgaagatcgcatcaaagcggctcgtaaaaaagtggcaacgacaacaactgcagtggcggattagacaacttattctgacgtctcccagaaggcacactatgaagaatcttggcatggtgtgccttttattatttttaaaattctaatgtaaagtttgcttgacattttagtcaaaagagattatattacatgatgtaaagtaagctttacaaagcgaggtgtagcttttggaaaatcggatcgaaacattgcgcaatcaacatcacttaacgcaacaagacttagccgatcgcttagaagtttcgcgccaaaccgttagttctctcgaaaacggcagatataacccctcactcggactcgcatttaagctttcacatgtatttaacctacccatcgaacgcatttttatcgatgaaagtgcggattcgaagttgctataacccatcctgaatgatcaatcactgtttgttttaccaaggaggtaaccgtcatgaaaagaattttgcacgttatgcctttaacgagttggttagcgtggtttggcgcttttggctttgccatgttataccggtatagcaaagccattgttccagaaagtatcgaaaaggttcttttggtaacagttgcggtccttgtcagctatgctatttttgcaactcagcagcgaaccgaaactcagcgaatccaaaagctgcaacatggatcgctttctgataagaggcttgctaatgagatgaacgatgagcgcaatcaaatgattatcggcaaagcagccgttctctctattaagtggattgtccttttgaacatcgccgccttgtttgtcatggcagcattggacgtatcaagcgttgccatagttcttcttgcactaagcactattatgatcccaattctcaatatcatccttcaggtacacttgaatcgaacaatgtaaccataaacgcataaaaagggcacttcattttgaagtgcccttttattatagcgttcaattaaccaaccaaactgccattttccaggttttctgagacttccagcaatgtgatcttcttgccgtccaaactttcggctgataacagcatcccctcggacatttcgcctttaagtttgcgtggcttgaggttgaccacagccatgacctttttgcctttcagcttttggtaatccggataaaattcacgaataccggacagaatctggcgcgtaccttcatcaccagcgtcaagggtaaacttcaacagcttgtcagcgcccttaaccggttcaacgtttaagatttctgccactcggatttcgctcttatcgaattgcttgaagtcgatttccggcttgcgggtcttttcatcgacagctgctttagccgtgccaggcgtcatcttgctcttgatatacgctacttcttcttcagcatcaagccgcgggaagatcggtgtgccttgttcgacgactttggccccagcaggcaaggctccccacttcacgactttgtgatcttcgttttcgtgatctaagccaagttgaccgaagatttgaaccggtgcatgggtcatcactggctgaatgagtaaagcgatcaggcgcaaactttcagccaagtgtgccatgaccgaatcaagctggtctttcttggctgggtctttggcgagtttccatggttcggtttcatcaatatacttattggcgcgggaaacgatcttccagacctgatccaacgcgtctgagaaccgtaattcatccataagcttgtgatattgcgccaacgctgcctgcgcaacatcgccaaggtcctgatcaaatggggtaacatccggcttgaaggcaggtaaaattccgccttcatacttgttaatcatggcaattgtccgattcaacaagttgcccagatcgttcgccaaatcataattaatccgatcaatgaagtcttcaggtgtgaaaatgccatcgttaccaaatggaatcgcgcgcatcaggtagtaacgcagcgcatccagtccgtaacgttccacaatcatgtccggataaatggcattgccttttgacttgctcattttgccgtctttcatgaccagccagccatgtgcgtaaatctttttcggtaatggcaaatccaaggccatcaaaataatcggccagtaaatgatgtggaagcgaacaatttccttcccgattaactgaacattagccggccagtatttatcaaataaggcgtgatcgttgctgccatagcccagcgcggtaatatagttcaacagcgcatcgacccagacgtaaaccacgtgtttaggatcagacgggatctgaacgccccaattaaaactggtgcggctcattgccagatcttctagaccaggcttgatgaaattgttaatcatttccgtcttacgcgatgccggctgcacaaaatcaggatgctcatcataatacttcagcaaacgatccgtgtacttgctcatcttaaagaagtagcttggttcatgaaccagttgaacttcgtggccagatggagccttgccgccaatgactttgccatctttatcacgataaacttcagacagctgcgactcggtaaagtattcttcatcctcgactgaataccagccagtgtattcgcccagataaacatcgccttgcttaattagccgttcaacgatttcctgaactgcctcgacatgttccttatccgttgtccgaataaacttatcattcgtgatctcaagcattttccacagttgcttgatctgtgctgccatcccgtcaacataagcttgcggtgtgacccctagcttgtcggctttttgctcaatcttgaggccatgctcatctgtcccggtcaggaagaaaacatcataacccatcaaccgcttatatcgtgccaatacatctgccgcaatggtcgtatacgcattgccgatatgtagtttgccagatggataataaatcggtgtcgtcacataaaaagttggtttgcttgccatgcaagtgcctcccgtacattaattcagaatgagtctagtataacagagtgtgagcaggaacgcttagaaatcgaagtgagcgtgaaccggcgcgcttagaagtcggagtgtaagtggcctcaaacgtgatggcccggttttggccattgcgtttgaggtccttacacgcagacttctgcgccggtgagcgcgttatgggcataagctggaacataagcggccttaagcgtgatggccgggcttggccatcgcgttcgaggtccttacacgcagacttctgcgccggtgagcgcgttatggtgagcgtgaacagggccgctttgaaaccggagtgtaagcggcctcaggcgtgatggtcgggctttgaccattgcgcctgaggtccttacactccggtttctggccctgtgagcgcggttatgggcataagctggagcacaagcgatctcagacacgatggcccgttccacctttatccagctactcttctcaagccaaaatccatacgccccaagcagtcaatcatttgccgccaaccattgatccagaacatgaatgaactcatcatgttgatctagcagcgccaaatgccgactattagcgaacaagtgccactttgcaccgggaatatggtctaccacgcttttggcaatcaaaggcgtgcacagatcatccgttccgctcgtcaccaaaacaggcacatggattttgtgcaactggtcggtcacatcaaaatcactgatggtaccattttccgtaaattcatttggcccttccgcaatcagactagcgcgtttcccattcgttggtcgacgtaatggttcaggcgaattttcatctggatcatcccagcaatatttttccatgtagcgatcatttgcggctagatacttcacgttggtaaaatcaccggtgcgctccgcttcagcaattgccgctcggtcttcgtaactaagatacttgattagccgatgttgctcttgaacccacaacttaattgaagccggtgagccatcaatcatgacacttttaatgccttgcgggtcaaagctagtcagataatacatctccaacatcccgccccatgactgaccgagcatatgtaactcatccaagtgcaggaacttacgcaaagcaacaagctcttcggcccaagtttccttcacataaacccccggatcttccgggagcgatgacttaccacagccaacctgatcatacataatcaactgccgaccggtttcggcatagtcatccatgagctcaaaataattatgcgacgaacccgggccaccatgaatcaacaacggcgctttatcggcactaggttcaccgacaatgcgatagtaggttttatattcatgaaacggcatgtatccttctttaatcttcacaaccatccaaacattcgacctttcaagaaagtgagcgcgagccggcgcggttagaaaccggagtgtaagcggccttaagcgtgatggcccgctcttggccattgcgcttaaggtccttacactccgacttctgtgccggggagcgcgttatggtgagcacgaacaaacggtcttctacgctagcaaacacgttacgttatcgttgccaaaaatcgcacgcacgcaacctaacgtacttactgcgattttactacgcatcggcaatactgtcagacaaaatatgaaaattgtctaaaaaaaccattaaaacgctaaaacaaatccaactgccgcggcgccaacccgggaaaatccagtcctaacatatcaatcaactgctgagcgtttgctgccgcgtcatgtccgccattgttattgaagataaccgtcacatttttgcttttcaaatgcttcacgattaaggcaaacgcctctaactcggcttgactgtaccgataattggttcgttccgttgtcttagcaccgctttgcccccaagcctggttgcgcccatgtaaccgtaaaattgtcagttcagggttcgtggcaattggcaccaatgggactgaaccgctcacggtctgcgcctcatcgaccaccacatgaatgtcgccagcagctttgagcaagtcaatcgttgcggcacgatacgccggtaagtaccaactaggatgacgaaactcaatagccaccggcagatcaggcagccattggttcatattttgtaaatatcggacattttccgccgttacgccaaagtatggtgggaactggcacaaaaccgcttgtaattgatgcgtggcagtcaacggcgccaccatgtcgttgaagcgcgaaaattcggccaccaagtcttgcgttgcggcatgtttcgtcatcaatttgcttgctttaacgataaactgaaagcccgccggcacctgcgcctgccaccgtcgcactagatcagcggttttcaacccataaaacgtggtatccagttcaatgaccggaaaatactgggcgtaatcagcaaacgtactgcgcttaccattggccgccaagctagggtgatcggccacgctggttaatccgaccctaatcatggaactcaccatctgcaattcgaaatgcctgaagcgtgtcgccgttaaagtaggaagcataatcatgtttttcgccattcaacgcatatttcagcaacggctgcagatccggcaccaacccgggattatccgccagcagccacgttttggaaaaagtcgctaaaataccttcccgcgtcgcttgcggtcctaaaaacggctcatcggttttcccgaaaaaggcgtaaagctcaccccgtaattggccatcaacatgccaaaaaacgcgcccaacgcccgttaactcatgagcagggatgataatgtggctttcctcctgtaactcccgtgctgcacaaacagcaggtgtttcatcaggcaggaacttaccacccaacgtattccacatcccgcgatacggtggattcgtccggttgattaacaaccaaccacttggcgtttcaacagtcaccaacgtatattttttaaccatacccgaaaaactccttattaaggcgtaacattcaaattaactctagtaaaaaggcgccgatttgatcagcaccctcaacgttggagtaaaacgttagagaataccggtcacaatttggcgtctttttatgcatgacatcaatgctactggattaatcttacttcatcttttccactgtagctttaatgatgcccgcggaatgaacatacttagcgcgctcttcatcggtaagcttcaacttaggcgtgttaacaacaccgagcttgccaatcgtcgccggatgaccgatggcgataccgaattcaggatcatagttagcgcacggaaaaatccgcttggcatcactgatgatcgcctgcgtcatttcggttgcaatggtggcaatgccgtagctggtataatgtttggcctgataaatcttccagccgccagcccgcgccgcatcagctaattgatcataatctacttgcgcataatccgtgattggctcgttgttaacccgcaccgttgaccacgccgtaaattgtgactcgccatgctcacccatgttataaccgcgaacatcggcgacattcacatttagcgattcagcaaccgcgcgccgcatccgataagtatccagcgaggtgccagtgccaataatctgggactttggtaggtcaagtaaatattgccaatagctggtgacagcatcacaaggattggtgatatccagcaaaacgccatggaatccggacgctttcaactttggtgccacatcgtctaatgcttgttttgacgtttgggtttcaccaattcgatcgccgtttgaaatcgcaccgatattgccaaccgcggaaatgacaacatctgcatctttcaaagcatcgtaatcattgacgataatctcggtataagtcggcaatccaccaagtgcatccttcaaatcataactttcgccttcagctaaatcagccttttggtcaattagcaccagacgatccgcaatccccttgctaacgagattaaatgctgttgtcaccccaacatgtccaataccgataataccaatggttcttgccaagataaaaaccccttttcacaaagtttagtttttcgggccatgtagcaaatgccgttcaacccgctgatccgggatggcccacaagagtaacattaccaagtccagtatgatcgttaacggtggccaaagcaaagccaaaatcatggcaacaaatgcgatgatgatcgaaccgattgctttccagttatgctggcgattgtataaagcagccaattcagagtgtggtccattaactcgccgcaatgtctctaccaacaatagataactaatattggccattaaaaccacaaagccatagatcaattccggtccaaacgcttcaacatgcccttcgccaacccagctggtggcaaaaggaaacattgaaatagctaacataaatagcgagttggcccacattacccgccaatcaatgcgcttaaccagctgaaaaaggtgatgatgattattccagtacaccatcaacgttaaaaacgagaccaggtaaataccaaacaagccgcgaagttcccaaagcgaagccaatgaaccgctgtggggcggatttaattccaacaccaaaatcgtcaaaataatggcaatcacagcatcggtaaatgcttctagccgtcctttgttcacaagccattccccttttcgtgcaccttgtaaatgatcagacgtgcaaatcggcaaaaatatcggtggcatctcccaataccatgtggccaccttgaggcaaggcgatctgctcccgattaacggccacaatcgtcgcgtccggttgcgcataaccgatgagtccagcaaatggataaaccacaaaactggtgccaacgacaatcaataagtcagccgacgcaatcgcgttaatggcggcactgaccgtatccgggttgattggttcgccatataacacaatatccggccgtaaaataccgccatctgctgcgtgcacgtcgcttttcaaataagtctgataatcaaaatgttggtgacactgctgacaataaatgcggtacagattaccgtgaaactcgaccacatgcttggctcctgcttggcggtcaagtccatcaacgttttgcgtgacaatggcgcccttttgattactaatcgccgccattttttcatgaatcacattgggtttggcatcagggtaatacatgttgttcacgacgaattcatgaaaatcttcatgatgtgcctgcagattatcaatggaaagcgcgtactcgggatcaaccttatcagcatacaggccaccctttgagcgataatccggaatccccgaagccgttgacacccctgctccggtcataaacgtcacatacttagcctgagtcactgccgtctgtaaatcaaacattagccatccctccgtcgttatctcttcctatcaccaatatagcaagcatcccaaccagtattatttaattgccgtcaacgtttccccttgacaagtcgtttcaagtccatgacagcgcattcagccgccaaaaataattttgtatttcttaacattctacggtcgaaaggtgtaatattattctatataaagattgatagaaaggtgtcttgattgtcatgaaatcctttcggtggtcgcacttctttagttatttgattatggccattgttttagttttctttgccattgttctttaccaggtagtcatgcttggtattcaatccgtcactaacggcttctttattaatttcggtcatcattaacggattgtataatccagttggtactgcgccagaacgtcattcagcggttgttgatacagctgctggaaggcttctggcgttgttgcgttctcggacagcggcaagacgaaggcattttggtcatcacttcgacccatggcaacataagcaggctgcttagtgtcccgatcgcggtagccactgtgcttgattaggtaaacctgatccaaggtgagtcgcaattgccgtttggataaaaccggtgacaacgtagcgaattcctgatcgtttgtgggttgatagcctagttgctcaattaaggcatcaaagcggctaaacaaatgcacgatggcacggcgcaacccaaacggtgaatcgagtttctgctcgttaatcaactgaaaaagttcttgagcgtaaggcaatgcttgcgggtaggcagctgccaaatcagcgggcagcttgccatctaaaaagcctaacagatcaagtaacgataaaattcggtagatgaccaattgatcgtcagcttcagcaggtacattttgcttgaatccggctaacacttgcgccacgactgcatccgtgattaacccgtgttcgcgttgccatgccaccaccaacatatgcatcgccgcattatacaaagcggtactggtggcgtaaagctgatcatcgacttgaggatcaccgcttagcaaatgaaattgcaactgcgaatagcctttcatctgatacaacaagtgaagtaattcgtgactcagtgtgtaatccgcattcgttgtatccgtcaccactacctctagcgtaccatcttttttcaatcgctgatggctctggtcgtgagtcaagaccccacttgcctcgccttgaatgaccacttctaacggatgatcatagtgttgtttaacctcgtcaagtaatacctgaacattttcttgcatgccaataattctccttttgcctgcgtgatcggaatattgagccaattaagcagtcatttttccggtaacgattggctttcatgtttttgatccactatcattaaggtagcgataaaaaggaggaaattcaaatgaaactatccgtaccacttgttaacggccagcttgatgatcgttatggcaaacatgctaccggtgctgatgttaaaaacggttacccgattacgagttttccgtttacgattgaagatgcccctgcaggtaccgtcagttttgccctttggttcctcgactatgatgccgttccggttggcggtctgccgtggattcactggaacgcagccaatattccggcatcggtcactaagattcctgctggtgccagtcatcataacctcgtgccgatgattgaaggtaaaaatgcgacggccggtcatttggtgggtaacacggatccgtttacccgggaaggctatgttggcccgcaaccacctgacaaggatcacgattacacgttgattgttttcgcgttagatactaagttaccactgcaaccgggtttctggttaaatgaagcccgccatgccatgaaaggtcatattttagcccaggcagaagttgacctcccatcacgggtttaagtgcggggttgctaaaaagtaagttactcaaaaagcctgctgatcagtttcagcaggctttttgaatttagctcaactttgcaactttacagtccagtccttcaactgccatcgccggtgttcatccacaatgctccggcaccgaccgcggctaacaggccaatgccgataataccgaccaaggcaaatttaaaaattgcaaaaccgccgagtgcaaacagcgccaagctgataaacgggtgccgcaaaatcgcaccgaggagtttaacaaccaagaacaggataataatgacggcaacaatagcgccaatcgtgatggcacctgttagcgtgtgtccgttttcgctctgtgtacttgccagcatacttggtaacatcatgaaacctcacctctcttaatggccaatcccacgcagctgtccgatttgactaaaacatgctgcgaacccactggacaatgccactaaagaagctaacgatgccgtcccagattttctgtaggaaattacgattttcctgcgtattcaaactactattaagcttgtcgaataagcctttagctgaattttgaattgaatctgccagtttgccagcctgcgctttaaaatcggtattcttcaaggaaccggccttttggacattcactagcaagttaatgattaattgccgctgattgttattaataatcgtggtcagattattctgtttcagctgactgtcaacgatattgccaatttggttctgcgacagggtttgctgcccattgttactttgcgaagccatttgctgtttggctccggcaactgcattgttcagctgtttgtcggtatagccatctttgcctttattagcctgcgtgatcgaactcagcgtattgacttcctgctgagcggcattaatttgttggttattcaggttctcgccattttgggcaaacgctgcataaacccccgccaacgcaccggagccatcgattttgaccgcactggtgatgtataaattagcattgctgaccccagccgtcaatgcggcgttacggtattgatctgccgtaatcgtggtaatgttattcgttccgttatacggcacaatggtgacattaataccgccattatttgtcttttgtactaaggcactggaccacacgccggaactttccgtaaacgagctaccagagggattgagatacttcaccaaggtggcaccattgaccgtcaactgtgtggcattggagacgcccgctgcgttttgtaatgtgctcagcgttccgtttttctggtcggttgtcagcgaagaccctagcgttgcaaccggctgggtccaggcatcatcagcacgcacgatttgtggtaccgctgtaatcaatgccagcccagccgcagctagtcccagccatttaatcagttttttcataactcaaaaccgtcctttaagttgttacgactattatcgctgatttgctgcggctcgtcagcaaatcagcattcggtttaagcaatgattaattaatgttcccgctgattcacggctcgggtgttcaggtgatcgtaaagtgcgccttcacgtaacccaaactgtgaaaaggttaagcgatcagaatcaaggtaccgaatcatcgaaataaccggcatgagtccgccgacaataatgtcagcccgatatttggacaatcccggaatggcttcgcgggctgccaggtcggagctgagaatttctttaaaaatattattggcctgctgtgtcggcatacggtaaccgtgaatggcttcaaaatcggctaatttttccttacgccgttcgatcttcgccaaggtccgattactcccgcccaacgcaataattggcaggttttgcgcgcgccgtaaccaccaaacactattaaaagtttgctgaataaaggtgcttagcgcaaaatattcggcggctgaaattacatcaggattcaaaaaccgctcagataagttaaccgacccgaatggaatcgataccaggtgttgcaacttacgattttgaaccagaatcaattccgtcgaagcaccgccagtatccataatcaaggcgttttgaatcggcaacgtattgataacacccagaaaatcgtattctgcctcacgcgtacccggaatgacgctaatcgttaaaccggcttcgtttttgacccgtttaagaaagtccttttgattcttggcctcacgaacggcagcagttgccacggcttttagatcaatgtcatcgtacttatccagttcggctttaaacccttgcagcgccttgagcgtccgcgccatggcggcaggttgcagaatacgggaggatcccatatcttctgacaagcgcaccatttcttttagccgtttgacgggcttaacgacttcctgctcaattgaccagattgtcattcgtgcagagttgctacctagatcgatgactgcgaagtggtgcgtcatgcatcatcatcctcctttggtgctgtcattgggataaacgtgtgggttgcgtgtaagtcctcaggtgcctgatcaatttcttcacgtcgtaacgcctcacccatggccacagcgtgttcaatgaagtaagcctgagcgttgagttttgtcacaccgcgcaattgtgcccgggtccaggtactgtctggctgtaaaatacgcgttttgacgttatcatgccacataatatcgaaaatcttgatgatccgttcccgaatatcatcttgcaaaatcggaaacagcaattcaacgcgccggcttaaattccgattcatcagatctgccgaggacagatacacattttcctgcccgtctgcataaaagtaatagatgcggctgtgttccagtaactggccgacaatggaatgaacggtaatattatccgaaacaccggggattccgactttcaaattgcaaatgccgcgaatcagtaaatgaatttcgacgccggcatgcgaggcttcgtaaagcttctcgatcatggcggtatcagacagtgagttcattttcatttggatcaaagctttgcgtccggccttagctgccgcgatttcttcgtcaacccgatccattaaataatcacgaatgccaagcggcgcaatgactaacttgtggaaataaggcggttcggaaaatcccgatagcatattgaaaatgtttgacgcatcttcgccaatttcgttattgcaggtgaacaaacccatgtcagtataaaggcgggcggtgacatcgttgtaattaccggttgccatatgcatatagcgcttaatgccatcttcttcacgccgaaccactaacgcgagcttgcaatgggttttcaatccgactaacccgtaaataacgtgacagccggcatgttcaagttcttgcgcccagtggacattattctcttcatcaaatcgtgcttttaattccaccagtacagtcacttgtttgccattttccgccgcttttttaaggtaacggataatgggtgatttgctcgacacccgataaagcgtcatttttacagctaaaacttgcggatcctgagcagcttcccgaataaagtcaacaactggctcaaagctgtcatacggatgctgcatgaaaacatcacgttctttaatcacatcaaaaatcgaagtgtctttaaatgccggatcgatatacggggtaaatggcttaaagagtagttccttatgtccatgcacctgcttaaccaacttactgagaaagttcaaatcaatcgggccgtgaatttcgtaaacatcttcttccttgacgttcatggccttggtcaggcgtttgcgcaggtgtttacccatccctgcttcaatctccagccgcatcactttaccacgttgacgcttcttaagttgtgactgaatctccttcatcaagtcagaggcatcttcttcagccacgtccatatccatatcacgcgtcacccggaaagttgccgtttctttgatatcggcgcctacaaagagttcgcccacaaacatgcgaatgacctcttccagcaaaataaatacgttatcaccgcctggaagccgcaagacccgtgggaacacatcgggaacctgcaccatcgcaaacgaccgtgacttatcgtcatcatcgtccggccgcacaagtcggattgccaaattcaggctgttgttactgagaaacggaaagggccgggttggatccactcccattggcgtcaataccggataaagctcatagtgaaaataatccgacacaaaatcctgttgcttttgggttaagtctttggcatgcagcaactgaatatcgacagcattcaattttggtatcaacgagcgtaccagtgtgttgtattgtttttcgaccatttcgtgagcagtttttgaaatggcatcaagctgttcctgaggcttcatccctgcagcatcaggcttgtcgtaattaaccgtcaccatctttttcaatgatgcaacgcgaatattgaagaattcatccaaattactttgggtgatgcctaaaaatcgaacccgttcgagtaagggattatttttatcccgggcttcttccaacacccgatcgttaaacgccaaccagcttagttcgcggttattaaaataccgcggcttcgaaaaatcaagctttttcataacgtgtttcgtcctttcagctcaagtcctactccaaaaacctcggagaaaaattcacctttacgcgccaaggtccagcgttcaagttcaatatcatcattggccttcgtcgacaacaccactttgtctggcttcagcgaaacgcgcattcgttgaatcttttgctgccgcgatgcatctaaactgtctgctacccgtaaaatggctgatagtttggcgacaactaagcgattctcggtcgacatgatcgggaagttcttcaaatccgactggggggttaccgaactgtgaaagcgcgtgatggtagcgaccatggtgacgtccagtgcatttagacccataatttcagaagccttaatgatgtaattcgaatgcgcatagtgtttgtgcgtttcaatgtaactaccaatatcactaaccgttgccgcaacctctagcagcagccgttcatgcttgcccatcccatgtaatttcttgagtcgatcaaataattgcaaggcaaatgtacgggttgtctgcatgtggtcacaatcaacccgataacgtttggccaaattattagcgctgatgacaatttcttcatctggatcaaaccccagctttttgaagccaccagcatgggccgcgtgcacttccaaaccatcaatcgcttttaaatccgaaatccaaattgattgactgtttaacgtttcaatcaaccgataaaccaacaggactgtcggtaaaaccaatgacgtttgatttgacgttaaatcataagtatcggccagatattggtcagaggcttttgtcacttcatcataaagcaaatcaaagccgggacgatcagtttcaacttgccgcttaccttctggaatcaggttttgaaaaatcgacaagctgctgcccattaaaatcacattggtatattcaaccccttgtggcaataagcgcataaaatccagtaagcgactgtcaatataatcacgcataacctcaacgtaattggttaccgagcgctgaacatcactcataatttcatacacccgcaacggtcccagcgacaggttacgtgaaaacccaaacgttccttgactaaaagtcgtcaactcgactgaaccggaactgatatcaataagcacggttcctttttgggtaatcgtttcaaactggggaaacttgaccataatcgcctgggtacggaaaaatgcctcttctgacaaagaagtggttttaatgagccagccagtacgcgtgtatagctgatcccgaacaaactcggcattatccgcttctgcccagctcgtactggcataaacattaacggttgcaacgccatagtctttaaagatctgatcaatagcgtcaaaggcctgcacaatggtatcaacggtttccggtaaaatttcatgttcagcataaaaatcatcaccaatagcaactgggtatttaccgcgctcgattgccttaagcgtccgtagattcgtgatactaaaaagaatcgactgtgcgccaatcatcacgaacccctgtatattgtttgccatgtccgctccatccgtttcttctgaattttccaaagatcattaatgttctaatgccatgatagcacggctattatccgctgtgagaatttttagacaagccttattcaaagccgttttctcaagcagtttcagtttaccaaagatcccatcatttcttttataaataatgagcgatatttatttcttctcagatagccatcaatccgcaatccgtgttttgcgcgcatccgcgggggtcatcacctcaactattggtatttgcgtaaaaagattgtaacgacccaatcttttgcgcaagcgccatcatttttgtgatagtcttaaatcatcatgaaacctttctgaaaggaagtctcacaattgaaaatgatcaatctcgggcgctccggcttaaacgcttctgccatcgctcttggcgtcatgcgcctaccgaatcttgatcgtccgcgcgcaacggaattgctcgatgctgcttacgatgtcggaattaacttctttgataacgccgatatttacagtaatggtaaggccgaacagttattcagtgacgcactgaaaaaagcgagcttcacccgtgatcaagtcttgattcaaaccaaagtcgggattatcaatgatcgcaaaagcatgcaccgctatgacttttccaaaacgcatctggtgacggctgtcgaccaaagtctaaagcgtctgggaacggattatgttgatagtttactgctacaccgtcccgatccgctcatggaacctgaagaagtcgctgaggcgtttcttcagctgcaaaatgaaggcaaggtgcgtcagttcggcgtttccaactttaatcctgctcaaatcgatttgttgcagcaagctgtcccgcaacgccttatcatcaatcagctgcaattttcgcttatgcatactggcatgattgatgccggcatgcataccaacatggctgatacacgttccatcgatcatgatggtggccttttgccgtatagtcaacaacatcatatgaccattcaggcttggagtccgttccaatacggtttctttgaaggggtcttcatcaataatgaccaatttcctaagttaaatgcgctgcttcaaaaactagccgatcaatacaccaccaatcctaatgccatcgcggctgcttggcttttgcgcgttccggcgaatgtgcaggttattgccggcaccaccaaaccggcgcgtctgcgggcgattgccgaggcagcagatatcaccttaagccgtcaagaatggtatgatctttattttgcggccggtaacgacctgccttaagcctaaatgccattctgattggcagctatcagacaccaactcgtaaatgacctaaaaattgacacatttaatctttctataaagggagtttcgcatgaagaatcgactcgatgatattacagatttaatggcacttggtccgactccggatgcccgtgacattcagcgacgtcaaaccgcccaccgaattgcaattgcagacgcttggcaaattcaaccaggcgaaaacatcttggaaatcggctgcggtcaaggtgacttaagtgcggttttggcagatcaagtgggtcccagcgggcatgtcaccgggatcgacattgcttcgcgcgattacggtgcgccgctcacactcggacaagcgtgggatcatctgttaaacgggccgttagcaagtcggctgacggtacactttgataccaatctcgccgccagcctcggtccggttgccaatcaacattttgaccgcattgtgatggcgcatagtttatggtactttgcatcggccaatgcgtttgccttgcttttgaaaaacctgcgcaccattggcgattatgtcgatcttgccgaatggtcacttcaccccaccgcgcttaatcaaattggtcacttacaagccgcgatgattcaagggttactttatgcgattgcacctagtgatgttgccaacattcgcactttaatcacgcctgataccttagcgcagattgcccatgataacacatggtcctacactgctggcaagctaatagaatgtccggatctagatgatgccaaatgggaaatcgccaccactaaggctttattgaccgagctaaaacttagtaccgatttgcgtgatcgcgtaaagccgcagctggaggccatgcagcataatggtaccgctagtttgcccacatttaccggtcgaatcacgttctaatgcataggaggcgtcagcatgatcgaatttgttcccgccaccaccgcagatctgcccaagattgttgccatttataatgagaccatccctacgcaccaggcaacagcagatttgcaacctcaaactgttgaccaaaaagctgattggtttgcagcgcacaatgatcattttccggcatggatgattcaggttgatcatcacaatgtcggctggctaacgctttccgcttacagtgaccgggcagcgtatgatcaaaccgcggaaatcagcttgtatctggacatcactgcccgcggtcaccatatcggcagttcggccttggcgtttgtggatcaagaagcaccggctcgcggattgacaacgatcatcgcaagaattttcggccacaactcggccagtcggcgtttatttaagaaatttaactacgaccactggggccatctaccagctattgccgatctaccagaaggaaaagccgatctggaaatttacggcaaacattttaacagctgattgggacacctactaacgaaaaatttcctactaaggttaatcgccaaaaaaatcagttcttcctgcagcccactgacttaggaagaactgatttttatattctatcatgtcactttttccataatggctacttctacgctttttcccctgttttcgtatcttcttgctgtctaatccgccgcatggtgcggatgtaggagctgaccaatacaagcacgctgccaagccatgccaggggattggccgccgatgccccggcaaagccaaacggtactacaaggaaaatcgccgcaaatgcccgcatacctaattcaaaaaatccggccacagtcggcaccagcgtctgtcccaatccttgaagcaggttccggacggtaaataggatggctagcagccaatacatgctggcattgtagtggaaatacgtttgggccaaagcggtaacggcgggctgattcggtccgagaaacaaattgactaatggtttactaaagacaatgatcaaggcacccaacaccaacgataagccaacattgaccaacaaagtttgatacacgccgcggcgaattcgaccgtaagccttggcaccgagattctgcgcggcaaacgttgccatcgctaccccaaacgaagctgaaggtagtgtcgcgagctgatcaatccgaccggccgcagtataggcagcaaccgcattcgtaccaagcgtgtttagcatcacttgcaagataacagcaccgattgcaatgatcgacatttggaaccccattggcaagccgacttttaagtgtttaacaatatcctgccaatcaaagcgcaagtcgctgcggttaatgaccaacaacggaatccgcatgcgaatatagatccaacacagtaacgccgcaatcacctgcgcactgacagttgcataaccggcacccgccacgccggaatgaaaacccagaataaaccagaaatccagcacgatgttaataatcgtcgcaatgatcaggaaaaacagcggtgttcgtgagtcccccaatgcccgcaacatattactcagcaagttgaaactcatcgaagcaataatgccaaaataaatcacccgcacaaaggcaatcgagtcatccataatatccggcggcgtctgcataacggttaataacggccgcgtcatggtcacggcaccgattgtcaaaataacggaaattcctagcgtgatccagacactcgtcccgaaactacgccgcacccgccgataatcacgtgctccatatgcttgggctgtcaagattgacagtccagctgtcgtgccttgcgcaaagccgataatcaaaaagacgatactcgaagttgcaccaaccgcagccaaagccgctttgccaatcgtacgaccgacaatcagcgcgtccataaaactataaagctgttgaaaaagattccctattaacaatgggatcgtaaataagatgatcagtttcaagggtttgccaattgttaaattgcgcatcaatctatcctccaagattctttcatgcctggttgcgtgatgatgtcagcgcgtatgttgggttggcatcatcgaaacttatggggttatgacgtacgggaacggcttgtattttgggctttttgagcttttttcgcccaaatgtgtttccccggcgcagaagtctgcgtgtaaggacctaaaacgcaatggctaaagaccgggccatcacgctttaggccacgacgaaccactttacgcccataacacgctccccggcgcagggatctgcgtgtaaggaccttaggcgcaatggccaagaccggtcccatcacgcctgaggccacgggattcactttacgtccataacgcgctcactaaattacaatccccccacgatatcacaaaaagccagacagctgaataactgtctggcaattgaaatatatttgcaatcaaacatcggcaccgccgcctccggagctgccgccgccccagcttgagccaccgccggaaccgccgccaaagccgccgaatccgcctccgccgcctcttcggcctgcagagaacaaagcatctaggatgagccatagccagaagccgccatcaccatcgcggcgccgtccgccacggccaccgccgccgcgaccgccgaagatgactgctacgaccacaacgacaagaaagatcacaacaatctttcctagcaaactgccaccgcgatttcggtccgcattttggtagcgattcatggtttcatccgagaccgtgttttgatccttaggaaatttatactttttatcaataacggtcgcaacggcattgaagaccttgcgcaaagcctgattcagttcggctttattacccgatttaattccttttagattcgtattgaggatttgtcccgccaaagcgtctggcaagtcaccttcaaggccgtaccctacttcgatccgcagattttgcttaccattattgtcagcgtatagaatcaacacgccgttgtcggtaccttttttcccgatcccccatttctgaaaaagatcaggtgcataatccgacaatggatcgccgtgggtagactttagtgcagctaccgcaatttgcggctgttgtttggtgctttgataataacgattcttttgatcaaccagttgttcggtttcctgatcaaggtaacgatcctggtccaggtagtaatggtcagttggtcgtgccggcagatcctcggccgctgctaccggatgagctgcaccggtaaacaacaacaagcccgtcagcgcggctagtaaccacgctaaatgcctgcgcatggcgccacctacttcccagaactggagctattgcttgaaaaatcaacactcgggacggtctgtgctgatggggtagctttgaaggtgtccttcttgcccagtcccatcatgcttgcaaagatattcttcgggaaggtaacgacgctttggttataatcccgaacctgatcaatgtaacgcttgcgttcaaccgagatccggttttcactaccttcaagctgcgtcatcagcgtgttgacctgattactgctttggaggttaggatagttctccttgatcacattaatcaatgtcccaacactcttattcagttgatcatcggctttagccttgctggttgttgagtcggcgttagcataagacttccgggcttcagcaatatcgccgaagactttttgctcctgacccatctggcctttaaccgcattcaccagattcggcaccaaatcggcgcgccgctgcatcacattttcaacctggctccactgggcttcaactgcttggttctgcttggccaacgagttataggtaccaatgccaaaaatcaggcagattgcaacaatgacaccaagcacaatgctcgtgactgcaactggacttaatcgtttcgttttcatcatggattctcctctagtacatgcgccgttaataagactgttaatcgtcgtcttcagttataaacttattaactcgcatcgtaatcaattaccacttcctttatattttaccatgttggttgcattcgacatccggcttaagacgtaattacctacttaaaatagttaaagccgatcgcatcacggacttcttgcagcgtttgattcgcgacaacattagcttttgccgacccttgctgaagcatttcggccactgcacccatatcttcggcatagtgggcccgccgcgtccgaattggctcaagaaccgcctccatcacgtcaattaagtagcgcttgatcttcacatcacctaagccgccatgttgatattgctccttcaacttagccacctggtccttgtccggatcaaaaatatccaaataagtgaagacaacattgccttccaccttacccggatcgctgacatgaatgtgatttggatcggtatacatcgacataatcttcttttgaacagtatcagcatcatcggctaggtaaatgccattgttcaggctcttgctcattttggcgttaccgtcaatccccggcagtcgtcccagaccttttggcgggaagtagccttctggttcgactaagacatctttgtgataggtccgattgaacgtgcgcacgatttcacgtgtttgttcaagcatcggttcctgatcatcgccaaccgggaccgtggtagctttaaaagcggtaatatctgccgcctgactcaccggataaataaagaatcccgcgggaacgctgtcgccaaacgctttttgcttaatctctgccttcactgtcggattgcgttccaagcgattgactgtcactaaatcaagataataagcagtcaactcaaaaagcgccgggatttggctttgtaccaaaatggtcgtcttatccggatcaatcccgactgccagataatccaatgccacttccaacaacgagtgacgaatcttctctggatcattggcattatcggttaatgcctgggtatcggcaatcatcacaaacggctcatattcgcctgagttctggagctcaacccgattcttcaaagaaccaatataatgcccaatatgcaaccgtcccgttggccgatcacccgtcaaaatcactttttttgccatgcgtgtttcctccttaatttaaaaaagcgtcctatgtcatgacaacataggacgcaagcgcgcggtaccacctaacttgtccgaatttcggaccgctcttggcttaaggcgcacccaccgaacgtaacgcaaacgacccaatttcacctaccctggccatcgacttctcagcgctgccgactctctggcgaccatttggatagggtactcatcgtttgtgtgaatatgggtttaggttagctaagtttttactagaagtcaatgacaaccgaatgccaacaagaaaatgaaccatattgtcattgtttctgacgtttcttattggcaaggtatccggcaacgatcgcaatcacaatacaaatgataagcactattttcatggcgttcatcctcctctggttagtgtaccagacggggatttttacgcaaagaaaaccttatagcaatataataaaattggtaattacgtctgaaaaagataagttgcttatgtcgcaaagagaggtttactaacaatagcattagcattattaaagttaatccgcatcaacctttattaaatctgatattacttttttcgaaaaaaccggtattgcggcgatcatcatcacaagtcccaaacacaaaacaatggatggcgttgcggctaggtgtgacaacggtgcactggcaatcgccgcaatcggattggcaactgaaaaaatcgtgagaatagcgccgatcaccatgccaatatgttggttcggtaccgaaagctggacagtggaaaaatataaaatcgagccggtagcattacaaataccatatccgagccaagctaataccacaccaaaaatacccctttgcaacaaactgaaaaagccaatcaataatatcatgaagccttgcagaaacaaaaaatacgggaagctttttgcagtaaaaatttttgtgtctgagtgcttggcgttaaccagaaatgctcccagaatcgagcctacagtaaacgcaagatcaaccgcattatacatatacttaaactcggaaaaaatatcaattgacagcttaggcattagaagccaaactgtccagaaacagaagttggtcactaaagctatcgggacaatgacagcaattaacgtattagaacgaataattttgattccttcaaaaaagttactggtctgaattgaaagtgatgatgatgcctcatgatttgcttccggtgcttgtgtactgttcaaacggccaataagaaaataggagacgctataaaggatcaacgacagaaccaatcctgcacccacattcccgaagaaaataaagatcgcagacagcccagctgatagcaccgatgcgagttgattcgttatggatacccacgaattagccgtgaccaagtcatcccggtcatgcacgatagatggcacaatggactcagtaagtggactgtacacaatgttaagtaccgagttgatcacaaccgtcatcatcaccccaagaattggattattcatcagtaaataaatgacaagcccaaagctagtatttagaattcgaatgagcacaactatcttcagtaatgcaattctgttcattcggtctgaaaaatagcccccaataaaagtaaacaaagtcgcgagcatcgagatgagtcccagaagtgaaatgtagttctggttatgagtcacatcataaatgtaccaataagcaaacaaaactaaggcgccatttgttaaagtgtcaaagaaatcgctaaaaataatctgcttgatgcgcttcatatcattctccttaaatgaatagggatattcctcggataacggaatggttagatcttttcaaaattcttaccacaaaatgcgtcatttagtgaaaaacttcagattgtaaatttagactaaatgctttaatcgggtaactatttttgtatctcattcttgctattatcctgtgggcttctagagagagctaaccagcaacgatcctctccagcaggcaaaataagtgaaactgtgctgataagaatgaagcggttctgtcgccaacagaaaaacagccctatgatcatgtgcggagtcccatctatactcatcatcattgaccttattccagagacccatcttaagattgttcggtctaactgctactgattgctggtgcctattttaattattaagagcattttcgctttttaatctttctataatgattctgcaacaattgccgaacctttacaagtagattatctcaccgttattagtagccaagcgttagaatggatcacagcaagaataaaagttagtttcaagacttatatatagctaagactggatcccgccaaacgcacatcaccttctttcgctacattacttctctcatcacgctccaagcccggtcgctacgctgtttccacggctgagccccatctggcctacgattgctccgctttggcactggaatcgttaaagctcatttatactaaaatgaaggaagccaaaaagcgtactatttcttgaaaaaaagaaatagtacgcttctattttgaaacaatgaatgatgcccccgcctcgagcactcaaaaaaggatagacctagcaaacttgattgctaaatctatcccttttgttttaacgttcgaattcctcaaacctacttctgcagattaaaacaagtactgcaaatcactttgcgcactcggataagcatagatccggttgagatcactaggttcctgcccggcatcaattgcggcggcaaaagtattgatgaggtcttccgccagactcgcgaggacaacggcgcctgcaagtttgccggtgcttttatcgacaatcgtccatacctgcgcatccgggtcttgtatgcgattgtatgtgtaccaatgggttgtctcgttgtgagtgacctgatactgctccggtgcggctagggcatcttcaagcgccacgccgactttagccagctctgtggggccaaagacgatggttggaatcgccgggtaatgaatcggttcctgactgccaagaatttgttgggctacatagcggccttcaaagccagcaaccggtgtcagtttcggttgaggttttaagttgacatccccaattgcataaatgttggcaaccgccgtccgcaagtgatcgtcgacgggaataccgcggaggtcggatttaatcccagcattggccaagcctaaatccgcaacgttggcaattcggcccatcgccgtaactgccatatccacgttgagatcaaacccatctgcatgcaagtgcgtcatcgttcccagtggactgattttcgtcagttcaacattagggtgaaaatgaatcccggttttaagcaacagctgcttcaatgcctctgtggcaactttagggaaagcacgtaaaagtcgatcggaatgaccaatgatatgcacatctgccccagccgctgcggcaatgttagcaagctcgacactgacataaccggcaccaataaacgcaatgctagtcggtaatgcgtccaagtccagaaaatcacggctggttttcaacaaattggcaccggggatatccggaaaacgcggcgtatgaccggtggcaatgacaatatgttctccggtcacgttttgcgacccgactttaaccatatgttggccgagcaattgggcgcgtccgtataaggttttaatgccagtccgtgtcaggccggttagcgtcccggccggaataccggttgtgtaactgcgcttaaaggccatgagtgacggccaatcaatcttagccgtaccgctgatgccaaaaccgttcatccgcaaagcagcatttttgacttcaactccgcgataaagcatcttcttgggatcacagccgtaattgggacaggtaccgccccacagatcactttcaatcaccagcaccctttgcttggcggcaagtccgtaagcagccgccaacccaccgggaccgccaccaatgacaatcgtgtcataatcatacgccatttcgatcatcctttcgtttctgtgtcctgatcaacaaatgcacttgcaagatacgccaccacactatgcgtatcaatcacgaaaacgccatggtcactcttgacccgcaatgtttcatgggcgtccaacaacggcagcgcctcggccaacgttaaattaccgccaactgcatgatcagctgattgctcaaccgcaaatggtgctaattgactcaatgtcacctgcaacccttgatttgcctgcgctcctttgaaaagatcagcaacaaaatcattggctggctgcgtggcaattgcttccggagtgtccacctgcaagagccgaccgttatgcatgacgccaatccggtcgccgagtttcatcgcttcagccatatcatgcgtgacaaaaacaaccgtggttttcattgcccgatgcaaatgcagcaacatatcctgaagctgggtccgtgaaatcggatcaagcgcggaaaatggttcatccatcaacaccactttcggccgcgatgctaaagcccgcaaaataccaatccgctgttgctggccacctgatagctcgctgggcatgcgatcacgatactcggctggcggcaagtcaaccattgccaataaatcatcggttgccgtgcggattttttgccgtgaccaccctttcatttccggaatgaccgcgatgttttgtgcaactgtcatcgttggaaataatgcaatttgctgtaaaacatagcctaaatcccaacgcaaatcacgtaccttgtatgccatcagtggtttaccggcaaatttgatgactcctgccgttggatcaaccagccgattgatcattttcaacgtggtggttttcccactgccggatgtgccgaccaggacgaacagttccccttgatcgacctgtagactcaaatcgttgacaaccggcttgtcatcataagtcttcgtgacgtgttccagactgatcaatgccatcagcgcacctccttgagcaaaccgtgttgcacgagatagcgatgagcgaccgtggccgctttttgattttgtacactcacggcataattcatcgcctgcatctgtttttcggtgatgtgattggctaaccggtttaacgccgcaaccagtcgtgggtgctgcttggcaaacgcggcccgcatgagtggggccccgcggtaaatcgggaacagacctttgtcatctttcaaggccactaaatgatactgtcgcagttgcgcgtcagttgtgtagccatcagtcaggttaatctgcccgcgatctaatgcttgatatcgcaacgaggcatccatggaatccaccttaaattgcaggccatattgagattgaatgcctttatatccatcttggcggtcaataaattccaagtcaaagccagcgcgaattgatggtgcaatttttgccagatcactgatggtttgcaactgataacgcttggcaaaacttgctttaaccaccagtgcgtatgtgttgttataggccattggtttcagataagtgaagccttgccgggccaacaactttttggctaatggataattatttttgcctgccgctacctgctgctgttgggctgcagagggtttcgtcagactagccaagaccgttccggaaaattctgggtacaagttgatcttatcggttcgcaaagcattgtacaagaagctcgtttgcccaaagtttggtttcaatgtgaccccaacatcaggatcggctttttgaatcagttccttatacatatgaatcaaaatatccggttcgctgcctaatttaccggcaatggtgatcgtttctttcggcgcagtcacccggctgtaaacctgcgtgccgacgagtccgaaaaccgccaacgccacaaccccgacgctcagcttccagttaattttttgcatcaagttcaataaccacgaaaagacaatcgccaataacgccgcagcaagggcacccataagtgtcagtgcggcatcgttacggtcaatgcccaaaagaatgaaggttcccaacccgcctgcaccaatcaacgctgccagagtcgccgtgccaatgatcatcaccatcgccgtccggacgcctgacaagatcaccggcagcgcaatcggcaactcgactttaaatagtttccgcaaccgactcatcccgaatgcatccgccgcttcttcataggaaggatcaatgtcgcgcaggccgatatatgtattctgaaaaatcggcagcagcgcatagaccactaacgcaataatcgccggcaatgttccaatcccgacaaacggaatcaataaccccagcaatgccaatgaaggaatcgtctgcaacacgccggtaatctgaagcaaaactgccgcgactttggcatgtgtctgaacccaaaccgccaacggaatcgcaattaccaccgctaaaataagcgcaatcagtgatatttcaatatgctgtcccagtgcacttagcaattcaccgtggcgctcagcaatcgtccgccataaatcagccatctcgaacctccgtgtgatgtgattatgtttaagtgtaccaccttgttttccgatgcaacaacatgaagcagagtgagcgcgaaccggcgcggttagaagtcggagtgtaagcggccttaagcgtgatggcccggttttggccattgcgcttaaggtccttacacgcagacttctgcgccggtgagcgcgttatgggcgtaaaccagaacgtatgtggccttaagcgtggtggctgggctttggccattgcgttttagatagagcctgttctcaactctattctaattaagtgatctccgatactccgagctggctccgcggtggctgggctggaacgtggtgggcacgacttcgaacccgcaaaaaccgcggtttcgaagctcggccttggtctaaagcggagaagcccactccgcttaagaccaatttcaccactgagcccgccaccgctccgccagctcttgctttctatcttaatttccaaacaaagcgtctcatattactgttgaaatcatctagacaaatttgtctttgcttgcccagaacgtgtacactttacttttccctcaaccgggcgtaagattatcgacactattttaaacacgataatgcatttgctagtgcaggattcgatcgatttgatcctagtcacatcaacgcacgcatactaaatcggagaggagcgccggttatgaagaatgcaacgaaagcagaagaacaggcacgggtcacggcggtcattgcgaaactaaaagcgaggttggctgccatccatgagcaaatcgaagcggcgcaccgtgaaaccagtcgcatcgaacgggcatatggcgaaaacaccaaagtcaacgtgactgaagtcgatgatcaaatggaaaccaacgccgccgttcagcaacaaaaagtcatggttgcacgggcggttgaaaatgaaaccatccttaaacatgaaggcgatcgcttaactttattggcagacaacccgtattttggccgcatcgacattgacgaagacggcgaaccggatacgctttacattggcaccgcgaccttcattgacgaagatggcgattttctggtttatgattggcgcgccccgatcagttccatctattataacggcacgctgggggatgtgacctatgaaaccccagctggcgagcagcacgcgacattgaaaaataagcgccaatttcaaatcgaacacggtcacatcaaaaccatgtttgataccaacgaaacagtaggcgatgagattctgcaatcggtgcttggtgaccaatccgacgaatatatgaaaaacatcgtcgccaccattcagcgcgaacaaaacgacatcattcgcgatacctccagtgacttgctagtcgttcaaggcgtcgcgggctcaggcaaaaccagtgcggtcctccagcgggttgcctacttgctttaccacagccgcagcgatttggatgccgaccaaatggtgctcttttctcctaaccggctttttgccaactacatttcccaggttttaccaagcctaggtgaaaagaatatgcgtcaggccaccttgttcgagttcctcgccaatcgttttaccggcctgcatgtcgaaaccttatttgaacggtacgaacacgatgcagccggtttaccgcaagcagccgaaaccattcgccgctttaaagaagctcctagctacttacaagccattgccgattacgccaacgatccggatcgtgttcctcatttcattgacgttgaattcaatggtgaagtcttcttttctgccaccacgattgccaatatttatcagtcacaaccgaccttgatgaaacccatcgacaaattcacggcgaccaaaaatgcactgattaaacagttaaacgctcgtattcacgacgaagccacgcacgactgggctcaactgcgcgtctctgacttatcccaaaccgaattagagacgttgacagccgatcacgagtttgcaaccggagaagacgagcaacaattcgtttccgaagccattgttgcaaaagccttcgcaccaatttacgacgcactgtacaatgatcatttttatgacgtcttccaggattatcaacaattcatggcacagatagcagccccggtgaatgcgccgatttggcagacgatgatcactgcctttagcgacggcattgaagcccatcacttacgcttagaagacgcggctcctttgctttatctgcgcgacctgagcactggcagcggccaaaatagtttgattcagtatgtgttcgttgatgaaatgcaagatttcagtatggcgcaattgttatatctgaaacatgcttttccaaaggccaaattaacgttgctcggggatgccaagcaagatgtcttcaccagtaattaccagcccagcgacttcatccacgaaatcaaggacgtttttgccggttataagatccgtttgattacgttgaacaagagttaccggtcaacccaaccgattacgaactttgccaaagccttgttgccagaacacgaccacattcaagcctttaatcgcgccggagatatgcctgaggttttgaccgtttcatcagcggaggccactgctgccttatcgcgttcggtcacgcggttactgacagttgacagtaccgtggccattttgaccaaagatgccaaaaccgctgcacaactttacgccacactcaagctcgatacgccggtcacgttactgtctgctaacgaccacagtctgaaaaatgggtgtgtcatcttgccggtttacctggctaaaggacttgagtttgatgcggttgtgggctgggacatttccgcaaccacttaccgcaatgaagccgatcgcgatattctctataccctttgctcgcgtgccttgcatcacttaacacttgtaacgttggatgcaccaagcccattaattactgcattgccgaccgatctatatcggcgaaccggcgatgcttcggaagctcgagtttaaggccacacaaacgcccttgtcgcaaaaagacaagggcgtttgttttattcgtgattattatgatattttattaacatcatcgtttaatttaaaaacttaataaaaactccggaggccatttaattgtttaacttattacgcaccttcatggctgtctatgaaactcgcagtttttcattggcggctgagcatctttttacgagtcagcccaccgtctcccaccacattcagcagcttgaacacgaactcaatgtcacactttttgaacgcaacaagcgcagcgccaccgtaccaactgccgcagctgatattctgtacgattttagcggcaacatgttagccgaatgggacaaaaccaaacaggcactgcaaaacaccacggcgacaaccacggtcaccttacatatcggcatatcccaaagtgtcgcggccgtgctgtttcctagcttagcgcgcgatttgaaggctgcttttccctacctacaattcgatgtagccgtcttaaattccctccaggttgtgaatcagctggaatcgcggcgccttgatctcggctttattgaacagccattgacacttaaaggtgctaccagaacgaccttgtgttccgaccagctcacggtctcgggctggcccaccggtacctggatcacccgcgaagaaggttccggcatgcgctattacacaactgcttacctacaaacaaccggcatcacacccaaacacctgatgaccgtcaataacaacgctatgctgcgggccttggtccaaaatggcgtgggtcaagcgctattatccgatcgcatcgctccgcctgaagccccgcaacaagccatcgggaaaaagtttcaacgacatttttatctgctgcagaaaccgagtgctcactggccgcataagcaagcgatgctggataagattattgatctggctaaggtagccacaaaatgatgcgctggatttatgctgtttaaaggcagaaaaaacgtcacaaaagctgtctcatcgccttttcgactattcaataaccttctgcgcgtcttgagcagcagccttaaccccttttcgaatccgccgcagaaaatgcagataatgaccggttacaaagactagcatcagcgttgccgcgatccactcaccccattgcaggacactcatcagatcatgcactgtgccattctgggcaaaagccgcaatatatttggtcaatgcggtggcggaaatgaccaaggggaacgtgaaggccgcaaaactagggtaaaacgacaaccgcgtatactgccgaatactaaccaacgtaatgaaatataaactctgcgcaaaaatcagcatccctgttgccagccagaagttagggtggtcaaaactggccagataaccggtcagacacaacgaggccggggctgccataatggttaataatggttgagtcgcttcgggcaaaggcacatgccgtaaccggtgaagcacaaacggaaacaaggcaacataaatcaccaacgccatccagaaaagcggctgacctagcgccggtacaaattgactgctggtcaccggaatcacgcccaagccaacaaacgtgacaaaccagctcgggtaaatcattcgccatgctttcggttgtgaaatcaaatgccgcagaacaaagaaaatcatcaacccaaagtgaatcgccaccgccatcagccaaacaatcgtcgcaaccggcaacggcatcccccaagcaacaaagtaagtgcacaagatcatcagcgtcattgaaaaagttggcgaaaccgaagcaataatcggatccttcaaactaccagcagcatgaagcggcgtcaaacaaagcttcagcaaaaccaatccaaacaacaacccagctacgatcccagtcaaatcaccaaccaactgccaaccagctaatttatacaaattccccaacgaagccaaccccaacgtcaaccccgccatgggtaacggtacctgctttaaaaaattacgcataacatcctcctgagcgtgagctggcgcggttagggatcggagtgtaagtggccttgggcgtgatggtcgcactttgaccattgcgaccaaggtccttacacgcagatccctgcgccagcgaacgcgttatgagcgcgaaccggcgcgcttagaagtcggagtgtaagtggcctcaggcgtgatggcccgcacttggccattgcgactgaggtccttacacgcagatttctgcgccggtgagcgcgttatgagcgtgagctggcgcggttagagatcggagtgtaaacgaccttgggcgtgatggccgcaccttgaccattgcacccaaggtccccacacttcgatccctgcgccagcaaacgcataatcaatcacatgctccccagtctaacaagaacagctaacatcaaccaaatgaatcttttgcatcgttaatattcatgaatcgaatatcagccctagaaaaaagcgttggtaaatcaacctttcgctgatgccaacgcctatcgacttgttacttgccatcaggacgaccatcaatttaataaacaagctttttttcgaccaagttgattggaattagcgcaattattaacaatacaacgaacaaccaaaccagattagccaattgaccactcaaattaccatcagctaatccgcgaattaggcccaccgcatgggttaacggcgaaaaccagccaacctgtttcaaccagctggccacatgactcaacgggaaaaacgtgttggaaaacataaacatgggttgaataaccaacatcgtgtaatagttcagataatctctgctaggtgccatcagtgtgaaagccagtcccaagaatccaaacagggtacccgtaataaacaaaaccattggaattaacattgcccaaaaactgctaatggttcccatcagtagcgccactagcataaatagtgtcccgaagatgacgctccggataccggcccaaatagcttgaccgacaatgatatccggcaggctgatcggaccggtgctcatttcataatatgttttgtctaaatgcatctggatataggcattaaccgtgctctcattgttggatgcgttcatcgccgtcccagcaatcaagcctaacgtaataaacttcaagtaaggcatcccgtctacttggccaacaaaactgcctaaacccaaacccatcgctactaaatacaggatcggatcaaacagattaggaaaaatagagattttaaacaacttcttgaagctcatccaatcacgatagatcacatgaccgatgcctttaatcttgagtttgttcaatatcttcccgcccctcatcaaaatttgtcattttcaagtaagcctcttccagcgtggcataaccatactttagcggaagttctttaacaggagcttctgctaaagcaacgccatgatcaacaatcataacgttgtccgccaacgcctcgatttcatcaacataatgcgacgtgagtaaaatggaaacgccgcgtttttttaaatcattgattcggtgccaaaagacatgtcttgattgaatatcaagcccagtggtgggttcatctagaatgatcagtttaggatcattgataagcgcccgcgccaagactaagcggcgacgcatccctcctgacagactggttgttgctttattttggtaatgagacaacccaacaaactttaacaattgctcggctttttcagcagccactttaaccgttaaatcaaataagataccatgagcgatcatattttctttaacggtcagcgttgtgtccagtaagtcatcttgcataaccaccccaatcgtccttttagctaatcgaggttgtttaacaatatcgatcccgttgataaaaattttcccggaagtaatggcggtcgtcgcataaatcatttttaaagttgtcgatttaccagcgccattaggtcccaagacagctaacgttttcccgctatccaaggacagtgaaatgcctttaactgcctcaaagtttccataacgcttaactactttttcaacctgtaaaattttcacagccggacacctccactagcgaaacaaatatcgcttttcataggcttaactaacgcccttgttctaaattttagggcgcagtcatttccatgcgcatcgaaatgtggaataattaaagcgcggttattattcgccgataaggaggttcgtttcatggcaaaagaattacctaacatcaccaagattgcagtcgctttgtccaatcactcaaaaatgctagttttagacagtctcatggataaacgcggtcacacacttctagaaatagcccgcgaagccaacattcaacctcaaaccgccagttatcacttacagaacttcattaacaacggttgggttaaaatggaaaaatccggccgttttcactatttcttcttagtgagtgatcaggttgccgcactcatcgaacaattcagtccactttcaccatcagcgtcaacccataccttaaccagagcccttaaggttgataaaatgcggactttccgttcttgctacgaccatatggcgggaaaaataggcgttttgattaccgatcaactcttggctgatcacctcattagcgaagaacctcaagcatatcaagtcacgccggatggtctgaacttctttgaaaagggtttgaatattgatcttgaaaccgtccaaaaaaagaaacgtctctttaccgttaaatgtctggactggagcgaacgaaaacatcatctcggcggtgccttgggtaatgccatttttgatgcattttcaaagcaagcttttgttgaacgtgatcccaacaccaaacgagcgctttatctgacggcagaaggaaagtattttctacacactgaattgaactgccaatttgaataaaccgaccggaacgcataaaagccacccatcgcagaacaatgatgggtggcttttgtacattcattaacgcttttagcaattcggaatctgcccatagccaaggaagctcacgcggcaatggctggttgttaggatcacgctgcttaaaccaataaaatcgtcgcattattcagtatgtgcaaaccgattgaatagcgcatgtcccgcgtacgcaggtaggtccaggctaagacagcgccaagtgcggcataaataaaaatattgtagtcaatgcgcgaccccgccacatgggcaaagccaaatgcaaatgcactcaccaacacgctaacccactgccaggaacgtttctgcaatgagccaaagctattcatcaaaagaccacggaataaatattcttcgacaatgggaccaccgacgaccgccagcaacttaattccccatggatacgtgtgaaccagcttaatcaaattactctgatttgctgccaggggtgcatgggttaactgcataatgagtgaattcgtcacctgaatcaaaagcagtaagccgatgccttgcaagacgaccgcaacgggatgggcaacttttaaaggcgattgctggcgatataagcgccggtaacaaaccatcaaggcggcaatcaatgccccaaatgcaatgataaacgccgcgatcgcaccgaccatcccccaagttagttcgctgcgaacaagtgcaagttcggccagagagtagaacaagaaaccgacaataacgccaaaaatttgaatgatggaacggaggatttgcaaaataaacgatcctttcgtaggcagtcacttggactgacggataacgatgtcacaacattgctagcaacttataataaaaaaagcccgaccagataactatctgtcaggcatttcatttgcagccgtctatcgggcttgaaccgacgacctcatccttaccatggatgcgctctaccgactgagctaagacggcaaatgacttggttgtttaaaaacaactgcctaattaatgtacactaaatcgccattccccgcaagccctttttggaaaaatatcgcaccaagccattttccaactgcaaatttcaagctgttagccacgtcaatgggttcaaaccgttacaatctggtcaagctgatctttaatctccggacgaaggttatgggtcaccatgatcagtgtggtcttgggcaacgataccagtaatttttcgatggcgagtcctgacttaggatcaagtgccgccgtgccttcatcactgatgatgacgtggctttggcgaatgaggccgcgcgccaaggcaattcgctgtttttgaccgcctgacaagtctgccccattatgttccaaaaccgtatcaagtccctgttcctgttgcgccataaacgttgtcagccgcgcagcttcaatcgcatgctgcaacacatcatcagccacctgctgtcccagcgtcaagttaaagcgaatggtgtcgttgaagatataaggtgcctgatcaatataggtaatctgatcccgcaaagagcgcggatcaagcttctgatagttttgggcgtcccacgtgatttgcccttgataatcggctagcacatcgctaatcagtcgcaacaaggtggttttcccatggccggatggtccgacaatggcaattttcttacctgccgtcaacgtcatcgtcacatccttaagtaccggctccttgcgatgcggataggtgaaagtgacatcctgcagatgaatgccttcttccaaaccattaactggctctttcggtttttgcggtgatggaatcgccttggcaaacttatcaaaaatcggtgcgactgatttaaccgtggtcagggcaaaactcatcaaggttaagccactaaaagtcgtcccggccactgaatgaattgtgacaaccgccccaaccggaatcacgcggttatatgccagcaatccggcttggatcagcaggaaaagttgactgcctagattcaccaaattaatcaagaattgcgtggccatattgaattgaatatacccaacttgtgcgtgcccggccgcattcgatgcatgaaacacccgatccaccatgacgtgacggcgattcgccataaataaggtattgaagccttcaagaatatccgtaattcgattagtcagtttctcgttttcctgactccattttgccgccgcagcgcttagctttttacgataaatcatcggaaccgtgatcaatagcactgcacaaaccaaggtggtggcaaataacgatgcttgataggtcaatagcacaaagatactaagcacaacttgccagctcgcctgaatgagatagccaacattgcgcagtccctgggtattaatcgtattgacatcgttggtcatccacgaggtatacaccgcatccgaccgcgcatggtactgttcaaacggcatcgcagcaatgctcttcgttatttcggtacgaatgtcattattgagccgccgttgtagtgacacctgataaatattggtcagcgtctgcatcaccagttgaaagatagtcgctaccaccatcacaatcgcagcagtcacaaaggcatttactttaaactgggtcaacgcagtaatcatattcccagtaaaaattgacacagcagtcagcgcagaaatttcaagtccatacatcaggataaacacgccaaaccgccacttaagccggaaaagatattgtcgaaacgtcacggccatgcctccctttaaaagcacccatttaaagttggaaaataatggttttcaccatgctgtccgtattaggcacaccgcttcatcgccagacaatgtttcatccaacaccaagcgttgcagccaattttcacttaattatgagtcttttctgagcaagattagaatacccaaataatagcattacattttcggaaaaacaatcgcaccattagcgttccccctgccactctgctttaaattcgtccaaaaatgacagcatcacttgctgccgatgctcagcaagctgtttggctgccgatgtattgagctgatcctttaacttcaacagcttttcataaaagtgattgataaccgtgctgtcttttccccggtagctgcttgcggtcagggtcgttcttggtgccagtgccggatcgtgcatgcgaccaccatgcgcaccggcgtacataaacgcgcgcccgattccgatcgcaccaatcgcgtccaaccgatccgcatcttgcaccaactgtcctgccactgataacggttgatgcttgcctaaatttgctttgaacgacatgtggtcaataatttctgtcactgcctgaatctgcacctgcgtcaacccggccgcggccatcgcttgctgggcggctgcttttgctgcgccgacatctgccaccaacttatcgtcataagtatcatgcatggttgccgcagccacgacaaccgttgcatcaacgcctgctgttttggctactagttgttttgcattcgccaccacccgttcaatatgatcgaagccatgcccgctatgatcctgcgatgaaacttttttcgcatattccgtcaatatttgccagtcaatcacgtttcaacactccttagctgataatcatcaaaaattaatgtgatgccatgaacaatttaactagttatccgccctaattgttgcgccccttaacctcaagagttcatacttaaagtataaagaggttatgtaaaaaagggggaacatgacgatgaaaaagcaatatttgtcggccagccagtcggtcaaccaatttaatcggcttttttcaccggtgtcaacggctgacattccattgaatcaacaaaatctgctcttttggatggcgaccgattcgacacctcgaacaccaacgaatctggccaaagaaatgcacgtcaccaaggctgccattaccaaagcaagcggtccactgctcgaacgcggcctgctcgacaagcaacccgatcccgaagactgccgtagtttcaaactcgtgctgagtgaagccggcgaaaaggctgtcgaagacttgggaccggaatatttaggcaatctcgagcgtctgtacaatgagttaggtgaaaagaaatacctcaaactcatcaaactgctcagccaagcaaccggcgtcacggtaaaagaatagttcgtcacccatatttgtaaaatcgcatacgccttacgcatcaccgcgtaaggctttttggcatattccgataaatttgatgcttttctcagctgcgttacaataaactcatcagccttttcaaactgactcaccgaaacgttttgtctgccaaaggagcgtgttgcaatggcaattccagatcatatcagtgttcggggcgcgtatgtgaataatttgaaacatctcaacgtcgatattcccttaaataagctcgttgcgatcaccggccgatccggttccggtaaaagctcgctggcaatgggcgtgctgtacgcagaaggcatgcgccgctacatgagtgcgctgtccacttatactcgccgacgcttaggccaaaccagcccggctgcggcagattcggtcaaacatattcccagtgccattgcgctcagacagcggcctgttgttccgggaattcgctcaacagtcggcaccgcaactgaagccctcaacgttattcgcctcatattttcgcgtctgggctcccctgtttgtcccaatggtcaccgcgttccgccgacacttgatattgccaaagcgatggatctgcctaatgatggcgaaagcggcatggggatgatcacctgtcccacatgcggtgtccactttatggcatttgcggctgaagattttgcttttaactcgaccggtgcctgcccaacctgtggcggtacggggcaggcgcggacgctcgcggccaatcgcctcatccctgatccaactttgaccattcgccaaggcgccgtagcatcatggcggcttccgggacgtaacttcatgccttatgtggctcaagcaatcggtattgacattgacacgccttttcaagacttacccgaagaccagcaagaacaggtgtggcacggccagcgtaaaaagtacgcgatcaacattccaagcaaaaccggcaagatttttcacatggatcacgcccaatatgaaaatgcttttaatgccgttgaagattcgctagccaccaccaaaaacgaacgggcaattgaacggttaaatcgcttctatgaattcggcgtttgtccgacctgccacggcagccgattcgcacccaaactgttagcccagcatctggtcgatcaaaatatcgctcaagtcagcgacatgacgctcacgcagctaactgactttattccgaaaatttaccagtggctgccagctaacatgcaagccttggcgcacgatattatcaaagagctgacccaactgctcaagccgatcatggatctaggcttaagttatctcacgttgagtcgggccgctgcttcgctttcaaccggcgaattgcaacgtattcagcttagccgcaccttgcgcaccgaaacaaccggcgttctctatgtccttgatgagccttccatcggtttgcacgctgccaatgtcgccggtttattggaagtcatgcatggtttggtcgatcaaggcaattcgttagtcgtcgtcgatcacaacaccgccatcatcaatgccgccgatcaaatcatcgaaatcggacccggtgccggagctgacggtggccagattcttgatcaaggcagcccggctgaaattagtcacgatgccaattcgctaatcgcaccgtttttaactggcaaaacgcctttaatcgtccgtccgcaagccggcagtgcggccattgccaaggccaagcagttgcagctcacggtcacgaatcggtttaatcttcatcatctgaacgtccaatttccgattaattgtttctcggtggtgtccgggttctccggtgcgggcaagtccaccttgattttcgatgcgctagtgccggcactttccgcaaccaaagatcagcctgctcccacgtttgttcgcaatctaaaaaccggtggcattcgccatgtggtcgccattgatgcaacgccggttggcaaaaatgtccgctcgacggttgccacctacaccgatatcctggatcatttgcggcatcttttcgccagcttacctgctgctaaggacaaacaatataccagcagccatttttcttacaatgtcaaagccggcgcctgcccaacctgtggcggcaccggggttatcaatctggacatccagtatctaccggatatgcaacaaacctgccccacctgccacggccgacgttacaatccagaagtgctgaaaatcaaatggcacgagcggagcattgcggatttgcttgacctcgatgtggacacagcactcaccgttttcaaggacgaaccgaccatcgtccacaccttacaaaccttgcacgatatgggtctgggctatttgcatcttggcgaaagcacgccgacgttatccggtggtgaagcgcaacggctcaaacttgttgcccacatgggacgctcgcaaaaagacacgctttttgtcttcgatgagccttctgtcggcctgcatccgcttgatgttcagaccctagtggcggtgttccagcgactgttgcaaaccggcgccaccgtcattgccattgagcacgacttagatgtcattgccaacgctgattacgtcttggacctcggaccaaaaggcggtgcagaaggcggacacgtcatagcagccggcacgccgcaagccattgccaaacaaggtcatggagaaacggcaaaatatttggcggcgcatcttgctgcttttcatgtggattgagagcaccagtaaagtattgtccctcaaaaataaaacggctccggagtcaaaaaatactccgaagcccttttttaatgcttatgcttagccttttacagccaaacgtcaactaagcatttaaaatatcatcaatttgttgaatctcttcagcagtaaaggtcagatgttccgttgctttaaggttatcctgaaggtgttcaactgaggtcgtcccaatgatcacacttgtgacaaccggatcccgtaacaaccacgccaaggccatttgactcagggtctggtcgcgatcatgtgcaatttcattaagcgcatttagttgcttaaccacagcctctttgcccttagcaaaagtggccttgttggttggatggattttgaaagtatccggaattccctttaggtagcgatctgataacaagccttctgataacggtccgtatgcaatcaacccggcaccatcagcttttaatgcatcgatcaagccggacgtttcagcggtgcgattaaacatgttgtaactgtattgattcagtacaaaaggcgtgtgcagatctttaaacatcgcaattgcttctttggtctgcttcgtatcatagttggaaatgccaatatacaatgccttaccgtcacgcaccgtttgatccagtgcattaaccgtctcttccaaggccacggtatcgtcaaatcggtgggcatagtaaatatcgacataatctaactgcaagcgcttgagtgaatcattcaagccttgaataactgctttacgcgacgtcccgacaccgtacggaccagggtgaatctcataacccaccttggtactaatcaccaattcgtctcgatacggttttaaatccgtggccagaatctgccccagtaacctttcactagagccaaatcccggttcacgatcaccattaccataatgattagcgacatcaaaatgaaaaacgccacgatcaaacgcatccaaaatcaccgagcgtcgcgggccaaatggatccaagttgccataatgctgccacaatcccaacgaaataaccggcaacatcaaccctgtcttaccggcatggcgaaccggcattttctcataacgatcagctgctgcatgatacatcattaacgccctcctcaaacgaccgcaaaataaaaacgtttaccatctctatggtggcaaacgtttcgctaacaatcaaccagaaaccccactttttacggaaaaagctcacttctcaaagaaatccgttaaaaagtttgccacgccgtcatccacattagtatcagtgacataccgagcaacgcgtttcacttcaggcacagcattacccattgcgacactgatcccggcagcttgcaacatccctaagtcgttcaaaccatcgccaaaagcaatcgtgtgcgcagcgtcaatgccggttttcgcctgtaattcacgcacggcattggctttgtcaatgtgcttaggaatcaattccagattcgtgtgttcagacgcagagacatgcaaaacgttgcgtgcctctaatgcggtcttgccagctgccaatgcctgtgagtcactcggtccgaaaataatgccattcgtgatcgttgcggcgtgggttaataatgccgctgctgacggtaaagcaaccacctcgatcgcgactgaactcggtgcaaaccgccgtgctgctgcttcaatcgctggcggcaaggtcccggtgaaataaaccgtgtcatcgctgaaatacaacgcattgagtccaagatcggttgccacttcttcaaccgcagtcaacgccgctgcacccaacgtatgatggacccgctcaccggaaaagtcataaaccgcaccatttgacgcaataatgttggcataaggttgaaattgatgggctaccacttctgccagtgcatgcatgcgcccagtcgcaacgtaaaacgctgctccggctgtcactgcattggcaattgcctgcgttgtcttttcggtcacgtcatgatgattggcagtcaatgtcccgtcaatatcgctgacgattaaatattgcgtcataatgttcctttcttgtctgtaaaccatgctgcttaccgtttagccgttgtagatcaaagtgctgatgataccaaatcagccatagaaactggattcgtctctatggctgatttaagcctgatctgcctgccatctaaaaatcgtccgaaaacaatgcgctacttaatgacacccagcttcatgcgcttgattaaagtccttgcggcaagccttcaatttgatcggcataccatttagcccatggtgtttccggcgccccttgagcgttgaatgtgacattgacctgtttcaaaagatccaacaagttgccagaacgatgtgtcagtaacccactcgttaactcctcacgcgtcaacgtgcgattatcaagaaggtagtggttaatatccgccaaatctccttgctcatctagttgagaaaaaacatcgagcccgtcaccaaagaaccgactcaggtaaaacttagcaaaagtctcaagcgctgtcttttgtgctgcttcatttaattgatcaatcgttgtgttgctagttgccatgactaatttcgtcctttctattttattccattataaccactttttacctgcttttggaaagcaaactggtggaagagcgcgagccggcgcgcttagggatcggaatgtaagcggccttgggcgtgatggcccgggcttggccattgcgaccaaggtccttacattccgatccctgcgccggggagcgcgtttaagagcgtgaacaggagcgcttagaaatcggagtgtaagtggcctcagacgtgatggcccgactttggccattgcggctgaggtccttacacggagatttctgcgactgtgaacgcgtttaagagcgcgagccggcgcgttatggtgtgccttacgcatcaaagtcaagtacctaagttcaaaaaacatataaatatttttaactttttgaaactttccgccttttgtaccttgatattgagcaacagttgttatagtatgccacttatgttgggaattcaggaaaggttggaggcattatggaaaaagaaaaattacatcttggtgacgcggtggtctgtcaggttaaagaagacatggaagctcctttcaccggtaaaatcgaaaaagtctacgaaaattcggcactcttgacgatcactgactacgctgatcaagaccgtcagaacgcgtcagagcttaattttaaaattgttgcaaacttccacgctatgaccaaaaaccttggcggcggaactgtcttggcctttccaccagaaacagaagaagaccgaaaaaaataatgacccagatcacattcaaccagcttcaggccgcatgactcgtgcctaaactggttgttattatttacttagtcattaactcataaaacaaacaaagctttcctggcgagtagattctatgctcgccgggattttttttgtttaaggtcaaaccgttttcagcttagaacaaacttaatttcaaacatcaccttcaaaacggtttaagcttaaaagtcactttcattgtcagctggtcaaacttgcgtagaataaaatcaaatagtaagcaaacgaggcgaccataaacatgcaaaccaccacttaccccattcacgaacgcctgctcatcggcaccttgctcactgctgctgccggcagttttgatgcgtatacctacttgttgcacggtgaagtctttgcgggcttacaaaccggtaacgttattttgctcggcgtccatcttggccaaggacagtggcacacggcaattcgctatctagtacccattctcgcctttatgtttggcaccatggctgcacgcgccttgcagctacacgccagtcatcgcccccaactgcttgccgaacagcgatggatcctccgttacgaaattgtatggcttttggtggtcagcctcctggggaagtggctgccggatttgttggccagcgctatcgtttcagtgattgcggctgcccagctacaagagttccgccgcttaaaaggtggtccgttcacgtcactgatgatgaccggtaatttacgcaccgccgcgcagagcctgtatgacggctttattcgcggacaacaaaaaggccgcgcatccgcagccactgttggtacgatcatcttgagttttgcccttggtgccggggtcacgggtatcctgacccatgctatcggcacctacgccttagctggggctacgctggtgttgattctgattgatctattgctttggcgcgatcagaaaacattgccgcaaagtacggtttaaccaagcgcttcttgcccatgatgcagaaaacttagatcgttgaagtccgtcacccgaaagcggtcattaagccacattaacttggtgacactcgcattatccagcatttcgcggccatcaatgttgtagtggatatagttcaaccacattaacgctgccgttccgtgtgacaccaccaaaacgcgttcccatccctttgcctcggcttccacggcaatggcccgcaacgttcggtccaaccgctcctgcaccattcgattggtttctgccgggtttggatgctgatccatattagccgcaaatgccgcatcggctgtttgcgctaacgtaatttcgcgattggctaaagcatcatggaagttggcaatgcccatcgtcgccagcgaaaagtcatttgccagttgcccttcgaacttgccataattttcttcacgcaagcccatgagtcgcgttaccggcagcggttcacccaaaccacttaaaataaaatgtgcagtatcgacagcccgcgtcaagtcactcgcaaacgccgcatcaaaatgcacccctgccagttgaaagccgcgtcccagcgccttagcatccgcgattccttttggtgttaaggccgagtcagccatcccttgaacccgtttttgcacattgaattctgtttgcccatgacggacaagatatagcgttgtcatgatcgcaatcccctaattttcatttatttccaagtcatcgtcattaagccagttttaaataatccgctaagtaatctgccatcccatcgtgatcgttatcgcttggtgtctgcgcgtctgccgcttcaagaatggctggacgcgcatttttcattgccacgccatgtccggcaaattgcagcatgtccaagtcattcatatcatcgccaaacgcaatgatatgtgcctgatcaatgccataccgctgggcgacatacgccaacgcccgtgacttgctcgtatttcggctagtcacttctaacgccgtatagtcgccactccaagcgccccaggttttggctgccaaatgcggatacaaagccgccacttgttgcgaaaccggctcaaacgtcttagcttccataaacatggtgaccgaaatcggcgcctgacgcaacccatgctcatccaataaagcatcagggtgtaagcgatccggcaagaagggaatattggcataaggccggtcagccaccaatagtcgcttaccttctgccaccatcactttaaaggtaaagcgttggctgagttggcgtaacgataacgcaaccgaaatcggaattgtcacttctttttcatattgccactgctgatgcggcacatgaatcaaggcgccgttgaaattaatcatcggcccctgtaagtgtaacgtatcataaaactgttcggaaatcgcatccggccggccagtcgtgatcacgaccaaatgtcccgctgcctgtgccgcccgcaaaaccgcgatcgtgccagcactcagctgaccttcagtgttgagtgtcgtaccatccaaatccaatgcgataagataacgttccatgcagcagcctcttttcaatctttttttaaataaacaaacatagccattaccaccgcattcccctacaatagatagttagaaagcgagggtatcatggctgaatcaatcgtactatatactgacggcggtaatcgcaacaccggcaatcacgcaggcggctcagttcggcccaccgacaaaagcgcgtgggccgcattactgatctacggtgagcatgaaaaaatgctctctgagggcgattacggtcggaccaataattatatggaaattatggcggtgattcaagggctcaaggcgatcaaacgaaccgatattccgattgacgtttactccgattctgcctatgtgatcaacaccatgcaacaacgctggtgggtcaagtggcagcaaaacggttggcgcaaccacggcaaacctgttaaaaatgctgaattatggcaagcactgctccaccaaatgaaccgtttcgatcaagtaacctttcataaagtcaaaggccacgcaaccaaccgcaataacaaccgcgttgacgaggcactgaaccaaacgatggaccgcctggatgatcgcacctgatcattttacccttgattgccaagaaaagcttccccataagtttccgccaaaaatgtgtgaatcacctgctgcatccgctggacagaaggtgattttttgatggtcggattaatcaccaaacacaaggttcgcgcgaacggttcggaaaaaggatacacattcacatcccccaccagcttctgcaacgcgagcttcggcaaaattcccaagcccagccctgattccaccatggatagaatactttggtcatcaatcgaatagttgatcgtgttggtcgacacatgataacgatccaacgcattcttggtatcacgatcatagtcaatttgttgcaaaataaaattccgcttctcaacatcggcttgcgtcacggttttgccgtttttaggcttgaagcgttttggtgtgatgcagtagatcggatcttttaacaacggctcaaccaccaccccgggtccaaccggcagcgatgaaaagcccatgtcaaccgtacctagtcgaaccgcctccacaatgcggttgaaggtcccttgaataacactgatttcaatgtgtggatagcgcttcttaaaccgttgaataatcgtcggcagccagttagtcgaaaccgacgaaaacgcgccaatccgaattctgccggtattgacgccattgatgttatcggcgacttgcgacagttgctcttcaaggttctgaatactttggataattggcagcacctgggccccatcttccgtcaacgtgacgccggtacgattccgaattaaaagtggaaaccccagctcggtctccagctgactgatactatggctaaccgcactcggcgtcacatttaattccgccgctgcttgggctaacgtgccacgttccaccactttactaaagacttcataagaaaaattacccatgttatcacttttcccttttttatacttggcccaagtgacacgcgttgtcacttgagccgcacaatgcctgtcaaatggacgctgaggcctgttcgttgattttaacatgaacaaaattcaacttaagctgaaatagttgagctttactcaatcatacgagccgttttacactagtgtcaataagaaaacgttggttgaacttttaccaacgcgacaacggtatcgcaattaacgtgtggatcggcatcaggctcggttacacgcccgatatcaaagggggattcatcatgaaattcgcaaaacgtacccaaaaaaccggcaattccggattagaagatctgttcgccgcgtctggcccgaatgtcatctcgtttgcaggcggctacccggatcggagtttgtttccgacccaacaactgaatcaggcatttaagcacagctttaacagtggcgatactgaactgttgcaatacgctagcactcaaggctacttgcctttacgcgaaaagattgcggctcggctgcgcgcaactggcattccgactcgtgccgataacatcatgatgacccaaggcgctcagcaaggactcgatctagtggcgcgcctcatgcttgattcaggcgatggcctagttgttgaagcgccaacgtatctcggtgccttagccgcctttaatgcttatcagccaacttattatgaaatcccgatgcaagacgatgggatggacattaatgccttacagcgcgttttaatgagtcacaaagtcaagttcatctatacggtacccgattttcaaaatccaaccggcgttgtgatgtctgtggctaagcgtaaggctttgattcgactcgccaaccaatatgacgttatgatcctcgaagacaacccctaccgcgatcttcgctatgatggtaagccgctgccgaccattaagtcatttgacacgcaaggccgcgtcgtctatctcggcagcttcagcaagatcctctcaccaagcttacggatgggctggctcgttgctgcaccggaccttttgcaggaattactggcgttaaaaggcggaagcgacttggaatccagcaacctgaccatgcacggcattgatgcctacatggcggaaaatgacctagatgcccacatcaccgaaatccagaatcgttaccgcgaaaagaaaaatgccatggtcgcagcgatgaatcgttaccttcctgatgaagcgcacttcaccaaccctgatggcggcttcttcctgtggctcaccatgccagccggcttcgacatgggtgccttcatgaagcaacatctgttaccggaaagcaacatttcctatgtgccttccgccaacctatatgcaacttcggctcaggtcaacggcgcacggctaaacttcaccggtccgacacttgagcagatcgacactggtatcaaagcattaggcgatgcacttaaaaccgcgttgcagcatcacctagtagccgaacaagcttagttttcttcgtcttaatctactcaaacttttacaaaatgacaaagtaaccatcacactttcgtcacactttgtcagtagtataggaaacatagaaatgagccacccactcatctctacaccccaacctaattttcatttttctcctccaaagaaaaataagatgattggcccccatccaatcatcacaaaaacgcccgctgccaatacgcaacgggcgtttttgtatcatgagcgcgagccggcgcggttagggatcggagtgtaagtggccttgggcatgacggccggcactttggttattgcgcctggagaggttgtacaaggttctaggctagcaaccgcgttatggggagcaacggcacctgcatccaaatcagcattcacgcttaaaacgatggtattcccgagaaatacttattagcaatcgcctcagccatgccttccatgtcaaacagtaccgtccgctgcgctaaagtgagctgatactgatggtcgcgcatttcgtctctaatgaaatacccgattggcaagacttgtggggcaatattgactccttgtatccgtttatccgccaccttatcaatggcctgtttgatacttgcaacaatagcttgcgatgtcgcatcggattgtttctcgaaaagatgctgcagttctagcatctttgcaatgagttcttgtttcttttccattttggctcaccccttcatttgtgaactgatcgtgtcgaataaacagcttgccctagccgtgccttggtatgcagcatacatgagagcggttgcaatcatcttagattgccgtttttgatttggcaagcaataatgcttgtgctttttgaagattgtttgacgaacatgacacttgaacagtcactttgaaaattaaaacactccaaagacaaaatgctttacgagaacaattttccagcatatgctatagccaatttcagacaactatgcacctgtagattctatagtccatttttctatgcctcgtttactgacttaaaaagactaataaacgttcaattgcaaagagaggggaatgatcatggaaacattgtataaaggccaacctgctgatgtttgggaaatcaccaaaacaggcgctcagccagattgggtaaaagatgcattctcacaaaactatctttattggttggataatcgggttcgtattctcatgtgggcgttaaccccacctaacaagaagaatttaaagttcgttgctagcggttcacttggaggtggcgttgatgcactgggtgtttacgcatacggagattcaggtgacttcttggatgcaaccaatcaacgcgtggtatctcgggaaagattctttaagcaatatcaaattctaaaatccaacgaagcataaccaattaaaggcgcgtgtattaacgtttgttgacatgactgtattattgttctgttggttcacccgaattcaagatccgtgataggtgcaaccgtgatgaaagtttttgtgaacaatcgcttggctcttttcctatcaagcaaaagccgcaaccagactcacatcatgtgtaagtctggttgcggctagtacgtttacgcatattttaaactaaacggtcaaccccgaagctggatggatcatctttcttatcatccggctttttgtcagttgttggtttctcttcaggcttcttgtcagccgttgttttctcgtctttagcagtatccttcttttcgtcctcttcttttggcttcggtgcggactgctcgcggatcttggcttcgatttccttggatacttcaggatgctcatccagataatgagacgcattgaccagaccttggccgaggcgctccttaccatagttgtaccatgagcctgatttggtgataacgtccagatcgttgtctttatcagtcgctaagttgatcatgtcagtattgtgctcgatcccgtgcccaaacgacatagtggtttcaacggtcttaaacggcggtgccaccttattcttggtcaccttgagcttgctggcaaacccaacgacattcttaccatctttaacctgctggcctttgcgtacttcaatgcgcacagaggcgtaaaacttcagcgcccggccgcctggggtgacttccggattgccaaaaacaatgccgactttttcacgtaactggttaatgaagatgaccaacgtattcgtattgttaatcgttccggccatctttcgcagtgcctgcgacatcagccgtgcttgcaagccaacgtgactgtcaccaattgcaccctcgatttcagcctttggcaccagcgcggctacggagtcgatcacgacaacatcaaccgctgccgattcgatcagcatctcggcgatttccaatccttgttcacccgaatttggttgggaaagcaaaaggtcgtcaatgttcacgcctaactcggcagcatactttggatccatcgcattttccgcgtcaatataagctgccttgccaccggttttttgtaattcggcaatcgtctgcagcgcaatcgtggttttcccactactttcaggtccataaatttcaacgatccggccccgtggtaagccaccgacaccaagagcgagatccaatgacagaatcccggttgagaccacatcgatcttcaactccggtcgatcacccatcttcatgaccgcgccttcaccgaacgccttggtaatcttttgcagcgccttttctaattcggtttcacgatctgtggcatcagactttttattatcagcttttgtggtcgtttttttcgccatacttgtctccttaatgtcgtacatacttcgctcaaaatacactagttacattatcgaacacgcgtttgttttttgcaagtcttttccgtgattgaaacgccttttctgcactttaaaacggttatagttctattttacctgaaccagtcaaccaattggtaaaaacctgccgttattgatcgccgtaaaacatgctatgatagttcggttaagagcaaccagcattttgaaaaggtgagggaaaatacatgatgttcatgggttcaatcgttaatggcttaacgattatcggcggcagtttactagggctgatcctgcacaatatcagcgccaatgcaaaggacacgattacgaaaagtttgggtctgggtacctttgcgcttggcattcaaatggcgttgcagaccaaaagctttattgtgatcatcatcagtctctgtctcggtggcttgctgggcgaatggttgcatattgaagacggcatgaatcacctcggtcttaagctgcaggaacgcttcgcccgcaacaacagccattttgcggaagggtttgtcaccgcgactttaattgccgtcatcggtgccatgagcattttgggggccattcaagccggcgtgtccggtgataatgcgaccctgtataccaaggcggttatggatggtttcatggccattatgatgaccgcctcgctaggcatcggcgttttattttcggccatcccggtgattttatatcaaggaaccatcaccttgttagccagctttcttgtccagttcatccccaaaacgttgatggcaacctcacttcgagaaattggtgccattggcgggttgatgatcctcggtatcggcctgaatctcatgggcatcaccaaaatccgcatttccaaccttttgcctgggctagtagtcttaattggcattctaaccggacaatattttctatcataagtcagtcgcaacaaaaagcaggtcaccatggcctgctttttgtctgaactttttgttgccatcttagaagttcggcagcagtcgttgttttcgactctgaaagcgatgatacaccaacttgcagtgcaaatcgcgaacatttgccaaaaaatgcgagttggcatcgtgataccaatagcgtaaatcatctttgatatacaagcgattcaaccacgcgtgatcgtgccgcaaaaacgtaaaactttctagcaaatcctgttcgcgccaaacatcaggcaacaaaaactgactgcgcgtaaagcgttttaactgacggcttgaataatagacgcgctcaatgcgaccaataaagaaagccgtcttccccttgcccacgtacggtgccataggtgcaacaatcaatcccccgcgtaaccgctcaaaccaatctgtttgcggacttactttgattgcatgcgtaatatctttgggtagccgaaagtccaaaaccaaaccatccgggcgccgtacccgagccacaatatgctgtttcttcacattaacaccccatcatcttggccaatttaggccacttgagctgttgggaagagtttaccacgaaatgttcggatttgcatgaagaacgtttgtttcgttaagtaacgttcagccaaactaacttcttaagcaattccaagccgatttggaaaatgtgaacataatcgccataaagacataataaaatgttggatttgccttcacaattcattcacaccctgtctgtagtataagaaacatagaaatgagccacccactcattcctaaaccccaacccaactttttcatttttactcctccaaagtagaaatcgtcgatcgtcccccaacgatcagacagtaaacagaccgcccacccagcggtctgtttttgtgtgagcgcgagcaggagcgcttagcaatcggagcataagtggccttgaacctaaatggctggtctttggccatttaggttcaaggtccttatgtgcagattgctgcgactgcgagcgcgttatagaaagcagaataaagccaccgaattgcccaaaaaagaatacttctgtccctgctgcaattttccatccataaacaccggctttggccatttaggttcaaggtccttatgtgcagattgctgcgactgcgagcgcgttatagaaagcaaaataaaacctccacattgcccccaaaaaaacacttctgtccttgctgcaattttccatccataaacaccggctttggccatttaggcttgaggtccttacacgcagattgctgcgactgcgagcgcgttatagaaagcagaataaaaccaccgaattgcccaaaaaagaatacttctgtccctgctgcaatgtttcatccataagaaacaccaaaaagaaaagcctcccgacaccatcgtcaggaagcctttcttttttaccacaaactcacaccttaccgcttaaacaattcatacaacgcatccggcgtcttcgcatcctgaaacgccttcacaaaatcctcatgcgtcagtaacttcgccgtactcgacagatatttcaagtgactgccactatcatgttccggaatcaggaacgaaatcaccgcattaaccggcttcccatcaaatgttttccattcgactggctgagccaaatgcaacacgagcatcgctgaacgtttaatcgttgcgtcttgtgcgtgcgggatggcgatgcctttttccatccccgttgagccttctttttcacgcgccacatacttgttgaacacggcatcggcatcagttgccaagtcgttttttactgccatattagccaaataatgcagcacatcatcccgcgttttggcaggaacattgacttcaatgtattctttgttcaaaatctcgctagggtcaaaagtttgctgggattgatccgcatctggagccggttgattgcgagctgatgaaacggccacgtgcgcaaccggtacgtcatctgctgccccttccgttgccaacgcagcttcaaccacgccgcttttgacgccgcgctttttggcagagtggccggcaatcatggccaaaagcacacctgatgctgctgcaccgactaaaatccaggcaacccatagaaccggcttattcaccagtggcaaaacaatgaatccaccatgaggcgccggaacctgaatccgggacatatacgttaaaacggcagcaatcgcggagccaaccatgaacgccggaatattcattaacggatttttcgcggcgaacggaatcgccccttctgtaatatgggttgaacccagcaaagcattgacatacccagcgctgcgttcatcacgattgtaggctttgggattgagtaataccgagattgtggtagccagtggcggcgcaatgcaggctgctgaaacgccggccatgaagaaataattgccctgagccaacaatgccgtcccagtgagatacgccgccttattaattggtccaccaaagtcagccgcacacatgacaccgacaacaatgcctaaaataatcggactggaactttcaagcccttttaaccacgccattaaaccgagattcaaggctttcatcggggtattgatgagatacataatcgatccggcaatgaagacacccagtaccggatatagaaaaatagcttttaatccccgaaattccttgtcgggcatgaaggcgaacactttttgcaacattaaaatgaccagtccggccatgtaaccaccgacaatcgcgccaagaaagccagatccttgaccgccattgtaagcaatcatcccaaccgccatgccgacgattaagccagaacgtttggctacggcttccccgatataggccgccagcactggcaccatgagtcccatggctgcactaccaaccgaattcaacatggctgcgaactgattgtattcagcattcttaggatccgccgaataaatgccccagaaaaatgaaattgcgatcaatacaccaccggcaaccaccagcggcagcatgtgcgaaaccccgttcattaaactggtgtaaatcttgttaccaattccggctgtactggtttcaacgttttcatccgcgctagccttggccgcaccgcctttaggcatataaaccggtgcgctgctcaacgcctctttaatcagtttatccggttcgcgaataccggccgcaaccggcacattaaccagcggcttgccggcaaaacgatccgcgtcaacgtcaatatcagaagcaatgacaacgccttttgccccatcaatttctccttgcgtcagtggatcatcgacaccggtttgaccgtgcgtctcgactttaatggtcaaacccattttcttagccgcttgctctaacgcctcttgtgccatataagtatgggcaatccccgtcgcacaaccggtcgcagcaattaaatcatactttgccatcagctaaccctccagtttcttaatctcaatttgcgtcaacaattcatccgtctcagtaaaatccgtaatccatgcgcgccgggccgtatcactgcccgccgcaatcgccaatttcagcgtgtccgctagatcctgcttttgataaaggcccgctaaaaaggtccccagcatcgtgtcaccggcaccggcagtattcaacacgtcaatctttggcgcgtttccgaccagcgtcacatcctgattcataaacaaggctcccgccgcaccgagtgaaaccaacacattttgggccccagccgctaacgctttgtggcccaacttcaccatcgtcgccaagtcggcttctccggattggttaaaccaactcatcaactccgcatcattcggcttcaccagtaatggttgataggccaaggctttaacagcttccggatacgaactgtcgataatcaacgcaaagccattttcccggctcagttttcccagttgcaacaaaaagctcggctcaatgccgcgtgcaaaactcccggaaacacaaagccaatcgtcagccccaagagtggtcagttgttggtataattgttttaatgtttcggcgctaatctccggcccggggttcactaacttatactcgttatgatcactgacaacgcgggtaaacacgttaatccgcgtgaacccggcatccttgtaaaagtgattgcgaatgccttgctcagtcagaaaatccgcaatgtaatcaagggtaaagccgccgccaaccccaagcgcaacgttatcaaccccgcgccgcttcaagatgcagctcacattcacgcctttaccatttgcctgaatgtcataactgtccgttcgattcaccgtattcggcgccatggtctgagttttaataaaaagatcaattgctggatttaacgtcaaggtataaatcacattaagcgctccttcatgtcgtttcttttacttatcaccatgttaaccgctttcaaccgaaaagagttttctgttttcagtcgttttccggattaagcgaaaatgcttttcatctgcatcaaccccactaaacaaggaggccaccctcatggctacactcagtcccacagaggcttatctttgggattacatcgagaatcaccaacaaaccgtcgtcaacttatccatcacccagttaagcgtcgcggccaacgtctcaccggcaaccattgtgcgcacgatgaagaaaaaaggcttcaacggctacaccgaatttcggcatgatttgctaaaacgcattggcgacactgaaccattcggcatcctcgatcaggtggatgatcaaattaaaaaagtgattatgcaaaatcaaattgaggtttataacacccttgataatctgaaagtttctgtcattgaggactcggttcaactactcgccaaggccgagatcatcctcatttttgcgcgcggcctatccgaatcaatcgcctcggaagtcactttgaagctccagttgctgggcaagtatgctgaattcttcagtgatcccaacatcatccaaaccatcgccggtcagatcagtccgcatgcagtggccatcacgatcaccttaaacggcgaaaccccggaactcgtcgccgctgccaaaacccttgccgcccgcgacattccgcaaatcatcctgacgaccaacgcccaagcttcaatcgtcaagtacgcggatgaactttttgtcggctataaatcaaaagccgcctattttgacaaatacgaggtggcttcgcgtctgccgttacaagttatgagccgcattttgctggatagttatgtggtgcgaaaacggggacagaaaaattaaatcttcggtatgtaaaaagcaatccctttggcctatacgacgagggattgcttttttctgcttattcgttattggcagtggatgtccgtggtaacggccggtgcttgaacatctgcgtggcggcgacagcctgttgccaaccggcgtataaattctcccgccgcgccggtgtcatgcgaggttcaaaccgcttaccaatcttgaaaatctgtttaagttcatccgtatcctgccagaagccgactgccaaccccgctaaaaaggcagcacccatggcggtcgtctctaaattggcggctcgttccaaaggcttattcaggatatccgcctgaaactgcatcaggtaatcattgcgagctgccccaccgtcaacgcgtaaggctgggacggcaatctgcgtgtccttgtacatggtatcaaccacatcacgcgtttgataagccaaagcctgcaacgtcgctttaataaagtcgtctttagtggtcccgcgggtcaagccaaaaactgccccgcgtgcttcggcatcccaatacggtgcccctaagcctgtaaacgcaggcaccacataaacctcatcatcactagtggctgcctcggctgcttgctgggtgtcaggcgattgcgccaccaaccccatttgatcgcgcagccactgaatcgccgagcccgcgacaaacaccgagccttccagagcataattaatctgcccgttcacgccatatgcaatcgtcgtcaacaagttattagcagacattttcggcttatcgcctgtattcatcacaataaacgagccagtaccatatgtattcttcaccatccccggcgccaacgctaactggccaaacaaggcgctttgctggtcaccggccatccctgcaatcggaaccgtgctgccgaagaaatgataagccgcgccagtaccgtaaatttccgaattactgcgcacctcaggcaacatggcccgcggaatatgcagcaactgcaaaatttcgtcatcccaatccaacgtatgaatgttgaataacattgttcgactggcattcgtgtagtccgtcacatgaatcgcgccgcctgataacttccaactcagccacgtatcaatcgtgccaaacagcaactcgccattttccgcgcgctcttgggctcccggaacatgatccaaaatccagcgaatcttcgtagcggaaaaataggcgtcaatcagcaagccggtcttctcatgaatcattttgccatgaccagcctgccgcaacgcttccgccaacgcattggtctgccgtgactgccacacaatcgcatgataaatcggcagccccgttgtcttatcccaaatcaccgttgtttcacgctgattcgtaatcccgagtcctgcaatttgccgcggctgcaccccagacgaaataaaggtatccgcaatcgtcgacaacaccgcttcccaaatctcattcgcatcgtgctccacccagcccggtttaggaaaatactgggtaaactccttttgcgcctcgcccaccatcttgccagcatgatccaaaataaccgcgcgcgtactggtcgtgccttcatcaatggccatgatgtaactatctgccatgtctacctcctgctttgtgtccgctttcacttcagtatacaggaactggtgaatgaggttaaggttcgtacaatttgaaaatcaaccgcttaagttcaatattaaaatcccgtccttttagcacttaccgtttgatcgcttaatattgccgtcttcaatggcaccatgctataataaaacacgaaagggagcatcggcgtccaccgatactcccctgacaagaccgttcaagacggttggcattaaatttgactaatcaaaaagaccgtcatcttagccaaaagattagcgacggtctttttgattgtcttgtattatcagcataatggtgatgatcagcgcaatcaacgataatacgaaatcaccgaagaccagcatcagcatcaacgcatcagcaacagacaactaggcacctccttccgtatagattttgatcatcacgcataggcgaccacctcacaatacgttggatttgccaaccgtcattcactttcttgtcttgttcatgatgccatacaaaacgtcaaaacgcctgctatctcaatgatttcaggcgttttttaaatgaactgaacgtgactcaccgttttaggcttaattcttggagcgcttagcattatcggtaagtcattgcacatctcaataactgtttgcaaacctgcatggctatctatgcgggttttatttttctttttaggagagagccgaaatatatcaagccggcttttagtttttccctattgtcaactcattcattttgaccagcctcgagttacatatattgactatttacaagtcagctgtcattaacgatcacaactattaaaaaatgtcattgtccttttcttattccattcaggcataacagcattcaaaactcgaattgaaaaggtttccaacccagactagcctagattttgaaatcaattcggctggttcgctgttccggcctttaggagtgattaatatgacagcatcaccttgggacttaagaaaagtattggatgaactaaaacaggatccgcagcaatatcatgaaacagaggtgcaagtcgatcccgatgcagagcttgctggcgtttatcgttacatcggtgccggtgggacggtcgaacgtccgacacaggaaggtccggcaatgatgtttaacaacgttgtcggcttcccaacgacaagggttttgatcggtttaatggccagtcgcaagcgggttggcaagatgtttcaccaagactatcacacacttggtcgattcttgaacaaagcggttttaaatcctattcaacccgttacagtcgaagaatcagcagcgcctgcgcatgaagtcgttgccaaggctagtgacccggactttgacattagaaaactcgttgcagcaccaaccaatacgccacaagatgccggcccatacatcacatgcggcgtagttttgggttccaatatggccaaaacaatgactgatgtgacgattcatcgcatggttttggaagataaggatacgcttggtatttatatcatgcccggtggtcaccacattggtcattttgctgaagaatatgaaaaagccaataagccgatgccggtgaccatcaacattggcttggatccggccattaccattggtgccacttttgaaccgcctaccacgccgcttggctacgatgaactaggagttgccggagccattcgccaagaacccgtgcaactggttcaggctgtgaccgtcaatgaaaaagccattgcgcgttcagaatttacactggaaggctatatcatgcctaacacgcgtatccaagaagatatcaatacccataccggcaaagccatgccagagtttcccggctatgacggtgatgccaatccggctttgcaagtgattaaagtgacggctgtaacccatcggcgcgatcatcccattatgcaaagtgtcatcggacctagtgaagaacatgtctccatggccggcattccaaccgaagccagcattttacaacttgttgatcgtgccatccccggcaaggtcaagaatgtgtacaatcccccagctggtggcggcaaactcatgaccatcatgcaaattcacaaagataatccagctgatgaagggattcaacgtcaagctgcattactcgctttttcggcattcaaagaactaaaaactgtttggctggtcgatgatgatgtcgatatttttgacatgaatgatgtcgtctggacaatgaacacgcgttttcaaggtgatcaggacatcatggtattacctggcatgcgcaaccatccgcttgatccgtcagaacgaccgcaatatgatcccaagtctattcgggtacgcggaatgagttcgaagacggtcattgatggtaccgtaccatttgatatgcgcgatcaattcaaacgagcagcctttaaaaaagtttccgactggcaaaaatatttgaaataggtgattgaattgaaacgtattatcgtagggattaccggggcatccggaactatttacgctgttaacctgctccagcatttacatcgcctgcctgatgtcgaagttcatttggtgatgagtgcttgggcaaagcaaaacctgtcacttgagaccgacatgaaacaaagcgaactcgaagctttggcggattatgtttatcctgttcaaaaccaaggggcaaccattgcaagcggcagttttttaaccgatgcaatggtcattgttccggcaagcatgaaaaccattgcgggcattgcgatgggctttgatgataatctcattggacgagcagccgatgtcacgattaaagaacagcggcaattgattattgtgccgcgggaaacaccgcttagtccaattcatctggataacctcgctaaactagcccacattggcgttcaaatcattccgcctattccagctttctatcagcatccccaaaccatccaggatttaattgagcatcacaccatgaaactattagacgccttgcatattaaaaccgaaaccgctagtcgctggaatggagcgtcgttaagatgaaaaaagttctcaataaacagagtatcggttttctcatcggcattgcggtgggcctcattgtttacctggccccactgagcggcatcaatgaaaaagcgcaaatggatcttgctttgagtttaatgaccgttgtttggtgggcattccagattgcacagccggcttatattggtggtatttatctgatgctgctgatcttgacgaatgttgcaaccccgacacaggtatttgcgggatcgtggaccaagtcaattatgtggttagtgatgggcgcttatttaattgccggtgctgtccgcgaatctggcctaggtgaacgtattgcctatgctttcattatcaaatttgttcgcagttggaccggtattatcgtctcaatctttgccttaaccttcatccttgctttactgattccgcatccctggccccgtgccttcttgatcatgtccgtgatggatgtggtggcaaccagcgccaaaatgccacaacaggatcgggctaaacttggactagccgtttttgccgcttcctgtcctctttccggtgcttttctaaccggggatacatcgctcaaccccttagcaattgccgattctggcaaaagcgtcaactttgtccaatattttatttacatgggggttccgatgatcattgccgcgatcatcacgatgctgctctttcttttcctcttcaaaccaaccaaaaaagtcacgattgaccttgatgttctgaaagccaagcaggccgatcaaggggcaatgacgcataaagaaattcgagtgatcgtctggcttgtcattgccatcggtttatggttaaccagtggcatcactggtattgacgttggctggttaactttgattgtcgccttgctgatgagtctgccggttatcggtgaggtcttgacggcgaaatcatggtcaggtgttcccgtcaacgttttggtcttcctgacttcggcaattgcaattggccaagtgggtgattttacgggcatgaataaatggattgcccaaacgatcctgccttcagccttaccacataatctctacttactggcactggtcattaccgtttttgcgatgatcattcacatgttcatgggttcggttattgccgtcatgggtattacaatccctgccattatcgcggcaacctcgtcacttggggttaatccgttggcaatttcattaatcgtcttttcagtggttaatttgcactacatcttgccgtttcataacctggctatccttgtcggttccgatccagaaactggcggtggttatacgcaaaaagatgtcatgaagttaggtattccgctaactgccgtcatgtttattgttgcgctggtagaagtcttttggttccagctgactggacttttataacagcggtacccttgttaaaagtcaatatcaatgcaaagtagctcctaaatgatttttctttaggggctactgctgtatcgttaaaatccttactgctacacaacagtcgaaatatcgtcttgggattctacaatcacggttaccattaacctttttcggcggtaacttgctggctcaagtagtcagcaaatttaagaattgccggattgctagtgcgtcgataaaccagttgcaaatgactacaaatattcggcgtcaatgacttagcaacaaagttcgaattggcaaacggctggtaagattgacggaacaaaaaggtaacgtggcggctgccttcgaccatccccaaaagtgtctcgatatgcggactgctaaagatgattttgggtgcgatatgacgatccgcaaagaacgcctgcatcggctcaaagacaccagagccgcttagcaagctgacaatcgttgtggcggctaaatcttttgcagacagcgatggacgtttcgctaatggattagtcttagcgagaataacttgcaactcatctttagccagatcaagtttgacatattcccgcgttgataggacctctgcttgtgtatcacgtagcaatgccatatctaaatcaccagtcaaaagctgcttgaggatgctaatgccttcctgttcgaccacatgcagtgccagcttcggaaattgagcggcaaaatcgtttattaatcgactgatgccaaactgaccaagaatcggaacggcaccaatcgtcaaaacaccgttgctcaaggacttcaaactatttaaatccgtgttcatgagctcgacttggtgcaagatcttactggcgtgaaagaaaaaccgttcaccagcctccgtgacaagcatgcggcgatgattgctagtatccaccaacttacttcccagaatagcctcaatatgctgaatacgcttagacaaggctgattgactaagatgtaaaaccaccgctgctttggaaaaactcttaagctcatacagtgctacaaatatttttaaatcctcaaaattcaacttattcaccaccgaaaggaagctataaaatgtctgactaccctgtcccgacttacacgacaaccgtgacacagtctgacgtcaccctcatcgccaccgttactgtgatcggacgtgatctacttattaccattactggcggcgaccacccgcatattggcgatgttctcacgttaaccaaagatcaacccattcaaacaatccgctaccccagtcatgataacagatttcataaagatgatttacttgcgcttccaagtgccaaagcgctgcaaccattactgcccggaagctgcaccattttagctgggttgcacatcgatcacatcagcaaagtacaaatccaggctgcattagatctcagccataaactagcgcctgagttaatgacttggctaaaacatcaaacatttgcaacgtcaagaccacactattacggtcccgatgaatcacctgcctaatcgctcaaccagatccgggaattcgttaatggccgttagttggtgtcttcaaagatgttccctcaatgatctgctaatttatccgccatcgttgtttgcagtttttcaagcgcattgacgactacttccgcatcttctcccaaagcgttgcgcaaaaaagcatcattttggtcaaagaaatgccgaatatatgccgctaccttttgggatttttccgttagctgaatcgctttatatcgcccatcttgcttggagggcacacgaacaatcaattccttgcgctccatcagttgtaacagtgccgttgctgaagatttctggatgttgaattcatgttcaacatccgtctgatacaacggccgcttggtgccttgccgtgccaaaaaatcgatgatgctcatttgcacctgtgttagacccaattgcttagcttcacgatcagcataacgttgcaggtcattgtttaattttttaaccaaaatacccagcgatactgtcacgatgtctatcccctttcggtttcaatgaaatctcaggtcagcgtttacattaaaattaagccttgatttcagaaaataagaccgctatagtagctatagttcgatatagaactatacacgatggaggtctttatgacaagaaaagtaacacctaaattatacctttcgattctcgccactggtctgatggcgttttgcggggtactcattgaaactgccatgaatgtcacttttccgaccttaatgcggcagtttaatgtcgatacgggaaccattcaatggctgacaaccggctatttgttgatcgttgcaatcatcgtcccgatttccgggttcttaaaacgacgcttcacgactaaacagctttttcttaccgccagtgccttcttcatccttgggttagcactgtgcagcgttgcaaacagttttgcaatcttgctcgtgggacggctaatccaaggctgcgggacggggattgcactccccttaatgtttaacatcattttggaacaggcgccgttagaaaaaattggttttctcatgggcatcgggacgttggtcaccgccattgcgccggctttaggcccgacttatggtggcgtgctggttgacattaactggcatctgatctttattttcctgctattcgtcatgattgccgctttgattatggggctattttccatccagcaagtctctgaaacggtccatcttcacctcgactttttagcttggttattcattgcgattttctttgcgaccgcgattcttggtcttaatagcatcgagcaccaacccggacgcgccttgatctttgccgtcattgcaattttaagcctcggcgcctacaccatgcgctcactacatgttaaagaaccactaattaatttacggttattcaaaaatcttccgtttgatctgcacatgacgaccttcctcatcattcaaatcgtcaatgtcgggtttgcctttgtcttacccaactacttgcaactcgttaaccacacaagctccctaaccgccggcctacttctattacctggggcggcactgggcgcatgcatggcacccatgagtggtaaactatacgataaattaggtcctggacgccctatctttatcggactatgcttacagctcatcggaattgtctggctactccttgaagccttaaccgcagccccggtcatcgtcttgatcggctatgccttcatcatgctaggtaccggtttttcaatgggcaacattatgacaagcggacaagctcagttacaccaagaacaaaccactgacggcaatgccatcttcaacaccctacaacaattcgccggtgcacttggcactgcggtcgtctcactcatcatggcgctggctcaagccggttcaacctctgctcacaacactgccatcggttcgcaacatgcgtttggtttcctcctgctattaaccctcgttggtgatgtcgcgattttctttgggttgcggcgacgtcgtggtgaaaccacaggtaaataagcaaaaaatttaacgctttcacaaaaagaacgcaacgaaaaatgcccacaagcacaatgtttgtgggcattttaggttggcataaatgatggggattaccacataacaagagttttttgacaaaacgcttacataccgaaactttgatttttaagttctgctcagttcttttgcaatcccttagcgcaagcagttatcgtaagcgcatggtatgccaacaagttgttagcttcaggcttgtacctgttctttcaacatcccatcactcgctttaccgcaagactgataactatcgagcagccccagcttcatgaagaccgtttgctgataggcaatttttgcattccactcaaccgtctcaagaatctcggttgcatgatgcaaatcttccgacgtaatcaaaacgccgtggctatttaacaagaaaatgtgttcctttgcagcatcgcccaccgctttgagcccattatagacagtgtcggcaagttcttttgagcaagccggtgcatagggtaatacgcgaatcggtccgacttcttcagtgacctcggtaacatttggcatatcaaggccagcagttgcccaaaacattgattcttcggcatgtgaatggtaaacgcaacggatcttatcattggcgcgataagcctcttcatgcatattgatttcccgggtcaaacggccaaccccatcaatctgtttgccagtctcaagatcaaccaccagaatttgggtcggttgtaacttcgcataccaagcttctgatatcatggtaggtgtcataataagataatctttgccggccttaatatgaatgctgccataatcaatatctttatccgcggtaatacgaacgctgatattgccaccagcgacattcgtattctttcgcacaaacatttcgcgcgctacttctgccaaatccttacgctcattttcaaatacatactgttcagtcattttgaaaatcctccattttttacacgttgagccaacaactctttacgacgttggttaattcgttcgcgtcgcttgcggtcataatcaccgaacaaaacgggattaactttgctatacaatacgatggtaacgaggcccatcaggaggcaaagcccaacactgccgccaagcaacgcaattgaaacgccgatggtatcaatgaaaaccagaaaagatgctaaggtcttactcaccttgatcacccttcttcttatgacttgtctgactaaaatccaacccgtcaagatcgtctaaatcgtcatcatttttagcagctgactgtttgctttcatttgaagcctttgcatcgctgaagtccaacccgctaagattatctaaatcgacatctgcatcagcgctatctgctgttgacgttgaacttgtcgttgctacagcaggcgtcgtcaaggtgccgtaacgttggcttggtaatttgatcttattctgatcacggtatagccaaatgaaccccaacgtccataaaactgctaaagcaatcgcccaccacttgccattaaatgcttgagcaaagaagagtcggaaatcgggtccctcaaaagttgaccacgaaagctgttgtcctgcttgaactttgacggttccggttgacttcgccaggttcgtaatgaccggcgcaaaataagtcgcaccatagaggaaaatcggtgttgtgataatgcccaaggtgatcattcgcaataagtttgcccctgtcagcaacagcgcagcattcacaaacgataggttaataatgccggcaaaaggcaaaaccgtattatgcggcaaaatcattgcgaagacgagcatgattggaaccaagataataacagtcacccataattcgttccggccagcaagtattggccaatcaagtccgatataaacttcacgacccttgaagtgtttctgcataaagccactcatcgcatcggcaatcggtgacagtgccgtcataaacagtttagaaatcatcgggaacaacgtcatggcagtcgcggctttgattgccagattcaatgaaccggagacggaataaccagcgccaaatcctaacagtaccccgatcaacgcacccatcaccgtgttgtcaccccaaacaccgatacgtttttgtaaggcatccgcgtcaaacggtttattcataatcgggatgaaatcaagtaacttatttaacggttgaagaatcaccgcaaacaaagtaataaaatgcggcactgttaccccaggcatacctgtcagatcctcaatatgtcgatgccacatatcacctgccttgagctcaaacacaatctgaatccctgcaaccaagaatccaaagaaagcattatgcgtgaagtaaagcaccacgacataagtgaaaatcttgttccaaacgttccacatatccacgtttaatgttttcgtccaattaaacgtcaacatcacaaagttaatcgctaataataacgggaaaaacagaaatgccgatttatatgaccatgtgatggccgcaacaccggtccagccggcatcaatcgcgtttaaacttaggtggaacaactttgacatagctttggcagccggtgaaattgcatccatcatgtagttaacaaccaaggtcatccccgaaaaggcaatccctaaagtcaacgctgccacaatcgattttttaaacttcaacccggcaaccagacctagaatcagcatgattaacggaacaaacaccggtcccccaagattcaaaatataattaacgacatcttttaagatcgtcacagttttctacctcctcaaaaagtgagcacgagccgccacacgctgacacatctagcgtccccgtttacccaactactttccggcagcctgcatgttttttagcgcctgaataatttgtttatatgacttttccggattcatattcataaaaattggcataccatttacaaccgcgatattattttccttggctagttcctctaattgttgattcggttttgcaatccaaacatagacatcgtaattatgcagaacttccggtaactgcttaaaatcagtagcatcaaccgatacgcctttaacattgtgactttcgaaaaaatccttaattcggctggcagttgcttcacttgatgcaacgcctgatccacatgcaacaacaatttttgccatgatctttacgctcctttttaattatttccctgtggtttgtgcttcaaatgtatcgacaaaaagttgatacatcgcatcacggtcatttgtcgctttaaacttggcgacaaaatcctgattttgtagtaaatccatgaaaatctgtaagaggcctacctgctgactcgaatctgtaatacccaagaaaaacatggcagtcgcatcttccggctcgttgtagcccatctgcagcacccgaaccggctgagcgttctttacaatcgccataaacggtttaatgacatgctcaggatcagcatgcggcaacatgacggatatctcaggaaagacaatgccggttggaaattcgtcttcgcggcgattcaaagctgcctcgtaggttttctttacatatccggcagcttgaagcttctctgcaaccgctcgaaataaatgctgacggtctggctgattttcatttaagaaaatcagctgtttgtgaataattgtgctataatccataactagctcacctcaatcgaatatttagaccaaaagttttgaacctttttgaatcttttaacttatttcattttcaatgctaaagcgctttcattcgcgtgtctatagtatttgtaaggtttcatcaaggttgagaagtgttcacaaaatgccgctcatcctgttcaaatcggttcaataaaattcaattgagggagcgtttataatgtcacaaagtccagcaaaattcgagcgtctgaatgaaatcattcagattctacgcgaaacaccagagatcagtattgcgcaactaagcaagcaaatgttcaccagtaagtccactctgagacgtgaccttatcgagcttgaaaacagcaatatcatccggcggcactacggtacggtgcagttactgcaaggaaacaatctggaatttacgtatgaaaaaagacgtaacgaaaacgcacgtcttaaacgcgtcattagtcgccaaattgccgcgaagattcccagcaaagcagctttctttatcgatggtagttctacctttttcagtctgcccgagcttctacacgaacaggtcggcttgcacgtcattaccaataacgtaaacatggggatgcaatttaattcattaaacaatgtcgaaacgattattcttggtggcaaaatggccccaagaactgcttcaactttgggcgcaacgacgataaacgaaattcaaagttttcgtcctgactttgccctgctttcaataggctcgatcgatgctgacggtatctatgtagctgacccagagcaagcagccgttaaagaagccatgatagatgctgcaaaatgcgtcattcttggcatcgattcaaccaaattcaatcaaagtgactacattcgtatcacaaatatggatcaaatcagtgagattataactgatacgcaacccgcgccagaatacggaaatttgtttgatgatcatcatattcaactcacttatccgaaagcgcatcatcatttggctgactgaaacaactcgctgtcttattcatacctgatagctgtaaacaaaatagacgctagtaaaaccaacttgggcttactaacgtctatttgttatcgttaaaagatgatgttcccgcggttccccatccctaggtatcgcgctgaaattgcagtcagaaaatccactactttaggcgacaatttttgtccaattgctaaaggttgaagctttgttctaatttcaaaggctattccttcttcattattgcctctttgacgtcgaatttctgcatgtttcaaaatttctaattcaggtccggttgtctcgggatctgcgataagttccggtaattgatccagtactgatggtttctttttcataaaaggtccctccaaacggttagcgacattgctatggaccgtgcaaccctgctattgtcttgttgaacaatactaagttaatttttgcacctatcatcttcattatcaagtgacacatcttgctcggatgatacctgagtgacttctcaacccgcccacttttaacaagcacctttcctccaactttcatccacaacccaaaaagcccaccaattgccttcaacaatcagtgggctctttagagtgtgtttaggaggtatcctaccatgtacagataacgttacacttttagcgttacctgactgataagtgaatcgccatgaagaaaagctagattaggcgttaagtcaaaccgtttggccagttgttccagattttcgtccgtgatttcgttgatgatgcggccgccttgagcctgaatagcggtgtagattgtcgccgctttttcaacagtttcaattaagccatacgtttcatcaatggaatcgccagcgccgaagattccgtgttgcggccacatgacgattcggaagtcggccattttttgggcggttgcctgaccgatttcgttggtgcctggggtcatatatggcaagacgccgatgccttcggggaagaccacaatggattcagcctgcatcttccacaaaatgcgggaaaagagcttctcttccagcggcagcgtaaaggacatggcaaccagattggtaggatggcagtgcatcaccacgcgctgatttggatcctgctttagccgttgaatgtgggtcatcagatgggatggaaattcgctggtcggttgtccgccatcattgaagccccatagtaggtcaacactatggccgtctttagcaatttgcactaagcccgtgtcgcgggccggaaaatccttgacatttttgaagtagcgcccggttccggtgaccagaaaatactggccagccagttcactggcatcgaacttaattggcaagttgcgcttgacttcatgcacatcgccataaggggcaatttcagcagccgttaaccggtagctgacattaccgccattgcgttcgtcccagccatgttgataaaggttccaggtgactttgcgcatttgtgccacatacggtgactcgacaaagctctgggtatattcgggattcaaaaattgtttcttgttatccattaggcgttttcctttcagaattgacgaattagtggaccaacttggcatcgcgtttgaattgaacgtctttttcatactggtgaatgttgttcatccagtcgaagccgaccggggtgttgtgatcctggcagaacttgtcccaaacagcgccgaatgggaatgacttcaattcttcggtttcaattaagcgggtggtgaagtcggcattgagttcgtctttcttcaattggtcaatcggtgccagcattgcctgcagcaagctcttttgggtggcccgggcacctacgacccaagctgcgacccgattgatggtggcgtcaaagaagtcaaggccgatgtgcgtgcgatcaagataaccgtcccgaaccagtgaccgggtaatccgaatcagcgcatcgtccatgatgacaacgtggtcagagtcccaacgaaccggacgggaaacatgcatgaacagccctttgccaaatgggaagaaggcgctgaacttgtcggaaacatcttcagttgggtggaagtgtccggcgtcaattgtccataacttgtttcgactgatcgcatagttttgatagaactcgtgggaaccagtggtgtaggattcgattccggtaccaaacagtttgccttcgaaggattcgatagtgttcttttctggcagcggatctttgatgatttcgtccaaggctttgagcaagcgcagccgtggggtctttttgtcaattgggttatccttaaagccatccgggaaccagaagttattaacaacctgactgcctaacttttcgccaatgtagttggaaatttcccgactgatcttgccgtggcggatccagaagtcacgcactttgggatcgggtgatgaaaccgtcatgttatcctttaccattggatgggagaagaaagtgccgttaaagtcgagaccaacgccttcttgctttgcccagtcgatccagtaatcaaagtcttctggctcaagtgtatcaagatcgcgcttcttatccgttaccgcatagatggcgtgcagctgaacccgatgcttgccgggaatcaggcttaaagcttcgtgcatatctccggctaattcatccggtgtgcgcgcaatccccggataattaccggaaacgccaatgccgccggttagttcctggttagggaataggaacccatgaatgtcatcgccttgccagcaatgaacggacaaaggtactttttccaattccttcatggctgcatcggtatcaactccgatttctgcgtaacgctgttttgcgacttcatatgccttatcgacttcttctggtttaaccatgtgaaaaacgctcctttatttaaaatcatctattgtgactggttaccgcatttaaacttcgactcaatccaagtggaacacttcatggagatcatctgcgaccggactattatccgggttggtcttcataagcggctccatatacgcccaccacttcttgcaaatgtcagtattggcaatttcgttgtacttagcaacatctggcacttccagataggcaaacaattcgccattggccttgttgagatagatagaataattagtggcgccatattccttcagggctgctttcatttctggccacagttcgcgatgccgtttctcatattcctcgtatttatcgggataaacgtacatgacttgcccaatacgcttcacgactaaaccgcctccttagctgtctgaaccttgactgttttcataaatgccttatatttagcgaatacatccggataagcggatgaatccggttcataagtcttcaaatcaaacgatgccttaattagcttgcgcccggcgacaacatctttaacagcgccggtcgtaatcatctgaacgagcagattaccaattgctgtggcctcgcttggacccgcgaccactttgacatttgcgagatcagctgtcagttggttcattaaggttacattcgaacctccgcctacgatgttcagcgtatcaattggatcggcaataatggtgctgagcttgtgaatctcgttggcataataaagagctaaattttcataaactgcccgcgtcagttcacctggcgtttccagcttggcctgtccggtttcagccacataatcctgtagttctttaatcatgttagcgggattttcaaaccgcttgtcattgatatcaatgaagacgcggaatggcgctaccttgtcagccatttccgccaactctttgaagctatactgatcgttcagctcgcgtttgatacattgcacaatccacaagcccatgatgttcttcaaaaagcgataggtaccataagcgccccattcattggtgtaattttccttgaaggcatcctgaccattttccggagtgttgagttccgcccctagcagcgaccaggtaccggaacttaagaaggcccaatgattgccgaatcccggcgtaccaacaaccgcactcgcagtgtcatgcgtggcgacggtaatgacatcggtttccggaatatcgtatttcacatgccatttatgactgatcttgccaagcggcgttccggattcaaccaatgccgggaactgatcttgcgcaacattgacttctttgagtaaatctttatcaaaaagtccctgccgcagattgagcatttgcgtggttgaggcgttggttacctcggtgacggcattgccggtcaggacataaccaatgtagtctgggatcatcagaatcttatcggctttagcaagatcatcgcgctcttcagtgtaaagctgataaagtgtgttgaagtcctggaattggatgccggttttttcataaatgtaggattttggaagctcagatgtcagttgccgtactgcctgattcgtgcgtgcatctcgatagctaacaggatcgtgcattttcttgccatcattaccgacaaggacatagtcaacggcccaagtgtcaattcctaagtccactgcggtatagcccatctttttgactttttccaagccggcgaaaatttcatcaatgatatggtcgatttgccaccgatcatgccctgcttcgtttttgaagccgtttttgaatcgatgaacttcagttagtttcagttgaccatcgacaattgcacccagcatgagccgcccgcttgatgcgccgatatcaactgctacgtatgctttcatatgctgcacctctctttaacaccattcgtttggttaattaattgactgcggtgaaacgcgctcgctgccggtgtcttttgctgctgtgtcgcggtcggctttgctcttttcatcgtcagttaagaacttgtccccatattgttcgcgggtgatttcttcaagactcttgccacgcgtcttaggcgtccagatcgtgccaatgacaagtgatactaatagcagtccgatcatgaaagttccggcaacggtgaagccgagactgttgagaattgccgggaaaataatggaccaaacaccggcactggcacgaaccaggaagaacatcacgccttgtgagccagcgcggaattgggtcgggaagagttcggttgcccataatgcataccatgcttgggcaccgattcctgcgctaattccccacaatgctacgaacgcccataagctccatgactgagccatgccggcgtaggtcaatacgatccaagatgctgcggccattgcggcgccaacgaagaagaaaattcgatggttcgctttgtcgccgtacttggcaaatccaaaatatgttgccaaggcggtgaggacccaaagcacggcctgcagtaagttggcttcctgattggacagaccgccagcagtttcataaacatatggcatgaagaagcccatcgcgccggctaccaagttccagaacatgtaaacaccgactaggaagcatagccatttaagtgaggttttattcgagaacaaggtgcgataaggatgcgacttttcaccggagctcttttcaaacgccttttgatcctgccatgcttttgattcaccaagtccacgttgcaagagccaagcaatgaaggcaatcacagtcagcaatccgaacaatatccggttaccaaacagaccaagtggtgcaagaacggtcccgagaatgaaaataactgccggtcccaatgaccatgcaaactgtgatacaccaatattctttgctcgattgtcatcttgtgacgtttcggaaatataagtccaacttgcaggaacaccggcgccgactgctaagccagttacgagaaatcctgccagtaacattgggaagttaagggcaaacatgaccaggatcgtgcccaccatataaaccaacatgtcataggtgtaaatcaacttacgaccaaacttatcagacagtggcccaccgatgagagcaccaagcgctgcgccaaatgcgttggctgacaaggcgcctaataagccgacttgaaaactgctgagtccaaaatgctgcgtccacagtgtcaagccgctagcaccggcaacaatactgcctgaatccagaaaattcgtgattgaaacacgaatggtggatttcaacgagcttttctctgaagccattgtgttacctcctgcacatttcattttttgtcaccgtttacagttcacatttaaccgcttacatgttatggtcacaatgtcagataaatattatgatcggaacataagcacaggagggtgccatggaattagcaattttaaagcagttgcaaagtttgactgatgtcgaaaaaaagcagaaagagcatcatgtttttagcgatgacattccgccaaccgcgattgacttgcgggaatcaaaaacggctaacgtcccggttttaaacgattattttttccgcaatcacgccatttatgtcagcaaacataatcgatatgccccttatcctttgcacacccatcagttctttgagatgaactatatgttgcaaggacacgctgatgaaacggttaacggtcagcgcgtccacctgtcacaaggcgacgtgctgctactggatattggaagtgagcattccattgatgcgttaggcgacaacgatttgctgatcaacattttgtttcgcgatcgcaatatttctatcgatttcctcaaccagattcaaagtcagcaaagtgtgctttatgatttcatgattaatcatttacgtaagcaaaaaaccaagcagcggtatgttctgtttcgcaatggttttcatgacattcaaatcacacttgagcgcatcattgaagaatatttccgcccgcgcgcgttttcggatacgatcattcagtccgagttaacggttctgatagcggaactgattcgggggcatcaaccaaccatcaaggatccttcgccatcgcaaaagcttgcggtcaaattgcttaacgatatccacgaacattatcgggacttgtcgcttgaagatttagccaataaatacgcttataacaaaaactaccttggtaatctgttctcaaaagaagttggcaagaccttttccgaagcactgacgcaagaacgactcatcaatgcgcgccgcttgattcagaacaccaagaagcccattagcgagatctgtcttgaagtcggtatcagtaataaaagcttcttttaccacaaatatcacgcgctattcggcaatacgcctaaagatgatcggttgcacactacgggttacatttctcctgatcacaccaacccaccgttaacaattctgtaaatctgtttcgtttttgtttcacactttgccgttgcaccgcaaaagcattaagcactttcaccgtgaaactaaaaagtcaagttaaacattgggacatatccttagatgtttgtaaacggcgcttgataattttctttattgtgaaacaatgaacgtgtaatcaaatgatgagcaagtgaaggagagattgcaatgaaaatcaaagcagccgttgttgatgaaaaaggtgctgattttaaaattcgggacgatgttgaactagcgccgatgggtcctgacgaccttcaagtccatatggtcgccagtggtatttgccattccgacgaagccttacgtatcggggatgccgttatcggctacccgatcgtactaggccatgaaggttcagggattgttgaaaaagtcggcccggaagtcacccagttcaaacctggcgatcacgttgttttaagcttttatgcctgtggcaactgcaagaactgcttgaagggtattccgacccagtgtcttaattacgcccataacaatttgtccggtacccggccagatggctccgcgcacttcactgaaaatggcaagccggtcgcagacatgttcgaccaaagctccttcacaactaccacggtcgttcgtgaacgtaatgcggttaaagttgacaaagatcttgatttgcgcaagcttggaccgcttggctgcggctatgtcacaggttccggaaccgttttgaatacgctcaagccaaagcctggtgatacgattgcggttaccggtactggcgccgttggattagccgcaatgatggcgggcaagatctccggatgcaccaaagtgattgcgattgacattgtggattcccgactcgaattagccaaagaactcggcgcaaccgatgtcgttaatagcaaaaccgaagacccggttgccgcagttaaaaaattgactggtggcctcggggttgactgggctgtcgacacaaccggcgtcaaggcagtgatggaagatacgatccagatgctggctcagggtggtaccaccgcaacgatcgcggttacgccacatcatattgacgttgatacctggaacgacctctgcgtcaatgacaagaagatcgtcggcgtcaacatgggcgattccatcccacaaattgacgtaccgcgcctaattgagttctataagcaaggtatgttcgactttgataaaaccgaaaaattctatcaattcgaccagatcaacgaagccaatgctgactcccgctctggcaagaccattaaaccggttttgattattgataaagactatgtaccgggtaagtaattgatcttttcccttggccctagctgtggtttgaattcaagcacaaaataataaagcaccaggaactccaacgctgagtttcctggtgctttattgtgttcagtcttccttgttttattaatctctggctttaagcggaacctcattgatcgaaactcgctcataatgagtcacaccatagcgcgtattataagtcaggcgcagtatttgtccgtcagagaaggggccgggatcatactcatccgtcttaaactcaagtagcttcccgcgcccagcagcatctttcgccaacgctcgataaacgtaacatttttggcgcagattaaccggaactgtcaccgaaaattggctgcgtggttcatgtacttttgcataataggcgacaccaccatctctgtacaccgtccaccaaagcgtaagcgcaataaccaccgccaatgcactcacaaagccaactttataaagtgtctcctctgtttcaatcgttaatcttctcaccccgagcatttcctttctgttttcaaaaagcaccttgatcaagttgaaagaaactgttcattgctatttaacaagtttgaaaataagcaacttgactgcgaattatctctagtattcagtcctggcgctccttaggtcaaagtaccaaaggaagttgtgtcggtaaattattcggttgtttttttaagagatttcttacacttataacaatatatgttattaatttggatggtatgttttatccggatttctgatgttagtaaaacattttttcaatatgactgattatgtgaggcttgaaagtatggtgactcccaacgtattaaaacatcactccgcagccgatgcctgaacatactcattcataatcgccgcgtcggcctttgtctccacattacccgcatagttcggtgtcaccaatgagacggtgccgtgtgcgttgtaaaacagataaaacttatctccaatcatgttcgctgcggtttgcgaatggctcccttcatcggtgaacgatcccactttaatctcggtgttgcatttgacggtccgcgtttggcctgcagcgtcagcactgaagaccttgattgttttagttgcaacattgcggatggtcgctttcatcgtgacggcatccgcatgttgatactgaatggtcaggcgataatttgctgtctgcgggtccgcttgcaactcaatccgagtcggcgcattcacgccttgtcgtgtaaaaaccgcccctgaacgttcccgcaaaagcttggcaacatcaacaacataatcttgactaccagctgttgactgagaactgcgcccccgactttcccccatatcacttggcttgaccgcactgcttttacttgcatgctgctttgaggtcacctttttgatcgcgctttgttgcgattcagtcagtccacgctttgtttgttgttgggcaatataaaaatagccgccgataatgaccaaccccaggatcaaaactgctaacggcgccatccactttctcttaggtggtcgttgacgccgtctgctttcactagtctgtttcaagtttaaaaacctcacttaattgttggcgttacgctgccttatcgactttgttagctcatagaaaaagtataacatggcgctttttaaacattatagttcggctcgtcagtacgcttggcaaaacaactaaacctttacagcatttttactgcacatatggtttgaaactttatactgaaactaatgatcatcgtctgtttgtctgcgcaaaaatcagtgtgttaggagcttggctgcagtgcactggttctcaccacgatgctcagattcaggcccatgctcactcacaaggaggttcttttcccatgcacaaaagttggtggcaagaagcagtggtttatcaggtttacccccgcagttttcaagatagtaacggcgatggtatcggtgatttgcaaggtatcatccagcatttggattacattaaagaactcggcgctgatgttatctggctcaacccgatttacaaatcacccaacgccgacaacggatacgacattgcggattatcaacaaatcatgccggagtttggtaccatgaccgatttccaacaactgttaaaagcagcccacgcccgcggtctgaagatgatgatggatctggtcgtcaaccatacctctgacgaacatccttggttccaagcggctatgcaaagtcgcacggatccccatcatgactggtatatttggcgcgatcctgttgatggtcatgcaccgactaactggcgcgcggattttggcggctccgcttggacgtatgtaccggaagtcggccagtattatctgcacctttttgcggtcaaacagcctgatctgaattggacaaaccccgccgtgcgcaaggccgtttttgacatgatgacgtggtggtgtgatcaagggattgatggttttcgaatggatgttatcaatctaatttcaaagcctgaagtttttgctgatgatccacaccttttggaacagccaaacggcaactcgctgggcttaattgccaatggtccgcacgtgcacgagtacttacgcgcgatgaacaaggcagttttgtccaagcacgatcttatgacagttggcgaggcacccggcgttacccccgccttggcacttcaatatactggtttcgatcgccacgagcttgaaatggtcttccagtttaaacatgttggccttgataacgatccacaattcggcaagtggtcactcaagcatccccagttaatcgatctaaaacgcgtcctatccgattggcaaactgcactacacggtaaggcttggaacagtttgtattgggataatcacgatcaagcccgcgctgtttcgcgtttcggagacgatcgccaggcttttcgggttcgctctgccaaaatgctcgccgccaccttgcattttctggaagggacgccttacatctatcaaggtgaagagcttggcatgaccaacgttgcctttccatccattcacgattatcgcgatctcgacaccctaaacgcttggcatgaacttgttgaacagcaacacgctcttgcgccagaggatatgttaaaaagaattcaccgtcgttcccgcgataacgctcgaaccccgatgcaatggtcaactgcgccgcaagccggcttcaccgcaggcaccccttggctagccgtgaacccaaactacccggacattaacgcaaccgctgcactagcagattccgactcggtcttcttcttttatcaaaaactcattcggctgcgtaaacaataccccgatctgattgtttacggcgcttacaccttactcgactcagacgaccctgatgtgtacatgtaccagcgccaggccgccaatcaagaactgctcgtcatcagcaacttcaccgaccaaacgttgactcgcaatatcgccaaaaagctgtcaccttcagccaaactactcatcagcaactatgacgacgatgctgaaaacacgctccggccttatgaaactaaagcgtatttaatcattgagcgatagtgagttcacttttgatctttaaaaaacgcaacgaatctcatttgggggttgtcaaaatcccgtcctcaccgatttatcttcatgtagaacgcgtctacttgccattacgtaacgatgcggccacatcaagataatcatcgtgatggcaccggttgattcggttctcttttaacggccgtcagccaacttgctactggttatcactagcctcaccgccaattagcaatagttgctggccgttatcggtgacctctcaaccgcgctttacccgtttcttctcccccgggggttctttatgcaacagtgctgttgcgttacataacataaatcattaaaagagaaacgctaaatagttgccgcagttctatccgcagccaccctacaaatgccaaaccagtcatggatatcatcggcgccagtggctgatcaagctgaaggccaacgatgaagcctatttagcatgccatcatgttttcaccttggatgaataacacaaataccatatcaccgtcacaatttcgtcacatctgctctgtagtattagcaacatagaaatgagccacccactcattcctatacaaaccccaacccaactttttcatttttactcctccaaagtagaaatcgtcagccggcctcccaccggctgaccaatacataaataaacccccgcagtgtgaaggctgcgggggttttgcttgtgtgaagtaaatgttaacctgacagactaggtaatgttcattacgggggattcaatacggtcattttgtcttaataaatcgcgagtataggctccctgaaacaattcccattactgccaagatactaacagacggtaaaaaagatgctgtttgttcaccagtcttgggcaatctctgttcttcatccgacttctttattcgcttatcaccggcaaccgactgcttctttaccaccacttctgtcggcgcatgctttgttacatctttcccatctaaacctttcatagtcgtttgcagctcagcaactgaatgatcaatctgattttgatttacataaggattattgaacacctgttgtgcagtattaagcgcctgatcaaacaggtgcttttttgttgtccccgccaacaaatagcgattagtccgcttgacatcaagcgcctgagcaatcaatcgttctaacgcccccttatcaacgttcgtaacagatgaagctgcttcaaaggcgccaatagttggtcggttcgtattaataggctttccagcaaaatcatgtgtaatcggaaacttagctttcacatcattcggtattaacgcatcgacattaataccagcccctgctgctggggatcccgccaatggcacaaatcctgctaacttactaaaatcaaaactgccatcgccatgttgaatcaccccactaggcatggaacctacatttggtaactggggatcagaaaagatattatttgatgcatcaacttccccagtgtgactattatccatcaaagcctccgggtaaaagaggttgtgatccaagcgtccctctgtaaaaagtggctgcttagtgccatcctgatttacaacaaatttaggcgtattgccgcttggcgcatagactaaattgtttacaaatcgaatccctgtttgtccgttatttgatatcattaaattcttaacatcctgtccaacgataaatgtattgttggcaaataacgggaagccatcaatcccgtctgctttgccggaaacgacaaagataagatggttcagagcaggcgaaggtacattcttaacatcattcacacttaagttgtagcgaaagacattatcggtttgatgatctcccatgaacaatgtaaagccgccagaattgtcgtgcgagtaattatattgatagacaccctttgatgcaaagccatcaaagtcaaacgccgctccatctaagtaatggtttggaatgtcaaacacttcgttatattgagcaaaattatattctccacccataaaccacaagccggcaaaatttttgcttacgcctgcttcattttttgagtttggcatactgttcgcagcttgaaccgtattgtattcagcggtcccattttcactggaactaataacgatgccgtccccagcactattgcgaatataattgttgtggaaattaatctttgcgctggctttaaatgaatattgatcccatccccccggaagtaccgaggcgttggcatcattgcggagtccttcgttagaaacatccgttacaacattattctttgcgactgcatcagtattgccgacaatgatgatccccccagagtttttcccggctggaaccattttgccagtattgtcaggaaccggatcactttgatatgcaccttcaacatcatggacgtaattattatccacggttatccctgttcggtgggatgctttgaaaattgccaactttttctgaatggtttgactatcatttccctgtggatatgccgtactgatatccgaagcaaccagaataccgatacgcatagcatctcgcttaccgctaccagctgaatttgtcacttccagatttgatattgtccaattattagcattccaaagctcaattgtaccggtcatcaggttaaggttactcaacttacgctcatgatacgaacttttatcggctgtcgtccccagcccgttgatgatcgctttcttgccggtattcccttgattgtaacttccaattgtgattggatttccagtcgctccttgaccatttttagcgccatccaagattaattgtccattccacacgctgttagcatcgaataaaatgcgatctcctggctgaaaggtcgaactttctactttgtctagtgatcgccaaggatggttagctgataacccgtcactatgatcatcgccagtatttgaaacataaaatgtacgtatgtccgttgcatttactacctgctgtggatggtcattaagaataaaggctaagccgcagacaaatatcatcaacagaaatagctttgtacccttccaacacttcatcatcgtcctcctgttcagcctaacgcttgtttcgacaaggcagcttgatcaatatgaatcttgacttgttgcactgtctttgaaatttttcttcgcaacttatcgttcaaaagcctagttacaacatcatcttgcacgtcagaaaatggttgaaatccaccatcttctgttgaaaaaattcgcaaaagacccatcttttcttcagaaatccagactgggaaaattacatctagctcattactatgatccgaagccaagcgtgaatatacgccgtaatattgattatcatcatgtagcgagtcagtttggttatactgacctttgaatccagcttcttcaaaatcattttgaatactcttcagatcaatatgttccccattaatttgctgaaccttctccgaaaattggttgatatctttaatttttgcccgatcgaacgtcaaaacttcataatgcacgattgcgggaactgaccagtacttcgctttatatttggcataaaaatcttttttctggttaattgttaccgactttcgatgtgattgcacatactgtgattcaagctttagcatcaaaccctgatgttgcttttgtgccgcagctattcctgaaagatttgccccagcttgattttctttttggtatctttcaaactccgcaaacggtctttttataagccctgctttcaccaaagctttatcttcaatcacaaaacgcttaatctttttcaatgcttcattttgggctgcttgttgaggcgttttgccgttatacttggttttccaaaaatgcttatcataatttgcatgatactgtttgatgtaacgattcacagtagtggccttctcatcctgcaaaaacatctgatagattcttgtcgggacaggcgtgtcagccacctttaaatctgctgctttgaccttttgcgtttggcaaccgactatcaaaatcattaagagacaaagtgcaagaagttttagactcactgcttttttcgttgtgctttcctcctctgtcgaatgagttatgatcacttatcaagtccaccgaaatctatccataggcacaagccctataacaattgaaaatgttcgataactttgtgaccctgtcttgaaaaaatgttcaaacttccgtatgcctcagtgccatcaaaccagtaaagtttacgtcctagaatggtattttcgggttgtaaagtgattaggtagtcacggttttcacccaaatccagtcgaaagcccaatgccaacttttgtggaacttcttcctcaacttcaccagaatgcttggctgagactggcgtaatcttaacgactttatctccggctgaaaatacagctacttgggctgtgaaatcctgaaaaagggtctcactttctagtcgcgtcaaatgctgaagctcgttatatcgtggcgaaaaaagttgtttgctttgcctaatctggctttctgttgtagtaaaacgggcactatctcccaaaatatacccatcaccatttcttgccacttcaaggtgtggggatatttgccaaaatcgctgtagggagtgttggcctggataactgattaagtcaagagcaagccacagcctttcttcgctcaaaccgatgagaaaacgtgtgattatggccgaatcctcttgggactggtcgagaaaaaccgccttgactacctgtcctctagcaaatttcacactttgattagctatgggattggagacgtattggtacttccatgaatccttcggtaagctgaacgctttgtgatccaacatcactgtgttatgtgcggtaacccctttcaaataacggcgttcggttccatcaacgtatgtgtatcgacccggatcaacaagtacatcctgaccaccgatcgttaaatcaagatgtcccagtgctgcatgaccatgcccgctgcctaagttaccattgaaaaggtgccaataatctgcttgcttatcccaaccggagcgccaaaagtaattaccgctaattggtgcatcgaattgtttaggtaaaactgcttcactagtagttaattgccattgctcatgagccaactctaacaacccaaagtcaaacacaggatcaagttgtttcgacaatgctgatggcagtttcaggattgctactgaagcttgatacaaactatcaattctaattgcatcagtatccccttgctgcaacaacttcaagttcggtttgatatactgcgccatcatgttgtgcatcgctttcgttttggctaatacgattggcgacactgataagtctgcccgctgctgtgccgcaataacagcaagtgaacttcgccaaacttcaagcaaatataatggcgactgctcccactgcatgccttgggcgtctacttgaagatccagttctacttcaaaccgcttttgagcccaatgaagaatatctgactcaatcacgtttggaaattgagcagcataggttaaaatacccgtagtgatcaagatcccccagttactgatgtcaaacttttctgtatagttttgctttaaataggcggcttgagtattcaccgcgctttcaacgttcacccgctccttcgcagtcagtaactgactctccagaagattggcaatcacgggggtccagttcaacaatcgtattcctgtgtcgatcgtccgccaagtatcaggaaatgccaagttttcttcaatccagctaaagagcagcgccttcattttcttctgatataccatgtcgccggtttcatagaaagcttctaaaagatcaagcaaatattcttgtcgtttcaacatataaagccattccggatcaccattgggcgttttctgccactgaatcggatccatcgtatagctgatttgcgtaggctccattgcataggggttatcaaataaatagacattcttcaataatcgatcagcatttttttgcgcatgatcagtgaggtgttgatgctgacgcaactgttgaatgtacgtggtccaagtcattttcgccatccgttttggcctcctttgtcacgccagcaatccccatacgtttaacattaatgatggtgttgacagcaatttcaacgcgcacgttttcttgatccaatcccctaattgtgcccacgatgccatcaataagcacaatctgatcacctaactttaaattagcatgcatttgatcaacaattgctgcctgttttttcatggcacgctgcttagcaagtggaattgcaacgagatacagcagaaagactacgacaactaatattgccagaacgatttgccacaaagtcatcaaataccatccccttcatctggggcggcattcggaatcggtaccttcgtggaattggtcttcattctgtcaggcaaaatctcaatcagctgctttgagagttctacagtgtgccgcagtgtctcctcaattgcattatcctcaaatccactcatattctttgcatatagatcaagtattaaatttaaaggcgcacttgaaatgatatattgatttggctgatttttctcaatgattagccgggagacaatctgatgcggtgcacccccagtcatatctgcaaatataattgcgtgcttattttctttaaggaagtcattcaagcattgctcaaatcgttcatgggttgtgttttcgtctaggttaaaggcagtcattccctctgtcgttccaatcaataatttcagtgccgagagaaccccctctgggtaccgaccgtgcccgacaattgccattgcataattcatttgttcaacatcctccatcttcatttggctagacccaacgtttctaaaacagccgtccacaattgacggctgaaaaatgcataaactactttaagattcccagaaccgaaagtaagacacctgcaacaaagagcagaataacaatcttgtagatagtccattttttctttgtaatcaaccaataaacaaagtatgtcaacgcaatcggcaacataaatggcataatcttgtcgagaattgtctggactgcaactacttgtgtctttcccttaataacctgtgtatattgccaagccaagttaacctttacaaaagaaactgacaagcctgcaataaccgttaaccctaacatgcttgcaacatcggcaatggcagccatccgatctgataaggtatcaataatgctggtacctactttccatcccagatagcccatcaacatccggactccgaaagtgataccaaacaaacacagaatgaacggaatcggtgcccatgtcatgccttgaagcgccagcgatgcaaagattgaactaaacaaaggtgctaatccaaactgagaaagtgcatctccaataccagccaagggtcccattaaagcgaacttaatcgctcgtacatcattttcatcttggccactatcatacatagccaacataatactggtcacaaatggataaggttgtggatttgtgttataaaattccaaatttgaggttgtaactcgtttaaactcagcgtcatcatctttataaattttccgaagttgtggcataatgctatttgccattccggttccctgcatcgtgccgtaattttgagcgttttgtaacacataggaccggagaatggaatttaagtaatcttttttggttaaaaccggttttcgactagatgccatcttcaatacccccatcgtcactgttgttactgtcattatttgtgtttgatccttggtcttggtttttgttagcgcgatgtccattatagtaattattaaaggcgagaaccgcacccgcaaatgccaatccgattaccggcatcttcaggtaagcaacacaaacgtaaccaaggattaaagccggaatatattccttcttgaccatcgtgctcataataagtgcaaatccaacggcaggaagcagaccacctgcaacagtcaagccactaatcagccactgaggaattgcttgaacaaaaaccttcaatgcacttgtgcttaacgtagcagcaaagccaaaacagaaagcgaacagaataaaccctaacaaggtcgtgttggcaagaaagtgaaacttgcgatacttgccttcttcaatagcctttcgtgaccaagcaaggttgttggcattgacagaaaagatgaatgtgatgacgaatgggattaaaattgcaaacggatacgaaagtgataaagcagcggctggttttaagccttgaatcgagatcgccatgatagttccaacaacaccagggcccaaaggattaggcggtgttgagccaccaggtcctacaccaaatcccataaaggctaattcagcggttgcaccaaaaacaacggccgtctgtaagtcacccaaaattaaaccaatcccgaatgatatgaacaatgcacgattggtataaatcccccattgttggccagcaaagcagaacgctgcccaaaggcctaccaaaagcgcttgcaaaatagaataggtcatgctctttccccctcagttctcattgacttcaatgcttagttacataatcgtttaaatcaaaatcggacccaacatcgttacctaatggcgttgtacgcgtgtttagattgacatgatattttatgtgtagtgtcttcaaagcctcaagatcactagcatctacagaaataaaattcgtaaggcgcgttttgccttccttcatatgaatattgccgacatttagttccgtgattggcacacctttttctgcaagtgttaaaacatcctgagcggtcttaacaataatgaaaatcgtttgcctcggtgaagctttgaaaattttattggccgtttcttcgagcgaaaagaaacggataccgaccgattccggcattaacgacgacattaactgttgctgaatgtggctagtagctacctcgtcattagcaactatgactaaattaacgccaagattagaaatccagagacgtccttgaccgtgaatgagtcgctcgtcaagccttactgccttaatatttggttctgtcatctttagttccccctaccaatataattgccagtctttataaaatctgatcaacgcttccatataaaagtaatcgccccagaggttgccttcatccacaccgtgcccggaatgccaagagtaaacaccatgaagcagcaaaggctctcccgtttgtccgtctaatggtgcagcatagttttgaatcaaagatttgagctgagcatgcattgccattcgataaacgtttttgtccgggtcggactcaggtatgtatttcaacatttcatgcataccacacacagcaattgccgcggaagatgaatccctactttgatcacttccctcctgaaagataaggtcccagtatggtacgtgatccgccggcaaacgattaagaaaaaagtttgtaacggccttaaaaacgtcaaaagtagtcttgtcatgcgtgtcataataatgcagcgccgttccataaattgcccaggcctggcctcgtgcccaatccgaatcatctgaatagccttgccgagtcgcaccgcgcaacggattaccgtcgtcatcgaagaaataagtatgaaaagtagatccatctgatcgaaacactgtctttaaagccgtttgatagtgtcgatccccaatctgttgatacttaacatcacgagtaacgcgtgttgcccagtacaaaagcggaatattgagtagagcatcaataatcagccggttttcatccttagcaccctttttcccccatgcttgaataaagccgcctttttcattgaagcgagtcaataattggtctgctgctttaatgccagatctttttgcgaccgaactgcctgttaattgataagcgctgacgactgaaggcgagtacaaaaaccctagatcatgatgatcaacagctatcttctgattaattcggttagaaaagctagtgacattcttttctgccagctctcgataatgattactgccagtgtattcatatgccagccataacatgcccgtccaaaaaccgcttgtccattcaatgtttttcattggcgcataacgattatgaatagtagatggttcaggaaaattttcacccattacttttatgtttaaatctagatgtttaattgcattatctaaagctgttgttaacatgcgcttatccaccaatccagcgttgaaaaagcgctgcgcatctgttaagggttctattctcaatgcttcatctcctcaaaggtttcgctcccatatacttcaagttcggttagtgcaggaaaaggcgaatcatcctctgctttgactaactcagaaagtcgaattgatctgatatttgatttattgattgtaaaggtttgctgattatccgtcttactgaaatggatcaccatttgactaccatccgaaaacgtcatagttccttgtttccagtaactatcatgtggaaaatcagctctgagcgttataactgcgtgatctagattgacattgcgcccaaagtcaatttcaaaactggcctttgggtcttggttaattccccacgattgatagggaaattttccgtgatgatgattcaaccgatacccatcaatggcatttcgagctgcaaacgttggatcatgtcgcgtttcaatgttggcactggcatgaggaaatgcgcccatatcagctgcctgatcatgacagtttaacgctaggttgcgttcaccctttaaatcaacaacatcaggtcgccaaattcttataacatgttcacgaccggcaaaagccatttctggaaagatgctttcatgagccggttctgtcacacgtaaataatttgtcggaatgtgataacgccaaggagtttgtgtaaaataaaccagagaaggactcaaagccgcatcaacctgaatccatctgaaacaaggtaacgtttgcggctcaaaagcaatctcaagataatctcctttcacatataagtgatccagaatcagctcagcgtctgattcgtcagaccgcaagtcactgtcgattcgcgatttagctgagatcaatgaaattagcaatatccctgttttctcctttcctgtttctttataataaactttgtttctttaccttacgcttgtatattagcgtgcacactttccgctgtcaacgaaaaagtaaacgtattcacaatattttttccttgggtattaaaaatatgttattgctttctaggacaggcagcgtttagaatgattataaatttctaaataataaatcactgtaatcggaggttttactttgaatactggtaaagaagcgtctaaaccatatggaaccgtcttaatcaaggccaaggaaatcttggactttctgttggcagcaaatgatccaccaactttatctgatatcagtcgtggtttacattcgccaaaaccgacaaccttaaaaatcctgagcacacttgaaacgcttggctttgtctggcgtgataccgactctaagcgttattttttaggaacacactttataccttacgcgcagaaagctctagcaacttttaacattgtcaatgttgcacgtccttttttggaggaccttcgtgacaaaaccgaggagaccattaatctaggtattgagcgaaacaataagatcatcctggttgaaaagctagaaagccctcgtagcattaaactacaatcaacgatcggtggaagcatgaacctttattcctcagcaatgggtaaagcaatccttgccaccttttcgtccaaatctttagacagttatttcaagtctactaagatggtcccaatgacaccccacacgatcacaacaccatctaagcttcaaaaggaccttaactcgattaaagaattaggcgtttctgttgataatgaagaaaacgaagaggaggtcttctgcctcggggcgtcaattgttcgtgatgggcaactatacggtgcgtttagtattagcgctcctaaatatcgtatgcctcaggaaagacgttccgcctttgtcagaatgttattagatacaaaacatgcaatcgaaagtgctatttaaccattaacgctgttatttgactgcacattcggtttccttcaccacactatctcaggtaatagttatcgacaaggctgccaaattcaacagcccttttattaagccaagaaggcaagcatcaaattgaattttttcaatttgatgcttgccttcttcttgaaaacgttttatattgttgtcgtagcataaaggaaatcaagtttctatataagaaatattggagggatcattttgagttttagcatggtcacacgttacgcacatagtccagaagatattcagcattatgacacatccaagttgcgccacgaattcctgatggaaaagatcttcaatcccggagatatcctactcacttatacgtacaatgatcgaatgattttcggaggtgtcatgccaacagacgaaccacttgaaattaaattatcaacagaattaggtgtggatttcttccttcaacggcgcgagttagggatcatcaatattggcggtgctggcgcaattacaattgacggacggaaggatgccatgtccaaccaagatggttactacattggcatgggaacccaaaaagttgtctttacttcggaagaccacgaccatcctgcgaagttttacgtagtttcaacgccagcacataaaacctatccgaataaaaaactgccatttgctaccgcacttgcgaaaccaatgggcgatcagcaacatctcaataaaagaactatttacaaatatattgacgcttcgcaaatggatacttgtcaattacaaatgggatataccgtattagaacccggctcttcttggaatacgatgccggcccatacgcacgcaagacgcatggaaacatatatgtatttcaattttgccgatccagaaacgcgagtctttcactttttgggcaagccggatgaaacacggcatattacgctattcaacgaacaagctgttgttaacccaagttggtccattcactgtggggttggaaccacaaactatgccttcatttgggcaatgtgtggggagaatcaaacatacgatgacatggatcaagtagcaatgaatgaattacgctaatcaagtgttatcaattttgaaggagtgcttaaaatgagtgaaattcaccaaactgaagaggaaattcgtcaacatgaagaagaactggaccattttaagatgacccaatttaatcttaatggtaaagtcgcaattattacgggtggaaatacaggattaggtcaaggttatgctgttgcaatggcagaagccggagcggatattttcattccaacttttggccgagcagaatgggataacacacggcggttaatcgaaaaacgtggtcaaaaggttgcgttcatggaggttaatctaactgagccaggaagtgctgaaaaagtcgttaaggaagcactaaagcagatgggccatatcgatattttggtcaacaatgcgggtatgatccggcgtaatccattattagaatcaaaagacaaagactgggatcaggttatcgcgattaatctcagcgctgtgtaccatttgtctctagaagtttcaaaagtattcgcccaacaaaagtcaggaaaaatcatcaatattggctccatgctctcgttccaaggcggtaagtatattccctcttatactgcaagtaagcatggtgttgccggcttaacaaaggcgtttgcttccgaaatgggtccttataatgtgcagattaacgctattgcacccggctatattaagacggaaaacacagcacctgtgcgcgccgataagaaccgcaatgatgatattcttagtcgtattcctgcgggacattggggtgaaccctatgagttaatggggattgcagtctttctggcaagcgatgccgcaaattacattaatggtgccatcatccctgttgacggtggtttccttgttagctgatcatcactttactgtttgactctctattacaaagctgacaatttacgcgagctccgaggcggcatattgtccatctcggagctttcgttgttatcctatagaaaaaagaaggaggccccttgcaaaaatacacctttctaagccggttaataaacaccggctgcgttgccgttatccggggtgaaaacctgcaagctgcaatcagaacttgtgatgctgttatcgccggaggtattaccggaattgagtttacattcacaatccctcatgcagataaggcactcaaagaacttaccgaaaagtacgactctcagaaaagcatcgtcatcggtgcaggtactgttcttgatgcggtcactgcacgtttagccatccttgctggtgcaaagttcattgtaagtccaagtttcaacccggatgtcgcaaaaatatgtaatctttatgctatcccctatacaccaggtgtcttcacgccaactgaaattcagcaggcactcgaagccggcgtagacctagttaaaatcttcccaggcagtgtagctggactgcctatgattcaagctttgaagggcccatttccaacacttgctatcatgccaactggcggcgtctctctcgataatatggaagcttggtttagtgctggtgctacgcttgtgggtgctggttcaaatctcgtagaagccgctgcccatggtaactttgatcaagtcacagcaactgctcttaaatatcgcaaaaaagttgatcaaatcaaacaatctaggagatgaaaaaatgccaactgttctaacttttggagaaacgatgcttaggctcaaaccagttgaccatcaacggatctttcaagcatccaattttgaggcaaactatggtggcgcagaagctaatgctgctgtatcgctttctttacttggcgatcaagtgcaatacctgaccaagcttcctgacaatccattaggttcaactgcacggaatactattcgtagctttggcgtcaatacgaccaaaattctttggggcggtaatcgtctaggaatttacttctttgaaaagggtactagtgtccgaaatacaaatgtcgtttacgatcgcgcgggaagtgcttttgcgactgtcaaggcatctgagtttgactggccatctctgcttcaggatgttgattatttttatttttccggaattacaccagcaatcggatcagaactgcaacaagccattcttgatgcatgtcgctactgtgccaatcacaagataaccgtcgtctgtgacatgaacttccgtgggaaaatgtggacagccgaaacagcacaaacctatttcaaaacggtcatgccttatattaatgtttgtatcgccaacgatgaagactttgaggcaacattaggaattaaagcttttgatggtaacatggccactgggattgatcagattgacgattttaaacgtggcatgttcgaagtcatcaatcgctggccaaacgttcatacagttgccagtgtggttcgtaacatctactcagttgaaaagagccaatggaccggactgctcgttcaaaatgacgcggcatatcagggaccaatttttaacatgcatgtttttgagggtgtcgcctctggggatgcttttggcgcaggtcttgttcatggtttcatagaagattttaatccgcaaaaaatgatcgactatgctatatccgccagcgtcctcaagctgactattagtggtgatttgaatctcgtcactgacaaagacatcaatgcaatcatgaataccagcagtggtgtgaatcgttgaaaagatggagtttcttacgtaaagtcgtcagcagtaggttttataagtagcgtttaaaggttaaattgggtagcaaaaaacggtatctacctttggggggataccgtttttgagttctatccacgatgagcatccaaaatttccggaccatgcgttgttccgacaaccaccgttttaaccagatcaaggaacaatccgtgctcgacaatcccaacctgcttattgagccattctgccaacaaatgcgggtgttcgatccggccaagatgcagatcgataatgtaattcttagaatccgtcaaagctttgctgccatcctcattcaaacgataagctggtttcaggccttcatccgccaaccgctgtaacagcttgccactaccaaacggaatcacttctagcggcaacggaaactttccaagtgtgtccaccagtttggtttcgtccacgatccaaatattacgtgccgaattaatcgcaacaattttttcgatcagatgtgagcgcccgccgcctttaataccctgaaaatgcttgtcgacttcatcggcaccgtcaatggtgaggtcaattttgtcaaccccgtccagttctttcatcgggatccccaacgactccgcctgtttccgcgtccgaatgcttgtggccacaccattcagactaagatgctcctctttaatccgctttgcaatggcttcaacgagataaaaaaccgtcgagcccgttcccaagccaattgtcatcccgtcttcaacaaactctgctgcccgttgagcggcttcttgcttcaacttattctggtccatggttaaccatccttttcgctttattatcttcattataatatgaattgtggtgtagatggcgatttgtgaagaaaacaacaaattaaagttttcaatttttccgataaatctgctaattagcgaaagaaaacagacactactgcgagtttataaacggatgctttgcaattcttttatactcaccacttatatttacccgttgcatctagttcgtctggttctcccttttctcgcatacaaacattacgataccagtcagcacgataatggtaaagccgattatgatgaaaatgaagttgcctttctcaccggtgtttggcattttttccggatcgtgacggctatcttcactattcttgcctagtcttgttgtctggccatgtttgcttgcttcgttaacgtcttttttaatcaaagcacgttgcgcctcaactaacaatttggtagcataatcaaccgtttcttgagttgactctacattcttgagtgtcacttttccaaatatcaaggcatcctgaagcttctgccaactctcagatgtgtatacttcacccttaagcttattaatgatggctaagacggttttaagtgcactagtatcagcaactttcactaatttctttaacgcatcctcaagcgctgcctttgcttgatccacaactacttgttttgctgctgcattcgcatagactgcttttgcacttgccagcacggttatcaactttttataactggaaggcgtataatctattgccctaacattttccgcatgtgagattaacccctccaaagcagccttatcagtaggaacatcaaccgtaactaccacagaacgactagcaccggccagtccttttgtcttaagcgtcagcaaatcctgattgacagaaaaaccatctgcctgctttttgcgaatgtgaacaggatatttgaaattgaagttgattgggtcatcagactgtcgtggatcggtagccgttaattggtaagtattctcaccgagatcttttatgataagcgaaaccggttgatcaatctcaagtaatccaccaagtaaactggccttattccaaatatttgccataatctggtcttgagtcttaatcgcctgtacttcattagtattggccaacacttgatactttggttttttagctaaggcggcaattgttgaatcacttgcccctggaacggtcacatattcatacttgccatccttaactgcggagccatgtttagctgctaacgtaacataatgatgacgatagacagtgtcagacggaaaatagccattgatgtccttataggaaccggttcttgttgcacgactaatatcaacttgatcattatcttttgcaataatataaccgacattattgctcggatcgttggtgttcaaattcacccaatttttagccgtttcttgatttacatacgtgtgtccatctatggtgatcttagttgtcagtgggtcaatttggcgttgatcaaggattgtttcaatatctgctttcgtcgtgccagagatacccgcgccaagattgacaatttggtcattaagcaaaaaccacgatttcattgcttttaagttctgaccttcatttgtcttatctaacaccatccctacgcttgccacgatcccatctgttgcaccaccgacccatgactgaggacttctagaagaagacttggcaccgtctgcaagtggtgccgtgtcaacagttgtaccaggtaatcgatagggatcaactgtcgtccagtagccctcaccaaattgattgaaatcgcgattatacaaatagagcatcccatcagccgtatgccaagcatgagcattttcagtgttaccatactcgaaattagcaattcgatttgaatacatagcaagtccaaccgcgtattttgacgttttctgcatcacacgatccattgagccatagacattcaaagaatcttgatcattttcttgtgcagttgcttgactcagggctgtcttcagtccatttaaagccgcataatctcgagggttattaaagaagttataataatcccccacctgcgctacccaggttgccactgcttggtagattttttgttttaatcccgctggtgcggcttcagcaattaaggttaagtttgctaaagtttccttccctgtctctagttctgtagtctcaggatttgtgccgggtgcgcgggaaatacttcggcctgagaccatagacggcattcgcccattgaccattagttgaagaaagcctttgtcgatcaaattaaaaacattagcaaattgaacttcactgattgcccatggtgttccgacaagagtagacgaaatacgtgcaatccccttgatcatctcatttccataactaccattgtacgggaaaaaagtgtgctgtataaatgagccatctgcataaataccgtccttagcggtaacaagtcccatcgctttaggtaaattggcttgaaccagtgcgacacgatgatcatcttccaacaataagccgctagcaagaacagaaattgaaatatcggtcaaattagccccagttgccgtatattttggccactgaatatttggatcttttgcataacccaataatggttgaacaaacctcctcaatctttgaggatcctgttgctgtaaatcgtcatagagcaaaatcaatgtatcatcaagttgttgagctgctcctatttgccaatcccaccagtttccagttgaaaaggttccattgtactgcttgacgttgatcataaagtcgatggcatcaagaatcgctcgataaacggcggggtcttgatactgctcactcttaggattgtagtaaccaagtgtcagcaactttatattagtaaaagtcgttgtataatcggctgatgtcgtatccgaactcttcttggcccacaaacgcttacgatcagggcgtcgatccatcgtattccaaagtgtcttgctttggcctgctaaatcgattaaatacgcattgacattcggattgtttaggtctggattccttgccattaaacggttgcgccatcgtgaacgcattaaactgaactgggtctcgtctgccgttgttctattggtccctgtgtcaacattttggtcagattgaccaagagttctttgaacacttccacgctgaacggtgttaggaactcgtgtatcagggtcaatttctgcttgaaccttcagaccaaccgccatccctaatgcaagaacaaacgctccaactccaaataggcaacgcttcatcatcttcctcctcgtataactacaccccaaaggctaattacaagctaccattgtttaagaaataacctttgtgagcttatcaccggttatatgaaagcgcaatcaaacgaaaaagcttggtatccgccagatgtggctacaaggagatctatgcctcgaaaaataaatccttttattttctcatttgcgtcattcgcttagtatggctttatttctcgaccacatataaaaaacatgctgtcttataaaagacaacatgcagatatactaacaaaaaagttaagctgggaaatgttcaatttctcttttccgtacaaacgtaattgctttagctgtataacaatttgccggaattgatccgtgccaatttgttttgtcgctctgcagtccaattttctttgccccaacgatgtcttgaacctgccactcatgactcgataaacgcaaatcaacatcttcactgtttgacaaattaaagccaaagactattagcaagagacgcccgctttcatccaatgtttctttatcagtgaaaccacaaacttgatacccttgtggattacgataacttaatattgatgaaccaaaacggaatggttgtccatgagcaatcaatctttgattagcgcgataaaatgtcaacgcttgatctaccgcatgccattgatctgttgacagatgccgaatgtcacctgaaaggcagacgcgtcctaaaaaggtgctaattagatgaaaatacatttcttcaagcgtgtcatcagcatgtagtacgcaccaaatcaaatttttggaagctggaataacaagccactcgttagcagcaataattggaatgctatgtgtttcgtgggcatccgaaaatgaggatagttccgttcgctcaataaatgctggggtcagacgatgcccaccagaagaacaattctcaataacaagcccgggtatttcatgatgcaacttatcaataaacttcagcgttgccgaaatgtttttttctagtccctctgcaccagactccgcgtcatcagttgctacacccatactgtcgttatagtcaatctttaaataatcaaacgcattttgacgtagaagttccaaaacatgtctgttgagataggcctgtacgttggaatttgtcatgttcaaaaagcggcgtttcaatgttgttacaacatgcccgtttctttgcaccaaagactcagtatcttgaaatttttcactcaaacgcccgacagtttccatttcaaaccataatcctgcctccataccctgctgatgaatctcttccacaactggcttaaaaccgccgggaaaacgcatcatgtcaacttgccaatcaccgtgactttgctcccaatccgatgttttcgacttataccagccagcgtcaatgatataaccatctattgaatgttgcttaagcagaggcaacgattcactaatcaaatgggcatttggccgcccccaagttgtcccccattcattgtagaagattggcaacgtatcctcttgcacaggtgcttgtaatctcctactacatttaagtaattcatcgtgtcctacagtaatataggcaaaaggtgttgtgtatgtctctcctactgcaacatctttataccaatgtccgttatcagcgtcaggtaatcctccaaaaagaactaaccgattatcaagtcttgcggcattcaactgccatgaagcttttccctctagcattattaaccaagtgacatcaaatctattgtcctttaaccccaaatatgggaaaaattgacgaacgggcattgttccatattgggcaatttgaactagcgccaaaccagagggcttccaactttcctccaattcgaatgattcaacaggtctttggtccagacgcccctccatcgcccactttgagcgaattcggataagatccaatacaccagttgggacttgttcatagaagggacttatattgcttagcactattgaaggtagccacgataattgctggtcatgccctgaagtattagtaaatgacactcttacttttagccgttttgatcctggtacccaagacacatcatgtcgataagtatttccgtgactgtctcgacagattgttgtgattttttcttcgtccttgctaaagtgctcctcttgttttacaaagcgtatgctccgacttgttgccgaattgaacatagttaatccattagagaagtttttgtcgtacggatcctggaccaatttcgcctgaatgagagaaaaaccgctattttggttctgacgtaacacaacttgattcgccatatctttagggtagaccatccattcaactacttgagcatcgttaatcaagtaatgtaagattgtatctccgaaggtatattgcttaagcgtcttaaaattcgtcattcatttcccctcaacattttttcggtaacaattaaacgcggatccgttggcgtcttgatggcagttaccgtaactccttgattaataagactgtacaatgcctcgcgttccctgtcattcagtgcaattccgggaagtattgtcctccgatcgtctcgttttgacacatttcctaaattgatggtatggatcttcaatcctctatcaaatagtcgtttcagtacaagtgggctcttgactaatacaaaaactcgttgaccagcatacctatttgctgaaagattattaaaggctttttcctctgtgataattgacgtattcacactcgctggggccaccattctcagcaactctttttgagcattatcgtttgcaacttcgtcatcaatgaccatgattcgggtagccgctagtcgatttgtccaaagtccggctacttgtccatgaatcaagcgatcgtcaactcgaatatcaacaacatcattcaatatttgcgaacctcctttttctacgaccgacctataagaatcctattgccgataatgcaatcgacaaaacaagcacaacaagaataatacgtactggcgtcatacgcttcttaccaagtaaccaataaaccagtaacaccaatagaactggaatcatgcccggcaaaatcgaatcaagcacatgctgtccattcactactaatttcccagcaacatacttagctttgactgttgcattgatcaccgttggaatcaatgcaccaactaccatcaacccaaccacagaaattgcatcagtgattgaagttaactcgtctcgcagtgtcgtgacaagtttagcgcccgaattatatcccatcttatacaacgggataaccaagcacttgattgcaaccataacaaccagccaaagaataaccccaactggatttcctttaacagccatggaagccgcgatgccaccaaaaatagctcctggagtcgaaagtaatagcgtatcccctattcccgcgagcggccccattaaactggttttgatccctgttactgtcggaagtgaattaacgccttggctttcttcaattgcaagatcggctccaattacaaaaggtgccataatcccatttgtattgaagaatgccaactgtgtctgcaaagccttctgcaacccatctggattttgacgatacagaaacttcattgccggaagtacggagtagcaatatgccagtgccatcattttttcatagtttaatgaccccgttgcaccaccaaaaacaaagcgagtcagcactcgacgtttaatgttactaggcaacttttcaacctgtctcatttctgcatttgttaaattctgcttttgatcactcatcaccactaatctcctctccgttgccacctttaattgaagccgttggtgcttttgtattgtgtgtggtcactcgatgctttgatttatagtacacaaatgccgctgcaacgccgaacaaacctacacctaggacagacacctttatatatgccactagtaagaacccaataagcaaagctggccactgtttttttactggcatcgtccgtaacaagatacctagcccgactgctggcaataagccacccgcaacttgaagtcctgaaagcaaccactgtggaacatattgaaacgcagtaacaacaagccctctaccaaaaataactgtcaagagaatagggatccctgtttcacacatcgtcaagataatagcaatccattgccaaattcctatcatcttataattacgatttcccaccgctttttctgcttgatgttggaaataaacattaaccatttttagcaaaacatctagttgaaccatcacaattgctactgggatgccgattgtaaccccgacttttccaccgatgcccgttgcaattgcaagatatgttccaacaattgccgcagctggataatcaggaacggaagcgcctccaaaactgctgactcccagtgtcatcaattgtaatgttccgccaacatacagtccggtcgtcacatccccacataaaagtccggttatgacaccgcaaagtaatgcttgccaaagtccaattgcgctaacccagcgttcgtaattcataaagaagccaaatataataactaagattgactgaatgattgttacatgcatgacaacttctccccctattcgtcgtccggcctggtatcttgaatcagcgcaccagtcgagacttcttgtactcccggattgtcaagaacttgctgaaccacgaagctcaattcattctggtgatttaacaacgccgttaaagcatccacaaaacttatattgacaacaatcttcgcgttttttctgtctcgcaaaagtgtataaaaagttttgaaaggtgtgccttgaaacatatcagccattactaagacatccccagtcactgaagctatcaatgactctgctttggcattaaagtcataaatactgtcatcacccagacaaagcgtatgaacattatttaaatcctttgaaaaacatgccaatgtgtcatagattccttgagcgtatgatccatgactggttaaaataattgtgaccataatagccctcccttgtttttgaattcgctttcatagtaatcttcgatcagacctttgtcaataaatttatgtaatttgttcgaataattgtgaacgaatcttggggtaggtttttctgcaccttctccaacattgaccaagtcctttttttccgttaatcttagggtgagaatttccctttcgatagaaatgagcgaataaataatgaacaactcaaaacgtatagcagatgatttgcgagcactcatcagcgaaggcggcttggtggatgatcagttaccgactgaaaatagcctgatggccaaatatcgagccagtcgttatgctgtgcgcaaagcaaccgaggaattacaaaagcaaggtatcatttataaagtccaaggcggcggtacttttgtaaataaagcgtacaaaaaaaagacactctcgcatgctgttggtttagtcacagctggtgatctcacagaaaacggtcttttaaatactataagcacagctttttttaaaaaaggctatactttgtttacggttgaaactcataactcaccacaatcggaatatgagtcgctacggtctttttacgatctaaatgcagatgctgtacttatcgaacccagtcaaagtgctgtaaacacacaaagcttaaaactattaggagaaatgcaagtgaataagattttcacattctttttattttcctcctatccttcagtatctgcccctttgttctctttgacggatgctgacagtgaagcggctgtcacaagtgaagttattcaaatgggccataaacgcttactaggaatctttcaggtagacgatatgcgtagtgttttaagaatgaatggttttatccgtgcataccagcaacatcctgaggttgctttaaattcttatatggaaacttaccaatcctcagagtcactacgagccgttattgaaagagtgcgtatgcattttattgatgtagataaagaactccgaccaactgccatcgttgtgcacgatgatcggatggcattacaagttatgtccatgttgcaacgcgcgggtattcgtgttcctgaagacgtttcgattgttggattcggagattcgattcaatccagcacagtaacaccaacgctcgcaactgtctcatttgacaaaccggcatttgtttctcatctcgtccagcagacccttcttgctatatcaggtgagaaaccagtttctaaacaatttcccgcatacttgataaagcgtaaaagtctgtccagatatccttatcgagttgactagcgctaattcaaaccaagtttaaggctttcgaatttgcccgtcactattagcacgttaatgatattacatgctttccccccttaactcagcatatgacactccttttaagagttctcgctaagcatatgaaggcgtaattataacgcttagtgttaacttttccgcccactgcaaaaaattcttttcaccacgactaggatcatgcgcattcacttgaaatagcctactcttacctcatgtaaaccaagaaaaaagccatgcattttttcacgcatggcttttttacagcttaatggtttgataaccgtattcagtacttacacagatcgcgtcatgccactagcaaaagcgctttggctcaagatcaactttcacttacaggactttcactcatcaaatgaacctcatgatcagcatgccgcagttcaggccagtactctcgattcgccacaatcaaatcatccagcacttcttttgccacttgagcactaggcaacgtcttcgatagcgtaagtgcctgccagagttcctgataatcatgatgaatccacccgtccactaccagcttctctaccatcgcctgattgaggatcatcccgcgctgaaacaatggaattttcccttgcgttaacggttcggcaccatcttttccgacgatacaaggcacttccaccatgatgtcgtcatcaatattggcgattgcgccattattttccacaatgagcaacatgcgttcatgtgtattaaaggcaattgcacaggcaagatccacgataaatgaggcgtgactgtcgattggaaacgcgccgacctcgctagtacccgcatcaatgatcttttgtgcggccgtgaaaacacgcttttctcgaccgtcctcaacctcattagcgcgcgtgtattcaggatccgaatgggcaacaacataatccgggtataaataatacttgaggtacgtatttggcagatagttaggatccaccgcaagcagatcctgagcttttttgtgggtcgcctgccaactcgcatccatgtgctgcgtgtccacttctacttgggtcagataaccgtgatgcgctacatagtctcgaatctgtggtaaatattcatggccgactttatccttgacactcgtccaccagccaaaatgattcatgccaaaatagcgcacctctaaatcttctggttgtaagccaacaatttgtgacatccgccgctgagttccaaccggcatatcgcaaatattcaaaattttggcatctggccgcagccggcgacacgcttcggccacaatcgatgctggattggaataatttagcatccaacaatccggtgaataccgttccataaagtcaatgagttcaatgatgtcgccgatactgcgcatcccataggcaattccacctgggccacaggtttcctgtccgacaacgtgatgcttcaatggaatcttttcatcctgttcccgcatcttgtagccaccagagcgaatgtgtgcaaaacagaagtcaacatcggtaaaggcggtttggggatcagtcgtccaagtaaactcgatattaggtgctttttcctttaattcaatggcaatcgccttggcaattatcgcttggcgggcttcatcaatgtcgtacagcttcaaagcccgtaacggaaaacgatccgcattttccagcagcatcatgacaatgcctgctgtataggtactgcctccgcctgcaatcacaattgaaaacttcttagtctgggtcatcataaacactcctattcaacttctgctgtgtcgaaacctaatgcggcatccaccgcggttcttactttagtgactgctaatccatagacaacatggacattgttgccttttttgatcaccccactggcgccggtaacattccttaatgtcgcttcatcaaccagatccggatcttttaaaaccgttcgcaagcgggtataacaattcgtcacactttcaaagttgtccgctccaccaagtgcttcaataatggtcgcgactggcacatcttgggcacctttgggaacttgtacaggtggcgtttgcttcttcgcctgataatcggctttactataaagtttggtttcttcggtatcttgctcacgcccaatggttttcaagttgaatcgtccaatcaaaaacctgaacgtaaagtaataaatgaagaaaaaggcaatcccgacgagtatatacatcggccagtgagtctttccgatacccagtggcaggttatacagcagaaaatcaaggaagccatttggtccaattgcccgaacgttaaggaggttcaagacgaccatgctcaaaccgctcagcccagcatgaacgacaaacagtaatggggcaatgaacatgaacgaaaactcgattggttcggtgacaccagctaagaaagaagtcacaacggcaggaattaggattgccttgactttattcttgttttccggtttcgccatttgatacatcgctaaacatgcgccgatcaaaccaaacattttcgaaataccacgtgcatcccagataaccgagcgtgatagtaggtgaataccaggatcggccatctccgcataataaatatttctggcaccttcaaaaatgtgaccaccgatttcttcaaccccaccaagcgaggtatagagaaatggcgtgtaaatgaggtggtgtaagccggtcggaatcagcaatcgttccagtgacccataaaggaataacccaaagttaccggtctgattaattacgtggcccaaaccggaaatacccatttggatgaatggccacacataggtcagtgcgactgccaataaaaccgtcaccggaatcagtacaataaagacaaaacgactgccaccataaatctgaaatgcactgtggaattcagtatcaacaaatttgttatggatataaccaaccgtaataccgagaataatgcccagaaaaacgcccatatccagaatctgaaccccaagcaccgctgcctggccggttccttgaagattctcagctttggaaagaattccccgcagctccataaacttattcatggcattgatgaaaactaagaaagtcagcaaagccgtgaatccggcctctgcttttttcttcttcgccaaaccaaccgctaaccccacacagaaaatcaccccaagattggtcagaattgacaccaatgaccccgacaaaatcaaaccaaagcccttggtcactggattattcataaatgggacaacttcaagcaatttttgattcgtaaagatattgccgatcgcgatcaaaatacccgcaatcggtagaattagcaccggcacaaacattgcctttgaaaatcgctgtaagccatccatgaccttttgcttcatcccttttcacctctccgataggtatatttagtaacctgatatcgttgttggtttaaacttaacaaagtattggttgtatgaaaaccctttcaaagtcattgggaacgcgttacgctcgcttggaacaggttccattcagctcacgaaagccagataaaaagccatacgttttttcgcgtacagctttctttacattttaaatgtctgataattccttaatattacttgtttgcaagcactacttccccaattcaatcacgccgtcatactccgcgcgcaacttcgcatcaagatgatgactcacttcaatcagcgtcgtatcgggatcatcaagaaatgctttggtaacggcttgggctgtttctggatcaagtgcagacgtcccttcatcgagtaaagcgattggttttggtgcataaaagaatcttgccaatgccagtcgctgcttttgtccacctgacaagttttcgccgttttctttgatcagctggtggggtgatttcacaaagtcaacttgtgctttcttcagtgctttttgtagccagttgtctgcatgttttttctttcgccaaagtgcagtattgttttcaactgagtcgttaaataagtatacgttttgatcaatgtactgaccgattcccgtcagctgtgctctggttagtgttcgaatgtcgtgatgatcaagataaacatggccgtgataatccgtaatttgcccattcaaaatcttgagcagggtacttttacccaccccgctgcggccaacaatggcgtatttgccgccgcggttaaatatcagattcaggtgatcaaaaatctttttgccgtcaatagcgtaactcagattcacaatttttagcgcgcgctgaaaagtcgggactgatattgactcgctggcagcttcattgttaaccgctctcgcagcaatcttgtcaaatagtggccgcgttgatttaatctgaacggcatcgttgcttaggctcgacattgagttgaacacgctggcagcaatattcccagttgaactaatagccccaagcggaatcgcacctaagatggccagtacactggtgaccacatccaccataacctgacaaaagatactcaaggcggcaattagatttgaaactcgggtattagtttgcgtgtaagcaactttagtatgaccatatttttacgctgcgtttttcacaagccgacacaattgcctcagctgatttgcattggaaaatacgtcaaacccgttgagtacattggttagttgattcgaaaaggcagcgttaccatctgacaactgttttgtagcagtggtcatcgatttttctaaatacgaaggtccttttaacatcaagatgactagcacgaagatgacaggcaggaacagcaagtggtaggcggcaagtgccagggtcgcaaagaggacggtagccgcgctggaaatcaacgcaaagaactttttgatcgcgttcacctcgatgtttccggcatcattcacgtattctgaaagatattctcccgttgtctgccgatgatattgttcgtaggatttaccggcgattttccgcgaaatggtactgcgaaccgccaccaagatgcgctgggttagcttttcctgaaaaacagtctgaaagtagttgctgacaagaaacgtcatccagacaagcaagttaaccaccgaccattcaaccagtgccagcagattcttggaaaaaacggcatcggtggtaaatgttaatagcaccgacgtcccagtatatagcaaaacattaacgataatccagacaatattaagacatgtccgcccacgctgttgcattaagaagttcttcatagtctatctcccctatcaagcatcgttatcccgacaccaccacaactaggttttcttgatactgcttactttagtcgctaaactggggaggaatcatagtgtttcgaaaatgaaacagggagtaactaactatgaaaaactttggcgcaacttttagatatttacgtgaggcgcgcggtattagtctgagctcactggcagacgatgtcgtgtcaaaaggcatgatttcaaaatttgaaaacggcacctctgatttgtccacgacccgcttttttcatttactggatgccatctacgtcacgccttatgaatttatgatcgtgatgaatcacttcaagccacttcataccaatcgctttctgaaaaaagttaccgcgtgcgcattagctcaaaacgtgccggggctcaagcgtttggccaatgaacaatacgaacgctggcaacagtcgcaatcacttttcgatcaactcaattggatcatggccgcatgcatcctcgccgaaaccgcaaaacaacctttatccgctaaagtcgacctacacgtcctcactgattatctattcaagtgtgaagactggggtaactttgagttgatcttatacggcaacactatgacacagttgccaatcgacgccattgtcatcttttcccagacgctgttagaaaaatgctctctttacactgggttaatcacggtatacgaaacctgtatcaatgtcctgctcaacaccatcgccgtcttgatccgccacaatcgcatccagacggctttaaaaaccgttgcccttttagaacaaaaagacttaccggaatcgtttctcttggaaagaattcttttgaagtactacaaagggattctgctagaaaaaaccggcgaatcgaaaaagggacatgcgcttattcacgctgcactaagcgctttagatgcaggtgactgcgatacgttcatcagctcgctccgagaagcgttagccgatcttggggtgtatcatatttgaaactaaaaaggccgtacttttatacagccttcccgcgtcatgcatcacttttgtcaccgaacccgctaattcagtttctccacctcgccgatcaccagctcaaacaaggccagcatctgcgggtaaaacagcgatgcccgttgatttacctcatccagcgggaaatcatctgcgactttaagcgtccaatcagccattttagccaaagtgctgtctgcgttgcctgtgaaagcaacgacgggaaccggcagactgctgactaaagccgctttatcaatcacactctgcgtctcgccagattttgaaacaacgataaacaatcccaaatcctctaaataattctccaacaacgcagccgaatcccccggagttgaaaagaaacaccgcttacctagaatctgaaattttttaaacatatactgcccaattacgcctgaaaaaccagccgcatacaggtacaaatattgattttcaatcgccgcgatttgttgagccactgcgcgaatggtcgtcacatcattttggtcaagcaccgctgattgcaacggatcgtcagcagcctcaacggattgtgagccggcctcgccatggcgcaacatcgtcatcaacttatactgcatctctacgaaaccgcgataacccattttgtgtgctaaccgcatgacggtcgcggccgatgtgtaattcgctttcgccacgccgcgcacacccagatctaacacacggtcaatgttggctaccagatactgcaaaaccgtgaactcagtctccgtcaagctcttccccgcaaccagcttttctagtttcacaattgtcagcgatcctttcattgttcgtcatgctgatttgtcaaccaatcctgcacaaatgaaaatattcagtcggcatacgtcaatatcgtaacctgatcgccatgcgcaaccggccccgctttaatcgcatcgaacgctttcaccttctccatatttgtaaacacaaccaccacagccgggtcacgatttgaggctttaatcgcagcaatatcgacttgcgataaaacatcacccgcctgaacttcatcctctgccgcaatcttagtctcaaacggttccccgtccatctcaaccgtatccaatcccatgtggaccaacacttcaagtcctgctgcggatgtaattccaatggcatgtttcgtcgggaaaaccgagctgatgacgcctgaaattggcgcataaactagcccttcttcaggcgcaactgcatacccatcgcccatcatcttttccgaaaaacgccatctttgagcgcctccaacggcattagctcgcctgtcaccggtgcagtgaaaacgtcacgcttttcttttttgaacaacccgaacattaatcgccatccccttctgaatttgactgaaaccccgtaacttcacgggtgttattttttattgtacaggaaaagagaaagtcgtgtaaacggtttctttgcgaacgagaaatacaccaagcaaaaacattgcgatgactatctgcggcatgctaccattgtttcagtcaaaagattagcgatagtctttttgattgtctactatgtactatttccaaaagctccatgctcaaaagggagcatcggtggcgaccgatactccccctgacaagaccgttcaagacggttgacataagatttgcaatcaaaagaccgtcatcttctccaaaagattagcgacggtctttttgattgtctaggattgctacctccaatggcaccatgctataataaaacacgaaagggagcatcggtggctgccgatactcccctgacaagaccgttcaagacggttggcattaagttgactaatcaaaagaccgtcatcttctccaaaagattagcgacggtctttttgattgtcttgtattatcagcataatggtgatgatcagcgcaatcaacgataatacgaaatcaccgaagaccagcatcagcatcaacgcatcagcaacagacaactaggcacctccttccgtatagattttgatcatcgcgcataggcgaccacctcacaatacgttggatttgccaaccgtcattcactttcttgtcttgtttattatgccatacaaaacatgaaaacgcccgtaatctcaatgatttcaggcgttttttaatgcttggattgtatttcttgatgcgtcagtcagagagtctcacagtcagaagtaaacctctgtcactaatccgccgcaaccaactcactcgcatccaccagacgcttggtcatctcccacagcttggtcacgtcttccggtcgcgtcaagccagttgccttgtcaataatcgagctgtaaatatgcgggatgacctgtttaaccccggcatccaaggcaatttggagaatcgcttcgtaattatccaagtcgatgccgccagtaggttcgaggttaaagccttccgcggcacaggctttggccactgcgcggaattcagcttcgtgcttcaagccgcccatggggaagaacttgaagctggtgccgcccatgtcttgcaatagggcaatggcggtttcaaccggaacttctgcggccggtttttggctgcttttcggtccagtggcaagattaacgatgccgactttgccagttggtgagaccaagccattaatgacggtctcattttggcctaaaagtgcgcgactggtaccaacgccggtgaagacttgattaacgtgttggggctgcaagacttgcgaaacccgactcaccatggcgctttgattcgggtcgcctgcgcctaagccaaccgataacccattagcggtcacggcttgatattttttcatatcttcaatcgccgcttcatcggttgcgtagttcttggtcaaaacgccgactaccacatggccttccgcagcttcatagatgtctttggcattgtcgacggaaccagcgagcacatttagagcgacacgatttttataatagtttggggttaagttcatggaagacaacctttctatgcgagaatttctttgagacgattgacgatcaggtccatttccgcttgatcaacggcacgaatatcgaattcgatgatcccttcattggcccgatattcgcgcgtgtagatagccggatcccctgcttttagttcggccgtaacctgcttggcattcttgggactggaggcttctaccgtcaccgcggcccggaaaatcgggcggccggcgccatcttggacttccttcacgttcaggtgtggcacctcattcaaagcggccacgaatgggtgtagccgcttcttcatcgcgtcaccggattctggaccctgatccagatactggctaagcgcggtggtaaacccgagcagattttccttgccgattttcatggcgcggccaattccaagtccttgcagtttcgtccaaccgatatatggttccttgccgaaaatcaagccagatgccgggccttcaatcgccttggccccagaaaacagcaccacgtcaacgcccatttcgacatacttgtgcaaatcctcttccgccgcagcatcgagaatcaatggaagttcgtggcgatgagcaacctccaaggcttcctgaattgtcagcatgcttttttgcaccgcatgatgacttttcacatagaaaattgccgcagtgttggctgtaatcatcatctccacatgttccggcgtgcacatattggcatacccggcctcaaccacctggccgccgccgagttcaatcatgacttcttccggcgtgccgtaatcaacattctgtcccttaggcaaaatgatttcacgcttggtataccgcgaagaaaacggatgataaacatgatacttactaccttcaccaataatcccggcgacggcttcagcgatcccggctgacgctgagttcaccaccacagcgccttcagttcccagttttttggcaatgtacgcgccagttttatcaaccaaatccttcatttcaaaaaagtgggtatccccaaactgctgtgcctcaatcgcggcctccggaactttggaaacgcctagaatggtcattttgccgctagcgttgatcacgtgcttcaaatcgtaagtgctgtaataatctgtcatgcgtgttgttcctccaaatcgtaaaccgccccgccaacaactgtgtaaattggcgcgatgagttgctggccggtttttgtgttgccattagaatccgttaataccttatcaccttttgttaggttaaaaatggtcacgtccgcatcttttcctggtcgcaaccggcctttattcaaaagatggaaggtgtccgccggtgcaaaagtcaccatccgaataacttctggtaaggtatagccgagcagcaacatcttttccatcgtcgtcgccatgtcataaacaggaccattttcacgattgcggtggtaaatatccgtgctcaaggacttaggatcaaggccatgatcgcgggcaatctgcatggttttaaaattaaacgaatctgtcccgtggcctacatcgaaaacaaccccacggtcatatgcatcatagacgaattctttgatctcaccgttttcatcaatcatcccattcggcttgccattataagcatgcgtcaggacatctcctgcacccatcgcttgcaaaatatctttgagttcaggcggattggccccgacatgcaccataatcggcagatgtccgagcaaagccgcatatgatcttgccgccaatagtggcttgatgccattatcaatcaccaccgaatggctttcgcgggccttgatgccgacgataaaatcaggtaagtccgcaaccgcatcaaacaacgcctgcttattgactttatctaggtcacccagctcatcctgcgctaaaataccggtgcgaccgatattgatcagtgcgtaaacattggtctttttagcgcgcgtaatgtcgtaaaaactccgaatattgtccgcaccggttgatcccgcatcgatcacggttgttacgccagccttgtacccatcttcatcgggatcgtcatagtacagagatagcttttcatagcaatgcacatgatcgtcaatccacccagccgtgacgtaggattgctggtgtaagtcaatttcctgatgaccgcctgctccttccagctttggtgctaccgcagcgatccggccgccattaatgccgacctcgatcggctgttcacgttctgttttaccgttcttaattaagacatcaaacacaagtgattacctgcctttcgatttgattgtagccatttttggatgcaacgcttggagaaatctgaattgcgtcaacaagtggggaaagttgaccatgaacatggttactcctgtgtaccgggctctccaaaatcttgcactcccgccactctccgaaacgcgcaaactggcgcagaaacctgcacataaggaccttagaccgccaatgaccaaagaccagtcattggcggtctaaggccacttatgctccgatttctaagcgcgccagtttacgctcttaaagtttcaccgggaagaagaatcccataatcatcgcgccaataatcgcaccgcctgggattggttttttccaagcgtagaacaacgctgcgccgactgtgctgccaatgccaatcggaatgctggcagtcacggcactgaggataatcaacggcccaaggaagcggccagtttggttaccggcccccatcataacgtcggcaccaaatgtcgcattgctttggttaatcgtgaacttccgcaccaggaaaatgatcatcccgataattaagcccagaatcgccccagtcaacaacgccaaggcaaagtttgacaccagcgacttggcgccaaccgacagtaagatcgccggaatgccgatgccgacccctgtcaaaatcgaaccgccaagatccagaatgccgacaagtgacccttccagaatccgggcaaacaggaaactcgctccaaacgccgccgctgcgccatacgagccaccggtcataccagccttcagcattgccacaattgccacttcattgaaggccccaacgccatagttaaaatacatggatgttccggcaaaaacgcctgccgacatcattgcaacaatcgcgacaaagccccaatctgcatgccagaaatcgcgatccgcagcttctctcaattcttcttcaattggcgcttgatttgctgtagcttgtttatccgccatcagttaatccacctctactttccgcttaacgtgttatgaatattcgacaaccagtcaggtgcatttaagttaaaggacttcagcaagttgagatcgaatccgcggaagaaccctgataagacgaaaagcaaaatggccgcaaccaaaattgatttcgtaattcgagtccatcctagttcatcaacaccttttccgacaagaatgcctaaaacgacccctggtaccgcattacccataatcatcgccgataaaccgccaaacacggttccaaacaggcctgaccgtcgaccggcatcaattgccgccaaccagaataagattggcatcacgaggttaatcaactgattcgccgccggaacaagcactttaaccgccgtcacttgcagcgattcgggaatcgaactggacgtgacattcaagaaagcaacgaccacgatgccggcaatcgccccggcaatccccattttcttaggattatgcatggtttgttcaacgttacgatttttaaccagtaacccagcagccgcccagttcggaatgacacggtgcgtaatatcctgcgtaaaggcgccggccccaaccgttgacgcccaagcattaaagaagaaacccaacccgaaactaaaatgcgaagccggatcgccttctgccgcgttcatttcgcccagtgttcgaaacgcgcccaaagcttgtgtctttggcgcggtgaacatccgtgctgccccaacccctgccgcaaaaccaaccaatccgccaataatgatggactggaataaaattgtgagaattggcaattcatttcacacccttcaaaatattctttagattcggcaatgacatggcatccggcgatggtgccgcgacgtcttcaaaaaccaaagcgtcaaggtcaatcgccgtaactgcaaccgtcactgccagtgtcactgcataagtggtacgcgtgcgtttaaaaaagaaaaacagaaacttttccgtataactcgacttaaccagtttcagcggctcgactttttcgggaacgatccgcaaaatcgcagtttcggtatcaccaatcagctttttttggatattgctaaaagcggctgcaaaggcttgctgcttggtttcacctttgccagataccgtgacgacttgatgtttggtttcattgacgactgtcatttataaccgcactccttacgcttcgggatacttcttgttccacgcttcgaccagtgctttacccaacgcttcttgatccataaagccaaaaccgagaactttagtgccttcctcgatggcagtcacaccttcttgaatcgagcgcatgccatgacgttccggccatccatattgcgtatgcgcagtaatcgcccccgcaccgccggaaccacagaagctaatgcccatatcggctttttctttatccatcacctgacccaaacgcatatccgcccccataccaggcaccacaacggcagtaccaccagcggcttcaactcctttagcaacgttttgacctttacccatccgatctgcgataactactttaaccatgatatcttcctcctgagcgtgagctggcgcggttagaatcctcgccagttaacacgagataattgcaatcgtaaaatatctccacttcaaatcttgttctgcgccgcttcaaagtgaatcgataacacatacttctccgcatccgccaaatgaccgatgtgccgaaccacttgatcggctaaatccagcgactttttcgagacttccgcaaacatttggggatcgactgccggcaacttttcgcctgactttgagcggttgatcatttcaatcagatgattcgttaacacttgcaactgaaccgcggtaaaatgaatctccgcttgttcggctaactgaatcacgtcactgacaatcacttgaaccgcctgtggatcttggctttgggcaatcattttttgcacttcaacaggtagcttaatttcggcttccagtggtgacatcccccttctgagacacagcatgacctaaatttaaatattcaagaatcgcatggacttccgcgcgattgatggcaaggccatgatcggtaaaaattcgttccacggtgccagctaatttggcatcgtcatgattaggttttccttggtactgcttaccaaacatgatgcgctgggcagctaaaaagacgtgcatcatgaacgcatcggcataatacgggtcaatcttggttggcaactggcgcttgagttctgaataaagactgaacatggtcagaattgtttgttgtgtctgcttttccagatcaggcttaggcttaatcggaactaccggcggctctgctttgagttgttcaagtggcacctgcaaacgtttggccaccgcacgccggatagcggcaatatcagtcgcgtttggcaagggctggacttcaatgacttgcacatccagatgcttcagtgggaaaacgctaatcaccagctcaggatgctcgcgggcaatcagcgcccgcgcatcatcaatggaggcaaatccgaccaattcaatgttgggtatcgccgaagccacgcgctgttgaatcagattggtgatcccaataccggtggcacaaatataagcgacccgcaccgttttcagttggctgtcccgattgagcgataccatgaaatgcaaggcgataaaggccacaaaggcatcgttcaaaatcgggcgataggcggccagctccttatgcaccgtcttttcaatggctgcaaacaactgcggatattcgtgcttgatgtcctgcgtaaacggactgtattgaagcagttgattctccttgccaagcgactggctgaggtgcaggtagagattttcctgaagttgactgtcgtgactgaaatcgtgatcaaccagcgccccaactgccaagatgattcggtgcgtcatagccacaaagttgtcgttctgtgccaccgttaacttctgaccatccgctccaaggtaataagcaaaatcgtcggcccaaactggcaggttgtaaaacgccagtgctttgagaatcaactgaccggtaaacgtggtactgtcgccttgctccacaacccgatgataactattcaccggctgattaatcccttggcgcacaatgccgattgcgagccgaatcatggtcgtgatcaaagcgctgggatcaggcattttctgatcctgttttcccagttgaatcgccgctttcaggatcgtattaaacgcatgatcaaaggtcggctcactcgtcaaaacgagcgcccgtttcggttcaaccaaggcattgaggcaatccaccagctccgccatcaacgtcttacgattcaactgctgagcgataatgcgttccagcaaccggcgaatatccagctccgtccccgtgagtttgtagccataataattcttactcgtgagcttcacattcacctgatgcaaaaaggcagccagtttctttaaatcgttgttcacggtcgtttgactgacattcacccgcgcttgaagctgctgttgggtcgtatagtcacctgtttgcgccaaaatcagaatcatgcggataatccgttcattcggggccaaatagttatccgccaactgctcatcgattttctcgcgcaatgccatgcgatcttcaacgcttgcttcaatccagacgccttttcgtggggcgctttcgagtttggaatggtgcaatgcaagccattcacgaatatctgccaagtcatacttcacggtgcgaatactgaccgccacggcttctgccaactgcttagatgtcaccaccccttcagcattcagtaactgcaacacaatttgccgctgccgagtactcaattgcaacgtgttcaccccctcgtaaaaccacttgccacaacgatgccagacgcctgccagcacgccattcacaccgtccatttccaacctccaccgtcactttaaagcgctttctaaaaagaaacaatacgcaatcattgcacgattaatcgtgcaatcgcatgtgatcgggcaaacaatggcaaaatggtctgttccaattataacgaagactgtattcatgccgctaactttcacccttataaaaatgcttatgtatagggattaaaatgataagtaaacgctgactatgcctgtattgatatggaacaatcgcccagacaggttcagacacttttcacattattaagaacttaatcatgcaaaaatatgtttctcacaccctcaaatacaactgttatctgattttgaatttataaaccgcatcaagtttttgaatgcttcacataaaataataaatagttaggtggcatatccaagaaacgccataacccacctcatcgtcactaatcacagcggcttacgttcatcaaaaaaacctcctgctgctcaactttcggcaacaagaggcatctctattttgctagtgctttttcactcaaactcccgcagtcttatcaagctggcgtccttcttcattgaacacccgaatcgcatcgttagcagctgcgtttgtcatcagctgtttgaagatatcataactgatcgtcacatttgcggcgccggctttgatcgcggccatgacttgtgaggcgtttttgaaacttgcccccatgatcttaatatgcgtatcggtactttgataaaagctgtgggtctcggcgatcattttatatggatcaatgtcgagctgctccatgcgattcacgtatggcgcgatatagtcgcaatccacaacgcaagccatgaagccttggcgcgttgaatatacggccgttcccagcagacattcatcgggcttttcatccctaattgcagagattgcctgatagcccggttcaaacagcggcactttaaacgccattcgggtatcatccgtgtccggaaaacggcggcgcaattcatgataatcagccaacagttcgtccttggtatcacccaccagctgaacgaataaaacgccgggctttaaggcgcgaatcttagtcagctgttcaaaacgcggctggccttccttaagcaacaacttaggattagtcgtaacgccttcaaactggttaaactgcaacatttccttaatctggctgagattggcagtatcaatgaacatcgcttattcccccttcataaccttaatgacggtgccgacatccaaatccggatagggcttttgctccaagtacagtgatccggccagttccggtgtggtcgcaccgtcaaaaacaatcgcggtgtgacctaaattgcctaagttcgtattgacttcgttgcccaccgccgtaatggcataagtctgatcaccaaacatcatcacatcgccgggtttaatcggctcaagaatttgattcactttgataatgaagcaggatgaccgcaacgcgtcaggcgcctcatctccaaaaagaatcgccatgttaatatccttaaacccgcgcgcttcggaaccaacttcaagaatggtggtttcatatttcactgttgctgctactgacgacaccgcactcacctctctaaaaatcctgctttattttgcatacaaaccaaaacttgctaaccaagcgaccacgactcggggaaccccgtttaagaatcgcgaatacaacactgaaaccacaccgacttcaacggtttttgagtctgcttcttcaagccctaaaccaacaggaatgaagtcagccgcattttgcgtattaatggcaaacagtgccggtaatgcatattgcggctgaatgttgccgcggccgatttcaaccccgatcagcgtcccaatgacttgggcaataaccgctcccggtccgagaatcggggataagaatggcaaggaacagataaaaccaatcgcaatcaagccaaaaacattcccagccagtggcgtcatgagtttggcaaaccaactgcctaaacccgagccttgaatgatcccgattagcaacgcaacaaaggccataaacggaattacggtgttaagcatggtctggacagaatcttttgccgcttggttaaaagttgcaattaccttcccggcaccaattccgatccgggcaataaagttaggctttttcatttgggcagtgatcgttttgttcgtgtcaaacttggcttcgcgagcttcagcagcttgctcgtcggttgctgccgtttgcgcttctgtattcgttgttgccgctgcccctgcttctgccaaggcagcatgctgcttgccggcttcaccgcgctggtcaaatggaacgccatttaacgcctgatccggaacagcatcatccggcaatgcggtaatctgattcacatcaacattggaaacatacaatttaggcacaatatattttgccagcggtccggattttccggtgggcaacacattaatggttaagatgtttttcttcggataaatcccgcagcgcagcgttccgccacagtcaatgatcgccaatgccgtttcgtcttcgggaatggatgttttaaatccatcgacggcttccatcccggtcaattccgcaattttgtccacgatggctggccggttaccccctgtcacgtagataaacttatgcttctgttcggtcggtgtaattgtcaacggcccgccatagccgcctgatcctttaacgacttgaatgctatgccattttttctcagccatgatcctaatctcctcattttaaaatcgcgtcaacttcacgctatgaccgctgctaaacttcttgtccgttacgtgcagacagatcaacggttttgctcagagtaatgccagtttgcttggaaacataagcagttgtgaagtcggtaatccagccaccgataaagttcatgacaatcccgactaacatatagcgaatagccagatccatttgattcagtccgagtttttgcaccccttgcgcaatccccaaccagacaaacagttcacctggattgatatgcgggaagacgccattactcgtatgacaaaactgggcttgggcggcataataactaggcttgtagtattcaggcagaaagcgagccaacgtgaaacacattggattgcccagcatgaacgccgcaagaaaaggtaaaaccagataacgcattaacacattacgacttgctttttgggcaaaccgttcgatgcgttcttccccgataaaggcaataatcgtattcatcagtaccaacaacagcagcacaaccggcacaatgttggtcatccaactaataaacgtcttgccgccagtttgaaacagcttcataaagccagcggcaaagtcagaaatatattgcatgatggcatccccctagatcgtattttttctaaaaacatgcgccaatgcatcaggcaatgctttgatgcgctgaccgatctcattaaaaatcggcagtgcaaacatgctgacgcggctcgtatcaaaatcttcgaaactaagattattcgttttataattcacataattacggtaagcattcagaaaacactcacgctcggtccgactcagcttctgcagggccgtataatcagcgccgacttcagcgactaactcaccatcaaattgagcgatttcgcgaaaccggctaaaaacggtcaaccctttcatcacccgaatttcctgaatccgatcattgtgatccaacccaatcaacatcagactgccttgccgaaagcgccgtggattcttgccgattaagacgcggccttcctggcgaacagcatgataattgcgggcaaaattacgaatttgaaaataacccattaacgcctgcaataaaaaggcggcagctacgaaaatacctagtatcaaaatgttcattcataatccctccgttacaatggttaacggatcgcgactgtctgtaattttctgaagattagccatcgccgtttcattcaccgccagcaaaaacagcaaatcatacaacatggacaaatcttccaacgcctttttgcctaaggtccgcggaatcccgatgacaaaaatatagctaacggacttgccaccaatcgtgatggcatgtgtcaacacgctcagatgcagaaacaagcgattctgatcaatatcggcaattgcatgcggaatcgccgcgccattatcaagcacaaatttggtggtggcttcatgttgaatgagccgctcgataaagcctgtatcgaccaaccctgcctggcaatctgcctgaagcgtcgcgcgcaagacagcttcatacgactgccctggttgattgtcatagatttgcgcccgccagataatacggccagcatcaatttcatgttgcacagccgaggcgcgcaccttcgtctcaagcacccgatcccgaaaaatgtcgccaatcatgaccacgggaactttcaatctgaatgccaatggccggtctgtaaaaaccatgatgagttgatcctgatgggcaagaatatcggtctcatcctgaaaagtccgaatgctgacttgcgattcaaacatggtgttcaattgactttgcaaatattgcaacacgctttgccccatgcttgaaaagaatccaacttgcggctgatccagcggcgcccgatccgcatgttgcagcgccatttcaaagtaaacggtcaaataattaatctcgacatccgcaatgtgaatccctaaaatttcttctagcttatcaatcatcaccatcgccatatcggccgctaactgaaaccgctgaagcatcttatcggttaaataatccgatggcgaaatatgaaaaatgccgcgattgatcagaaaaatcaaatgatacttcgtcgtttgataaaactgatcatagtcaattttggcatcaaccaaggttcgaatgtcagctgcaattcggtcgaaaatgactttatttgcctgtacctttcgggctaacttttctgctgataataatttatttgcgtacaggttaaacggaaacgccaaaaagttatattcttcctgactaaacttgacccgacaccgatcctcaatgtccgcaatgatgttaatgaacaaaggtgaatcttccattaagttcgtgtaatacttgctgatgccgttaagttcatagtgatgacgcttcaggaaaaccacaatttgcatcaccttttggaagatctgggtggtactcgttttgatcttggccgcattgagtcggctaatcaccgccgcgactaaagtcttatcgtcaaaaagccttgcctgtacatagtcgaataagtggttataaatcagcatcgttaaatcgaccgttgagcctacctgcagcttaatgccgcgactcgttgcactttcaatgccaagatcgtaattttttaaccagtgccgacacgcgtctaaatcttttagaagtgtgccgcgactcacggtcagctggtcggcaatctcatccataggtacaaatttccgttctttgatcaaccgaaacagaatctccgcctgccgtttttgcttgtcgttattatcaatgttttgcttgaacacgcctgactgaatcagtgaaaattttcgataattcagaatatgcaggaagtacccgcttttgttaatgcgaatttcggctgcatcccccaacgactcgcctagttcatggatatatttttgcatcgtgcgtgtcgaaacattctcgctttcagccaattcgtctaggctggaggtaccatttgccaaaagataacgcaaaagccgataatccaaactattcaatcaggtgacctcctccaaattaccgattatccgcgcgacttgcctcctgccacatttgttgtaacgcctgtgatataacttgctcgattcgataagaagtagttcaccaaatccgctacttcactgagtttcccactgcgacccaatggcgtagtcgaagtcgaacgataaccggcgcgaatggcttcaacggtggtatcacgcgtgtacgccaaggcttcttcatagcttggtgttcgcaagccggttgcttccataattcccggggcaaccccgaccacgcgaatgttgtatttacccagctctttggcccatgaacgcgtaaacccgttaatcgcgcctttacttgccgaataaacactttgaccaacagagccttccaaaccggcttcagaagacatattgaccacgacaccgtggccttgcttcaccattcgccgcaccactgcctgagaaaccaagaacacgcttttgacattaacactgaaaatctgttcaaacgttggcacgttcagttcatacttgccatgtgggtctttggggtcaaccaaaatccgcggtttattgatacccgcattgttgacaacgccccagatttcaccgtttattttttcggctgtaacagctagattttcaaccgcttccggatccgtgacatcggtatgaacataagtcagcttcggatctttcaagtcgccttccttcagatcgccgttaactacattggcaccgttatgaataagttctttaacaatcgcggccccaattcctgatgaaccacctgttacaacaatcgtcttaccatctaagcctaaccaatctgacatatgctatcgctccttttcatctttcgtttttatggtagcgttttcttcgactaggcttaatccagtgattttccatcaaccctgaaaattcgtgaaccatgtcgtttagtttcaggattataaaaaagcagatggatctttcgtaacttacgaaagatccatctgccgttattttttggtgatagttatggtttaagcaatggagcaacttgaaaccaacaccagccgcgtcgttagtgtaaagtttctctcggagcatgtgggtgtcaaacacgagcacattagtttacacgattcccgtagcagtgcaaagcggcaccttgttcgaatatcaggatagaaagcaagagctggcggagcggtggcgggctcagtggtgaaattggtcttaagcggagtgggcttctccgctttagaccaaggccgagcttcgaaaccgcggtctttgcgggttcgaagtcgtgcccaccacgttccagcccagccaccgcggagccagctcggagcatcggaaatcacttaattagagtagaaccgagaaaaagttgacacttgccgccgcgtcccaatcgttgctcatacgtacaatatgttgtacaatattttcgaaaggtaaggtgccgttatggaagcaacgaattatagtgatttccgccgcaaccttaagcattatatgagtcaagtcaacgaagacgccgaaccgctactggttaccgctaaagatgatgatgacaatgtggtggttatgagcaagcacgattttgacgccatcgaagaaaccctgtatttactcagcaatcccaagctgatggccaaaatcaaacgtggtgatgcccaaattgccgctggaaaggctaaacagcacgagttgttaacggacttcgatcatgattaaaacctggaccgatgatgcttgggcggactacatgtattggcatgatcaaaacgacaagcggacaatcaaacgaattaatcaactcattcaagccattgaccgtgacccttataaaggcatcggaaaacctgagccacttagatatgcgctaaccggaaaatggtcacgtcggattgatcaggaaaatcgcatcatctacagcattgaaaagaaccacattaatattttcgcctgccgcactcactacagttaacaatcatattgaagtttgcggctcattcacaatctttgagtgccaaccatcgttatttcggtccaccatccaatatctctgattcatagccagcaaaaaatggattcaccacttttaacggttgcgaatccattttttgtgtcgttcagggtctaccatctatatatttggttatcagaataatataacaaaattgccttcacccaacactcacgcttttgtcgcatggctcatcgactttgctccgtcctgaccgtaatacgcattggccccatgcttccgataataatgtttatccaataaatactgcggcaagtgcacatcctgatgcgtcaaagtcaatgcatgataatccatttcggcgatcacttccaaaactttggcattataaaccgcctttgcaggagtcgcgccccagctgaatggcccatgctggctgactaaaacagcggggaccgcgttgtgatcaatgccgcgatccttgaaagttttgacgataaccttgcctgtattttcctcgtaagcttcttcaatctcttgttgggtcaaggcttccgaaatgggcacatcaccataaaacgtatccgccgcggtggtattcaaattcggaatatccatgtgcgccgaagcaaatgcaacggcccacggtgaatgggtatggacaattccgccaatgtcaggaaaggcattgtacaaaacggtgtgggttggcgtgtcgcttgaaggattcaactggccttcgacaacttcgccttgaagattcaccaccaccatgtcatcaggtgttaagtcctcgtaatcgaccccggaaggcttgatgacaaacaagccttgctcgcggtcaattcctgagacgttcccccaagtaaaggtaaccagatccaactttggtaactgcatattagcggcataaacttcttgcttcaatttttctaacattgttaaaacaccccttctcaattcatcaaccacgttactgtgatacagcgcggtccgatttaacatgtcgctttaggcaccaccgtttaaaagtaacgataggttttcatttgcaaaatctatgaaagcggttttaaagacaaaaactctgatataatgggacataaccacgtaaagtcggaaaggaagtttacttatgctcaaagccattgcacttgatatggacaacacgttactgaacagcaataaagaaatcagtgtcaccaatcgcgacgtgcttcgttacctgaatcgcaaaggcattcgcgttattctttgttcgggacgcccttttgccacgctgaagcccttcttggacgaattgcatgtgaccaaaaatgatgatgtgtgcgtctgcttcaacggcggtttggttcgcctagttcgtgatcacaccgtcattaaggcaaacaccttgagcaaggaacagatcaagccggtgtatgacctcgttaaggaaaacgggtttaagctcgatattgttgccgaagatgaagtgtattcactcaccgaatttggtaaatcaagctatcagacgatgattcctaagcagatgccgtttatcgataccacgttcagtaaagtgccggccaagcttccgattttcaaagtcgtggttgcaggcgagcctgccatgattgatgccgcatcagacgctgcccagtcactcaagcagctgaccgtcacgcgatcccggcgcacgctgcttgaaatcctgccgccaaatgtcaataagatgaacggtttaaaagccgcactcaacttttaccgcatcccgcgcgaacaactggccgcgtttggcgatgaggaaaatgacaaagacatgctggagtatgccggcatcggggtggccatgggtaacgcgattcctgaaatcaaacaaattgcggacattaccgtgggctcaaatgatgatgacggggttgctaactatttaatcgattacttccagatcagccccactgccattcgcctatagttaaatgaatcgtctaaagccggcaagcaattggcggcttttttcgtgtgcaggtcagcaggtgcttcatgatgggacattggtttttgccaccggctcctgaacaaaaccagcctgcacaaacagcggatcgaaaaagtccttggcctgcttcacttcttggattggatcagcggccttttccgtccacatctcgatcgtaaaggcgccgctgtaatcaaggcgttttagcgttcgcagacaaccggcaaagtccaccacgccagcgccaaacgggacatcgcggaattgccctttgctttttgccgtcaccgcttgggtatccttcaaatgaaccgagacgatgtttgcaatccccagttcaagctcgcgaccgacattgttttccggccaggctgacaagttgccaagatccggatacgcttgcaaccacggactcggaatctcatctttaatcgtcttaattttggaaagtgaattcaaaaacggatcgtccatcgtctcaattgccagcatcacttctttagccgcggcataggccacaccgcgcttcaggttctcgataaaatattctcgtgaagctaaggttttcggctcatagtaaacgtcataaccggctagttgaacattgcgaacgcccagatcactagccaaatcaatcgccttacataacatcgtcagacttttttcacggatcgccgggtctgccgagcctaatggaaaccgacgatggccgcttaacatcaatgtatggatccgcacccctgtttgccaacaagcatcacgcaccttcgcccgtttcgctgccgtccaatccaaccgggccaaccgttcgacactttcatcaaccgataactccaaaaagttgaaacccaaatcccgaaccattttcaaccgttcaacccaagattcggtcctgggcagtgctttttcgtaaattcctagtgaaatcacaaatgttccctccttgtgagcgcgagccggcgcggttagcatcaaactgcctatatcgcccactcatcccctatttttggcaacaaaaagctggcgggcgccttttgtccatgaccgatcaaccgaattgttaggctggatcggctaagctaagggccttcgccagcttgctgtttctgaatagttaattagcaacctgcacaacatcaattccttgacggcgcaagtcacgcactgctttttcattggcaaaattatccgtgatcaacacatcgaccgcagccaaatccgcaacatgataattgctggtaaccccgaccttgcgataatcagccacgcaaatcactttctgtttcgtccgcctgatcatggtggcattcacctgagcctcaaaaatattctgagtcgtgacgccgcctttttcactgataccatcgcagccgatcaacgtgaaatccgactgcatcgtctcaagaatctgaaccgcaaccgtccccaccaacgactctttagggtagcgaatttcgccaccggtcaggatgattgaagtttccggatggcggacacattcggtggctcggatattattggtgatgatcgtcaaaggcatcgttgccaattgattaatcgcccgccagcacagcgaactggaattcacgaataacgtactgtttttgacaatatagctcgggaccgcagccgcaatcgtatccttcaacagttcaatgccggaacgcgaggcatgattggcgggcgttgcaacgttagccttttcaaccagcccgtgatgccagtgaacctgccccatttccgccaaagctttcaagtcgcggcgcaaagtggtaatcgaaacgtcaaactgccgggccaattgttctaccaccaccggctcgccttgatccaccgcttttaggatcttcccccgccgtgcttgaacattcaccatcgagtttttcaccatcatcacctcataaacctagaccgccgcgcttagaagctaacgaacgcgtcatcataaaaatcagttcgtcttacttaccccagatacgaataatttcattctggaaatctgtagccgctttggctggatcaggtgcctgagtgatcgcccggcctgcaatgaacgtataaacatcgacacctgcaaataacttcaacgtgtccacgctcaagccaccggttacggaaacccgaaagcccatatcaaccaacattttcaccttagcaagatccttttcaccccatgagccaccggaaagcaaggcgtcgcggctttggtgataaattgcctgagtgacgccaatgtccaaccaggattgagcatcttctttggtccagttgccatataattcgatctgaatttctttaacctgcttctgggccgcctgaatcgttggaattgttgcggaacagatacacgtcatccaatcagcacccgcatccgccatgtttttggccacagtcgatccggcatcggcacatttcgtatcggcaatcaacactttatccgggaacaacgcccgcaacgcacgtaccgcaatcgttccttcctgcaagatcaaaatggtgcccgcttccacaatgtcgacaatgttgccaactgcgcgaatatcgcctaacgcactttccaacgtattgttatccaaagccacctgtaaatttggtttagccaaaatcgttcctccttgtctgccatgttgctatgactgttctgttaatttgatgattgataaggcgccagctcacggccgactcgcgcctgtcataacgcgctccccggcgcagggatctgcatgtaaggaccttggtcgcaatggccaaacccgggccatcacgtccaaggccgcttacactccgatccctaaccgcgccggctcgcgctcactatttcactaaatccgtatcttcacgcactcgttgttcaacttctttatctctcatcacattcttaacgccaatcacctgaacgcctttttccttggcatctttgaacatatcgacaaagtttgtggtggtgaagaccatgtcatattgtttagccgtgcttttaccttctgccaagttggtgtgttcaatttgggtaattggcagattcaaccgcttaaaggctttctgcacactacgcatcatcatcagactggtccctgaaccatttgcacacgatactaagattttcatgatatttttcctccatattttgcgttagcttggtctcattcactttttacgtcgagacccgagttgaaaagactactgagcttcttttttctttgcgacattttccttatattgctcgtaatccgtgaccattaagaagtagtttttcggatcatgccgatattcgagttggggaatcaagacgaggataaagacaaccaccacgatgccggcaatgcccaagatcttcatcaagaccgtgaagaatggccatacggtatcccagtcgaacatgccgaggtagccgccaaacttcgataacccgatccaggtggcaatgagcgctgcgccaaagacttggatcagaccgctgaagaatggcaggatcatcgccgcctttgccccggctcgccggttagcaaagaccccaaaggctgcattatcaaagaagagcgggataaagccggcaatgataatcgttggcgaatggaacaggagcaaggcgccgattgcgagaaactggcctaatgccccaaacaaaaacccgattgtgacggcgttgggttcgccaaatgcgaaggtcgcagccacgtcaatccccggaaccgaacctggcaacagccggtcggaaatgccggtaaagctttccgtcagttcaccaacgaaggtccgaaccccgagttgcagaatcgtgaggttaaccgcaaatccaagcgatgtggtcatgatataaaacaggaaactgccatttggcgccaaaccagaagccccttttgaagccgtaaacacgccgataaaataatcccggccaagaatcaacataataatgccgaagaaaaatagcatcaggatcccggtggcaaccatgttttcattaaagatcttgagaaagccgggaagttcgatgtcttccagccgccgcgcctttttcttggccttcacttcatgcgccttaaacttgtctgccagccacgatacgaaggcaatcccgaacatttgttgatgcgcgaccgcaaacccgccgccatcggtcaaatcctgggtataacgcacggtcatgttcgaaccaaccgcccagtaaagtcccaagacaacgcccatcacgagtaaaacttcgatccggcccatttgcgggaaacaaaacagcagaatccaaaacgccgtggctgcttgttgcacctgcacattacctgtcgtaaacaccgcgcgcagtttcgtccatttctggaaccgtaccagtaaaatattgaaaacaaacgcaaacaatagtaacaacatgacatcgccaaaagttcggccaaatgtcttgtccaacccttctgtcacggcgttttgcccgaagtacgggtcaatcaccgtcgccgttaagttgaaccgatcttttaacccggtcagaattggtcggaagctgttgaccaagccgccagacccaaccattaagatcatgtagccaatcaccgctttaaggaagccggcgatggattcgtataatggcttacgttccaagatgtacccgagtaagacgataaacccaatcatgtaagcaggttgcgtcaaaatatttgccgcaaaataatcccatacgctcactaagaaatctagaatttgctgcatgatgtgctacctttccccttcagctccccgcgtcaacaatcgccttaaaatcatcaacgctattgacggccaacaattggtcaatcaatccttccgtcattaacaagtcggaaagatctccaatattttgcaaatgctgctccggatcctttgctgctaaggtaaagaacaattgcgcctgtttttccggatcagccggatcgaaaacaactggcgccgggaatttggcaaacccgatcgccgtccccaaaacattttcactttctgccatcgcatgcggcatcgcaacgccaggcacaatcacgatatacggtccgtttttctcaacattgccgataatttcatccacataacccggtaaaatgtattgatgttcaatcagtttaccggctgcttgttgcaaggcatcttgccaatcttttgccggttcgggccgaatatcgaccaaatccttgcccaaaaagtctttcagtaacattgttgatccccacctcacctgttttatagaaatgccgggaatggcgtatcgtttggtaccgagaatgtatcgtggaaaccgcggtcatacatgaattccatccgatccttgtcatccggaaaagtgaattcaccgccgacttgccagataaacggcttgaacttgtattgcagccggtctttccgcattttccatagcgcttcgatttccttcgggtcagccataaagtttgtccagatatcgtaatgaaccggaataacgacttttgtcttcagtgattcagccatgcgtaaaatgtcaattgaagttactttgtcggtaatgccacggggattttcgccgtatgcccctaacgcaacgtcaattttgttttcgttaccatgcttggcaaataggttggagtaatgcgaatctgcggcgtggtataaatttccgcccgtggtttcaaacagatagttgacggcaatcttgttcatatcttgcggcagtttacccgcaagctgaacattcggatcgtcttcggtcactaatgcggtccgatcaaaactttcaagcactttgaccttggtttcgccaattgtcacaacatcccccggtttgacaaccaccgtcttttcagccggaacgccccagccttgccaaatttcacaaactttttccggcccatagaattttgcatccgggcaattggcattaactgctgccgccgtgttgatgtcgagatgatcgctatgaatatgactcacaaacaatgcgtccacattcttaatggcaaatgggtcaatcacaaatggctggttgcgcaggtttggctgcatctgctgtaccccgctcatccgcatcatctggtgacctttgcgcatcatcccgctaccatgtgaccgcttaccagtgccgcaccacatatcaactaaaatgttggttgcttctgccgtcttcaaccagatgcaggtacatcccagccaccacattgaaaaagtccctggtttgacctgtttatccgcgatttcttcattcaaccaagtaccccattctggaaaagtgttaagaatccagtcttcacgcgtcacgttattgatcgtcttatctgccatgatgttcctccttaaattcgtttcccgatttcactttttatgttatggaatattgattgcgcttacaacaccgctatatgcaccttttgcggattatatgaccttttatgaactttatatgcatcttagcaaagacgatctgcttctttttatgaatcaaatcatatttcatattggataaatacataaaatacatgttgaaataactgccgacctcaaaatcgatccagaattctcgttggaaaaatttgcgaccatgtctgtaaaaaacatcacaatttagttaaacatgatttaatctataagctttatctacggaaattgcctaatcagtaccgccatcctacgtgcataaatttatccacttttactagtagatttattaaacgctatttgaatttaaattaaacaaattattcggcaaaatagggcgcgaaccgtttctgaatattttgacgattctttaagatttcattactttcgccaccacccaaaagcgcccaggttgctagggaaccatctaccgatcaagtaaaatatgcgtcagttatatcaactcattttcgcttcactattttgggatacctaacttttatttacctatcgcattggttctgattggcagcaatgaaatgcaaacgagaaaacgctactttagccgccactatcaggaaaagttttcactgaccgaaattttcatttggcgcttgacacaggcggcagggggttataagcttgcggttattaagaagaaatgagattattttgtctaaaatgtgatttctttgggtattttggtgttttattttcagattcattttttcttaataccatttaagagggggacgggcgtttatgaacaagaatgcgacgatcgaagcgaaacgtcactataagatgtacaaggccggatctagatggatgacggctgccattatcacatttgggacgagtttagttgttttaggcggtactgccacccagtcggtttcagctgataccaagacaccgactgcagacaaaacgacgcaacctgtcaaccaagctcagacgcagacggcgacatcaacggcaagtagtcaagcgaccactgctgatgccaaggataagacagctgagacacaaccaacaaccaccactacgactaagcaagtaaccgcacagtcgcaggccgcaccatcgacagctaccaaggctcaatcacaggcaagcacaacgaaccaggcgcaaccggcagcagcaactaaagttcaaaccggtacgccgtcatctggtgccaacacgcaaccagctgctaacaccgccacaaccaaaagcgcaacatccacggcatcatctgctgcaacgcaatcggccgcaccggctagcaatgctgcaaccacgaacgccgccaagacccaatctacggccgcaaccacaaccgatccaggaccggccaaccaagacactttgactaagggtaacgttaagggtttatggaatgaaggctatcaaggccagggaatggttgtcgcagtcattgattcaggggttcaggctcacgacgacttacgcctcagtgatgacagcaccgccgccatcaccaaagaaaaagccgaagctgccatttccaaattaggctatgggtcgtacgtcaacagtaagattccatttgcttacgattacgtcaataacgacagcgtcaacaccgggaccacggtggctggctctacccacggcgaacacgttgccggtatcatcgcggctaacggtacgaccgctgacggcgcaaccggcaatgaaaaagccaccacttacgtaaaaggggtggcgcctgaagcacaaattcttgcgatgcaggtcatcgatgaattcgcggatgaaaatgctaatgatatttcgcgcgcaattcgcgatgccgtaacgctcggtgccaacgccattcaaatgtcactaggcatcggcgttaccgagcaggatctcactgacgaagaacaagcagccgtgcagtatgccactgatcacggtgttttcgtctccatttctgctgggaacaatgccaacgcaggcagcattatcggttccaaaacgtccaatgatatctccacggcttactcgccaaaaaatgattcaaccatcggcgatccaggtgcagcggcttctgcaatgacggtcgcagctgaaaagagtgcaaccggtgacaaatcagaaatggacggcttttcatcatgggggccaatggcggactacaccttgaaaccggatatttccgcgcctggtgataacgtcatttccacggcgatcgatccaacgaccaatacccaaacctatgccactgaatcaggaacttccatggctggtccttacaatgccggcgcggctttgcttgtgatgcaaaaaatcaaagcaactcggcctgacctgcaaggagccgaccttgtcaaagcggtcaaactcgcgctcatgaatgccgccgatccaatgaaggatatcaattatcctgatacttacatctctcctcgacgtcaaggagctggccaaatcgacgtctccaaagccggcgatctaaccgttagcgctgaaggcaacaaagacgccggttcggtttcgctaggcaaaattggtcaaaccacaagcttcaccgtgacactgaccaaccatggtaagaccgcgcaaaattacgttgtcgataccaacggcggtccgctcacgcaagttcaagataccagcaatggcaacaccgtccacgataagaccctcatcggtgcaactgtgaatacggacacagccaacttcacgcttgctgctggcgaaaccaagactgtcacctttaagctatccctcgacaatactgtcgcggctaaccagcttgttgaaggcttcctaacctttaaggccggcgatacctcgcaaacaatcagcgtgccgtacttaggttactatggcgatctcaccacagaacaggtagttgatgcgtctgccaacagcggcgagtccatttttaatggcggctatttggttgatggcgccaacacaccactaggggtcaccgactcagcatcactcagcagccttgtgaacacagatacaaccggcaagtatacttggacgctggttccaacctacgtcgacaacaaaaaggtttcattttcacccaatggcgatggtgccagcgacaccgtctatccatatgtattttccaagcagaacctcaagtccgttaccatccagattctagatgcacaaggccatgtggttcgcgtgttggataaggaaaacaacacgaccaagtcctatctgcaaaatgggaatagctacaactctgacttaggactgagcacggatatgcgtctcgatccaaatgccttcacttgggatggcaaagtttacgaccaagcaaccggtaaatatgtcactgccccagacggcaaatatacttatcgtctggtgaccgaacaatacaacaccggcgctcagcaaaatcaggactttgatttaccggtcaccgtagatacggttgcaccgactttgacaggtctgagttatcaaaacggtcgcgtcaccgttaactacaacgatcaaggtgcgggtttcaccaagttcagtgacatcgcgttgaagatcggtggcaaagcttatggcgtcagtctgaacaacaacggccagaataacgatggtaccttgagctttgacctcaccgcagcccaaaaagctgcacttgaaagcagcgatggcagtttaactctgacgctaaccgatgtcgccggtaataaaaccagcaaaacgctgcaggcggtcaccggtacccaccaagcaacaacgccaacagcaacaaccgccaatgtggcaccgcagttcagctggaaagttggcgatggcccatacaaccactggcgtacagatggcttcgttcaagcagtatccgatcaaactagctttacggcctatgctcaagttccagctggcgttgattggattgtctatgccaccgacgccatgactggtaaagtcttctccggtaaagttgacacgaagaccggcaatgtcacctttaacttaaccgcatccgctccatacggcgactttgtgggtaccgtcctcgcgccaacagctgattttggtacctatgaacaagccggccgcgctaacggagatgaaatggtcgtcttcctggatacagatggcaccgcgggatatggccacttcagccagaaggatcctcacgtcgcggtaccgctgcaagataacgctaaagccgcggctaatgtgaaaacaaccagcggcgctccggtattgggtggtcgtgccttttctcaaatcaccacccacgcacaaccaacggaagggctgacgtttgataaattcaacgacaattccttcaccttggtcggcgccgataaagtagctgacatctacaatgccaaaacaggtcaattaaccatcaccggtcatgttgatcagccagccggcaagacgttaaccgtcaccagtgcaaccgagcctgcgaagacggtcacgattggtgcagacggcaagttcagctttaccgtgccattcaaagccgcagaacaacaagcgatcggctatcggctgacctcgaccgccactgatgggtccaaaaagactcaaaccgcgtatggcgagctgcaaatttacctcgacaccattttcccaacgctgaatatgccgcaagctgatacgttgcaggttgatgacaaaggcaattacgaaatcaccacaaccagcgacaccttcaccgtttccggaaccgttaacgacaacatcaatggctaccgcctctacacaaacggcgataacatcgtgcaccagaagaatctagctgggttcaacaaccaccttgatccgctgtcaacgacttccaacccatatggtgcagccgccttcacgcaaacctatcaattagcagacggcgacaattacttcaccatcaccgcggttgatatggtcggcaataaagtcaccaagatcttccacgtgattaagaccaaggcaacaacgccaacgacaccagaaactccgaagacgccaacgccgacgccaaaaccaggcacgggcgatcaaactggcacggaaaatcctaaagggcctaccactactccgaaaacggatgagcaaggcaaaaccaatccgacaccaaaattcgttgatttgacaaacaccaccaagggccaagacaaaaccggtactactgctgcaactggcaagaacaccaaacaaaccgccgcagccaaaaccatgccgcaagctggtgaagcgcaaagtccactggctgttcttggccttgcaatcctaagcatgctcggcttggcaggattcgtatcacgtaaaaagcgcgtctaagccaatcaatcttggttaaggttgaataggaaaggaaggagttgagagtatgcagcccgtcaccattacaaatcttgatcggctcttaacggcgctgattcaagccaaacaacgcggtgacctggagcaaaccgttattgactgtctgccagtcgaacccggcgatgcccatattttcggcgtccgggcagacaacggtgaaatcaagccgctcattcgcttccgctttgatcaacctttgcctgccgattatgctgccgtactcaagcgtcatgggtttcagcttactgttgagcattttaagcaagtgccatgagtgaatggcagcgcattgaggcgtagattcggttgggatgtgttttatctgtaaattaaaacaggcattgtaccagtgttttgggctggtaggatgcctgtttttttcttttgaaacacgtcaggattaagtgaactgagaaaaaattaaccaatcttttgcatatgaactaatttttcataatcaatgcctcacgctttttaacgttccaccagcggcaccaccgccccaactaaattcgcatcgttgcgatacttagccgccacaatctccggaagcttaatcgtcctcgctgcaagtggcgttacctgcagataggtagcaacccgtgcccggatttcgtcgatgacacgtgattggacgctaatcccgccgccgatgacgatcttttccaggtctagaacggtttgtatgttgtagatcatcgccgccacgccttgagtgaaggtggctaggattgcagcggcgggtgtgtcgggcttgagggctttaaagacgcgtgggccaagattgtggccgcgaatgtgttgggcagcagccatagcgttgacggttttgactgctgaaagtccggcggcagtttgcgcgcgggtgatggggttgaggccgttggtaatcataaaactcggctcgccactgacatcatgactgccggtatagagtgtcccgtttaaaaacagtgcggctcctaccccagtccccagcacgatcatggcgctgttgatggtgccggcgagcttgccttgccaatgttcggctagggcagcagcattgccatcatttccgatcacgaccggtatgtttaaatgagcagcatccttaagtcgcgcagccagtggcattgtttctaaaaacgggagggcagcacaggttttgacgatgccttgctgctgattcacaacgccaggcaaggccaacccgacgccagcaatttgtccttgatatcggtggatcagcgccgccatggctgccataaattcagcccgactgttgcgcgcagtcggctgtttatgtttctccgcgagctcgccttgctccgatactaacgcatatttggtcgaggtgccgccgacgtcaattgccaagtactgcttcatggtaatcctctcttccacagtgcgcgattgctacttaatcggcgccttgattcgtttttcatacgcatccagccatgcttgggtgactggcgtaatcgtggtcgtttgattcggatcgggatttgccatgaggatcaccggtttctggctggcagtggcgacgctgaaggtaaattccacattcgttgcgactccccaattgccggcgcggtctaaggcgatgagcgaaaattcacctgctttaccataacggcgctttaacttttcaataaacggataaaccgcttcatcgcaagcttcttgcggcgtgcggccttcacccatgcggcggacgatttcgtaggacagacagcccttcatgatatcttcgcctaacccggttgccgcggcgcccccgatgtcactgtcaacataaaaaccggatccggacagtggcgaatcaccaactcgacccgggcgtttcataaataagcctgatgttgaggtcgccgcggccattgatcctgttggtgccagcgtaatagcgcccaccgtgtcatggccatcgtaaggtttgattttggcgtcagcgagttcggcccggcgcttttcccaacgttttttggctcggtctgttaacatatttcgcatttcgaagccatttaactgggcgtactgggtggcaccttggccgacaagaaagctgttgtaatgatcatggctgagcgcgcgggcgaccgaaactgcatgaagcacctgatgaatgccggcaactgcgccttgggccaaagtgtcgccatccatgaaggccgcatccatttcaacttcgccattttcattaggcaaaccgccatacccgaccgatttgtaataagggtatgcttcaacggttttgatcaatgcttccactgcatccccagctgtgccgtttgcttgcagcagctggctggctttcttcacgccatcgtgggccatgcgccaagtggcaatcacgccccaagttgtttcgttcatttgtccatcgctcctaaccgaatcatcgcattcatatcaatcatcatatttaacttgagatcgtgctcatccatccactcgtccgcgttatgcgcaatgcctttttgaccgggaaaagaaggcccgaatgccacaatgtttggcattttacgtgcataagtcgccccagttgtggtgaccggttgaccctctcgccccgtcacctgttcatacgcttgcgtcaatgctgccagccgcggatcgtttttgtcatgcaggatccccggcatgctgcgaatcacagttatttgagtgcggggaaaagcggctgcagtcagcgcgcgggtgacgtcatgctcttgataagtcacaggatagcggaccgccaaaagcagactgatgaccgagccgactttttgcagctgatagggtgtcacaatcaatcggccacttgcggcatcggcaaaatccatccctagcccttcgccgtggtgttggttcgccagcgtttgcaccaaccatcggcaatagttggcaaactgtccgcggatcgcatgttcgtctagcaattccttggctaaggttgtgatcgcatttctacctaactctggggcattgctgggcgcgcgaatgccgctggctgtatagtgcttgttgttgatcgttgcttgcagatggtcaggcacatgatcgcttgcttggtcgccggtgatggtggctactttgtcgagagaatcatcggtgatgggcgtgcgcaggttaaaattcacaatgccgcgttcgccgtatacaaccggaaatttgcagtctggcgtgaaaccaaactcaggcggggcttccttggcgagatacaaagggacatccgccgaaccgctttcttcatccgagcctaaaatcaaccgaatcgtccgcttaggctgaaaaccggcatccttgagcagcttcatcgcaaataaacaggcaatacttggacctttgttatcaagaattccccgcccgtataagcggccagccttttccgaaaggtcgtatggtggaaaataccacaccgtttcgcccgcgtataccacatccaagtgaccgacgatgccgatataatgctggtcatcgtcaccccactgaatatacgccattgccgaattaacaatcccggttttaaacccataagcctttcccagttctaccgcagtggttaaagccatccgcggaccccggccaaacggcgcatcggcttgttgcggcccgcgaacacttttaatttgcatcatgtgacgcaatgcttggataaaagtcatccgttgcgcctcatataaagctgccagcgtttcatttttcattcgcacttacttccttaaactcacacccgatcccgcgttaacgtggacttaaacgaatatttgtcagcgcgatagtacgaaatgtcgtaaagaatcggcttggcatcggcagtataggtaacggaatggacgagcagtaacggatcgccttttttcccgtggagtagtttgatcatgtccgggtcgatcaacacggcttcgacttcctgatgcgaataggcaatcggcacccgcttttcaattaaggcaaaaagcgagccctcaaagtcgtgtgcttgcaagccttcaatgtattcatggcaaattgcaacatgctcaacggtcatcggttcttcatcccagaaccgccgtcgcacgagcaggtcaacggttttgtttgcctgctgatcccgtcctagtacgcgcgcaatttcttccgggatcggatccagcgggccaaaactcagcacttcggtacgactcttcttgccatatgcgcgcgcggcttcggtaaagccttgtaaccccatgcggccgctttcgactttatcggtatacgacatgacataggtgcctttccccggtgacttcacaagtaattgctgccgaattagtagttcaatcgccttgcgcaccgtgagtcggctgactgcgaactccttagccaaatcatattcagatggtaagcgctggctggtagtgtacatcccgtcacgcacacggcggcttagttcatctgcgacctgttcaaattttgccattcgttttagcctccgttttctttaacaacgcttttcgtaggttcgttgacgttacgttcattttgtcatggttcatggatgaagcagcggctgctttaaggccacttttgccgttcattcagctgcgacgattgcgcgcgctgctgcgattgtatgcccttccattttttgcttgtttttcacgtgctaccagtttatgcttagtatgcactgaatagtatatactacaagttttattttttgaagcgcctttttcccatgtatcatcgcgaaaaatccggtctgctaaattcactcgtcagtggtctttttacgcgtctgctcacaacctcgtcaaaaattaaataaaggaagtgtcatcatgctgtcatctgcccatgttcccgaagacaaacgttcgccgcttctggcgcttggcatcttatcgatctcattcttaatgtcggttagtaacgcggtttccggaactatcccgctgatggaaaaatatttttccgatgtttcgcgggccaacgttgaacttctaatcgtcatccctactggcggcgtcctgcttggaacagtgattagcggcctggtttctaatctgctcgggaaaaagtatacggtcatcgccggcctgacgatttccatgatcttcggcatcatcccggcgtttattttcaactaccctgccattttaatttcccgggcaatgtttggcgtggggatgggggttttcacgccgctcagtgtgtcttacatcacggatctgttccctgaggagacgcggaatcgcctgctggggtggcgtaattcggttggcgcaattggtgatgccatcatgcttttcatcgccggcttcttgatcaacatcagctggcacaccacttacttagtctttcttttcttattggtgccgattattttagtgatgtttctggttcctaagcgctacgactacatcgtctcggaaaacggtaaagaagtcgaagaaactgccaaggtgaagccaacaaccaacggcggcgtcattcagctggccatcgtcttcctatttgtctgcttgttctactcggccatttcgctaaaactcgctagctacatggtggataatcatgtcggtagcgccgccgcagccacccatattttcggctttctggtactgtgctcgatcatttccggcatcgcgtttgaaaaaattgccaaatggtgcggcaagtataccgtggccattttcgatattgtgaccgcccttgcgatgatggcagtgccgtttgtccattcaatcccggccttgttggtactggtgctggcggctggtttttgcaacggaatcatcaatccggccttaaccgcgcgtatggtccactattcgcctaaggggtcgatgaacttcaccacttcgattatcatcatcggcatcaacatcggcttcctcatcgccccttacttcttccaattcttcggcagcatcattggcaatgctgaccctgcaaccatgatcttgtggagcggcattttctatatcctgttagccgtttacgacttggtgatcgttaaaaaagaccgcttaagcatttgatcgcaaagattaggaggcgctacttatgaacgacaatgttacttggtttaaacacgctaaatacggcatgatgattcactggggattatattcgctgctggcaggtgaatatcgcggtgagtcatcgagtgcctacgcagaatggattcagtccaaatttcaaataccaaatgccgaatacggtaaacttgccaccgccttcaacccgttatactttgatgccgatcagatcgtggctcttgccagaaagtgcggcatgcagtatctggtcgttaccaccaaacaccacgacggctttgcgatgtatcactcgcaagttgaccgctacaacgtatacgacgccaccccgttccaccgcgatgtgattgccgaactagcccaagcctgtcatcacgcaggcctcaagttcgggctctattattctcaagacctcgattggcacgaaccggatggcggcggctacaaatcaaacgacctcgaaacagccggcaccacttgggacaacagctgggacttcccggacgaaacacagaagaattttgaccgctgcttcaatcgaaaaatactcccgcaaatcaaagaaatcatgaccaactatggtgacatcgccacagcctggttcgatgtcccgatgaccctatccgaagcccaaagccaaaccatttatgataccgtccgtgccttgcagcccaaatgtctcatcaactcgcgcttaggcaatggcaaatatgatttcgtctcactcggcgacaacgaaatccccaaagacaaagctgccatgacccaaaccgatgtcgactataacgacatcaccggcttcaaaccgtcaccgctggggttatacgaaacggctggcaccatcaatgactcatggggcttttcttatcacgaccagaactggaaaaccccgcgcacactcttccgctacaaacaacacctcaacgattttggcattaactatctgctcaatgtcgggcttgatccactaggtcgcgtgccgatgatggcagaagagaacttgctggcggctaaggcgttggaggatgaagctttaaactaaatacgaccataaaaaatggaacgtctcaggctcacaaataaagacgttccatttttattttcgatctaagcaagcttcttcactaaaaactgatccatcaactgatgctgcgcgttgacaagtgggcgcggtaaatcagtgaaaccaaactcatgataaacatgaacagcagttttaagcgtatggtaagtttcaagataaaccgactgatacccgacttgccgagcgtaatccaaggcatgctgcaacaggcgcttaccaatgccatggccttgcaaatcaccgtgaacatagaacttttgcaattcagcaacaccgtgagtcgggtcatactctgcaatgccaaccccaccgagaacgcgaccattttgcgtggccacaaagtaatgccgctttggctctgccgcataaaactgacttaagtgatccagtccagcatcaaaatacacggtacccgggcggtcaagatcggcggctttcagacactcccgaatgagtgcggcaactggtgcatcgtctgcagctgtcatcggacgaatcacttcttcatgaactggcgttggcatggacatccctgctttcgaaaaggtttaagcaaaatcatagtattttttcagctaattgcaaggcttctctgtgatgttccacggaaactgggcaaatacgaaatgtttcacggggaacactctcatctcggggttattaatgattccttgctatgcactacccgcccttcacaacatctaatcaagccgcgtcatccatcccgcatccgcatgggcagcaaacgccatctcaatatccgccggtaaattacgctgcagtgacaacggtaacgccaacgcctcctcacgggtgaaagtgcggacattttcggtttcgacgcctgtctttaacgtttgcgtcaccggctggcaggcaatgaaaaacttgtatacatcctgcgtgctttgcggtgcatagtcacgcttccggaccgaataaaccgcgagcagttgcgttggtttgaccgtcaagccagcttcttcgcgggtttctttgaccgcaatctcaccagcactataacccaagtccgcccagccgccgggaatcgaccaagtgccacctgcccgctcttgcaccagcaaaaggcgatcctcgataaacgtcactgcccgcacatcaaccttgggtgttacataaccggtatcctgatccacaaataaacgcgcttgctcaggggtcgcatcgctcaattgcagcatcagttgcttggtgatagccgctaattgatcgtaacgttcccgatcaaacacatcttttgtatagtaacgaccagactgcgcaatagcctgcagttggcccaataacaagttcaagtcttcgcttggcatgccctcgcctcctgctatcattgtagcaaaattgcagctaatgccggtttaaagcaaagaaagcttaacttaaaaagattgccgatacacgaccggcaatctttttaagttcatgcttctgacaatcatccgtggcgtctgctgatcaacaagtatatgccttccacaattgcaataatcaaaatgaaaacgaccagcacggctaatgccgctaaacgtgatgccgcggtctcaacatggccggcaccatccacgcgtctcatcaagatcgtgatgccgataccgctgatagcgattgccaaaacgatattcgtgatccagagtcccttatgtttcaaagctattgcccccttatctcaaggttttgaaagtacggcccagtttttgcaaactagcgccgattaagggaagcagtaatgtcatcgcagttgccatgtaaacaagttgcaacccaaacgccatggcgaatagattttgccacgccagactgaacagcacagctgccagaaaaacgcataggccatgtaagacttgcggctttaaccattgctgccaccagcttagtaagagacctcccaaaaagccgagtacaaagtctgtcagcaataacatttccggtcgcgcaacataacccaagcggccaacaatcatgatcgcaagcgccggtcccagaaaagtgactggtcgcgccgaggttttcttggtggctttggatgggactggcctcagcaattcgtcaacggttatttggtaaaaatcagctagctgacaaaccgtttgcaaatctggctgatgtcggccggtttcccacgttgaaacggtttttcgcgaaacgaaaagctggtgggcaacttgcgcttgcgtaagctgtcttgtcagtcgtaacgtctttaagtgattgcctaaaaccgaagtggtcattctgctccccccctaaacatacacggctcctgtacgaaaatcctagctacacttgctagcacacttgatatatcaaggttttaaaccattttacgattattcaggaacgtttaaataacggtcgtggaaatctgtttctatcattagattatcataatatcatttgcatcagaacccttggagccttcgtccgtttctacgcataagcgttaagatcgcaagtgaccacggattgtctgcttctgcttcgactcctaaccacagtcacaaagaaaaaggctggcaccgtgatttgcggtgtcaaccttttattggcctaaatggcaacgtcttaatcgttattcttgtgatgttgacgcaatttgacgtaacctagcagtccgattaaagttgcgccgagaacagctaacaccggttgagcccgatcaccggcattcggcatctgatcgcgattcttagttgacttgtgcgtgtctgccgattcgccgttgaaccccgcatgttgttgtggcgtcttgtcttttggcggtatgcctggttccggatttgatggtgtacttggatctttgcctggccccggcgttggcactggtggattgtgaggatccttacccggctctggcgttggtgccgcctttaccaggtgattgatggcggctttaaggttggcaactgcggcttcaaccttggccaccgatgcttctgaatccttgttaaccgcccgcgcttgggccaaagctgttttcaagtcggcaaaactggcatcagtgtatgccttcgctttaaactccgctgctttggtgatcaggctgacaagctcggttttgtccggttgcttttcaagttgtagcattgccgccattaaggcatcggcctgttttccaacttcggattgagcagcattgggatcactcagaaccaaacgtgccggttttaaagctgtttgcagtttggcataggaacttgcggtatagtcgctagctttcagtttttctgtcgctttgacaagtgcagcgagtgattgtttatcggcccgtggtaccaaagcgtcaatggctccttgaagttgatcggccaacttttgctgtgtcgccgcagacgttgttggatccgttagtgcctttttcgcttcatccaaaacggttgtgagttgggtaaagctgtttggcgtgtagtcggcagcatttagattggccgctactttgacccattgttccagcgtcgtgacttgcggttgctgcttcacttccagtgcaaaccacgcattgctaattgcttggatggccgcttgaatttgcgcttgggttgcatttgcatcggcagagactggcttggctgcagcaacagcatccgtcaattttgcaaagctctctgctgtatactggtcagcttttaacgcttcagccgcttcgattaactttttcaactgatcctgagtcacgccgcggtcagcctcgagtttgcccaaagcgtgcttcaggtccgcataagcttgattgagcgcatcaaccgttacgttatcaacgttgagaacttggctcgctttatcgcgttgagctgtaactgcctgccaactagccgcggtgaacaacttcggatcgagcgcgttaacgccatcaattaaggcggttaattgtgctttagcctgatccggcgcgctcgtatccgctggcaaaatggtgatcggtgccggtgcttgcggcaagctttccggaccccattgattggttaacattggatcacttaacgcaaagctgagtgccgcttttgtcatgcgcgttttcgttcgcaacgtgatggtcgctaacttttggtcgcctgacaagcgcttctgctggccttcattggcaaaaatcagatagagatcgcgactgttatcaccgtgcgttcgcgtcttgctgaagttaaccatctgggccgttgcttgggtcggttcgactttgactaactcgacattcggattcgtgagcggtacccgggcaaagagactgttaacgttggctagatccttgccaagcagattcaaggtgatcgtttctccaggcagatacgtttgcttttcagcttcaagcgccaaggttccggctggtgcttgttcatccggcttcgtcaccggtgttttgcctagcttggtcatgacatagttgatgtcaaaagcgtcaatgaccccattgcgattcaggtcgccgttttgaacataaccgttgaaatcactgtcaatgttggccgttaagcccgcgtagttcataagcgacgtttgatcgtcttcattcacccgtccgtcattggtaatatcacccaacaccgctttgcttgagccatcccgtttaaacagcagcaattcccgtcctgaaacaaaatcgccgcggcttgtgcctttagggatcacaaagcggacatattgggctttttcatttttgtcaaaagtaatcgtcttatctttgccatcccacgtccaacctttaccttcacccgcttgatgccagtgaatcccatcaaggctggtttcgactttcaatgctgacaaagtaccgttgccgccgtcttcacgcggaacataagtcacatgatccaagtcgtaaacgccatcaagttctgcggtgatcgtcatcggtgttgctgattgcttaggcggcgtggtgaaccagttgctgtgcgccatcgtagtcagatcctgatcaaaaagatgggccgcgttgtcttttccttgccagataggcacaccggtaatcggcgctgtgacttgcggattgctcattttgacagcaagccgcagcggattatctttggaactgaaagtctgctcgttactccacttagaaaccgctttggccgttgccgcgcgtacttggaatgtatgcttggtttggctcttcaccggcgtcaaaagaaattctggcttggtcagattgcggtagacaacgccatctgccttgacgtcataacttgtcgcgtcattcaccggcttccagtcaatgcccacggttgtatcggtcgtggtctgatcattttgcttaatctcggtcggcaccgctacttcatcgctctcgggtaatgcttcagtcgttggatcatcagtagcattgataccgtccacggtgagcttaatcgcattgcttttgacattggttttttccagcttaacttgtaaaaagttctggtcaatcgacttatctgcaagttgatccaagaaatcattcgtatgatattgtttattaacaaaataaacattttcgccggcagtaaagtctttaaggttatcaacggcggtcagtttaaccgtttgtccgccaacactggccgtaactttggccggcttgccactcgttcgaatggcaaattcagtggttcgatctggatttaagccgctgtaatcacctgtcagcggatcaacgttcacggttaactgatccttttgcaattcgctggtaaccttggtttgggcatgcgcaccttttagatactttttcgaaatgccgtcatcttcgtaaacggtaaaatcatttttgccactcgccgggaaaatctgaaactgccgcttggtttggtcaaatgctttgggcgtattgtgtgcgggcgtggttggaatcacggcgccttttttaacgaaaaccggcagcttccaaatcggcgcttcgaagttgtttaagacctgaccgccacgatattccttgccggtgtaataatcgacccaaacttgctgcttgttagggaggtaaatgccgttacgcacatcgtttcccttctcatcagccgccgtgttttggtaaatcggggcaacaaggaagttatcgccccagaggtattcgtacttgacgagatcggtatacgcctcgggaatgttcggataatcaaggaacagaccgcgcaccattggcttgccatcaaagacactttgcgcagacgccgtatagttgtaaggcatcagcatagtcttttgcttgttgtaggcacgattgatcgccgttgtttgctgatcaaacgagaatggcgttttgggattagcgccccagccatccatgttaagctggatcggcgtgaaggctttccactgaaaatcgcgggtgttgacgatcggattaccgccgccaaaaatcccgtccatatcggaacctacgtatggctgtccggataaaccggtcccgatatacgttggaatatgaaagcgaatatactcccactgaccacccgtttgatcaccagtccatacgccggcataccgctgtgtcccggcccagccatcaagcgtaatcgcaaacgggcgcaacgaatcgcctttgacctgcgtcatcatcgcatcagctttagccaaaccatctaagccaaaagaatacccggacccgacccaggccacgtcagttttcagggctttgacgccaatggcaacttccttggcaaaatcacgatcatccggtttcggattggccggatcaactggcgacaagttttgttgcgtccacagcccggttgcaacgccatgctgatccgcataatccgcaaacgacttaagattttgcaagttgcccgctaaggtatcggtctgtccatagcctgcaccataaccatcgtttggcaaaaaccatcccagcggcatatcatttttctgataccgatcaataacggcgcgggcgctaaattgataattattcagctccccgttcaacgattctttgataccgctttggccagccggaattttccctggctgatattctttataatatttgccgtcttcaaacttaatcgcaccgcttgttccttcagataccggaacccaagtatcacggttataggcattcaagtgtgcttcataaaggccataacgcggcatcatcgccggtgcacccgttaaatcataataatctttcaataggtcatagggtttcgcatcgaaaaagtaaaccgcatcaaatcgattttcctggtgtgtggtctttacttggccgtcatcgctagccccaaagtcatagttacccggtttaaacgtgttccgcaccacgccatagccagcggttgaccaataaaatggattcggtgacgccaccccgccatcgacccaattacccgtgttttcaatcttgacatttttacctgttaacgtgaaattaccattttgcgtgccaccgccaaaaaactggtcagtgccgcgttttaacacttgcgttgcatgatcgttggtaatttctaacggctgactctcggccatgaccacctttgagcctttggaaacctgcagtgttgcgtttgcttgattaaatccaatggcaatcgcatcggtcttgatcgtccacccatcaccgttatgatcaagcgtagcagccgcaaacaccttagctgccgatgcatcaatttccttggtaaaaatttttgcgttaagccctttttccgattgggcaggcgcagcaaatttacctgaaggatcagcataaaagcgaaattgattgttcgctaatataaacacccgtgccttcaggttgttggagtaagtaacttcaaaataatgcgtttgtttggtgacattcacaatgttaagcatgcttgtactggccttcttcaccgcgctacttgtagccggttcggatcccttagctgccgttaccggaaccgtactactgacatacacgacagtcgcagtcaatgataaaactgcgctgctatataacagtgaacgcggcacccgaggccgatccttcactgtcttcattccattgtgcatcgacaaactccccctaaaaattgttgtggctcctccgcgtggtcggtaccactcaaggggattgtaaccgcattcatttgtttacttcaaccacaaaatattgtctaaaagtggcgaaaatctattttctggaaatatttttcagaaaatataaactaaattattgttagggctgtgaactagatattgacgcaatcgagtttcccgaagctttgccggtgcacaattaagaacaagagttatactagtagcgcttaattattaattttatatgaatgagaactgaactcatttcattcacatagtacaccatcaacaaaatgttgaccaccggaccagtttagataagcgcaaaagaccagaaacttggtagcctctgattcagttcgcgttccttagttaaaggtataaaatggtactactcgatagcaccaaaatatgatgaataccaattaaaaaacattttaaaaagaaccgccgttatcatttcaatgtatttaatgatcatatatactaaaaataccgccaagttaagacggtaaacgtcataacttggcggcagcgatttagcaaggcacgcacccctcaccattctaacttccggaggtgatcgccatgctaagaggagagatcggagggttgggttacgctagaaatggcgttggccatcttggttttagcccaggcgtacttggtttacgccaaggcaaccaagatactaaaagaagctaaccgtaacggctagcttctaccaccagtctttctaactcgcgtcgaggtcatcgggtcgcaccccggtggcctcttttcaccttctttattctacctgacaatcaagcttgccgtcaaacaaaatctatctatcgaaaatcacttattgagattagcaagaagcgtcgccccaacctatgtgcatcaacctcaagccaacccgaccacgttttgctataatcaactccgtacataccctatccacaaaaaggaagattgatgctatggcggatgaatttattgcccatcctttgatcaccattaccaacgttatctggagcttttcgcgtaccacccggcagttgcagatcttattgattcatcgcgcggatgatccttatgccggctactgggccctgccggaaacgactttgcgtgtgcgtgaaagtgccgatgcagcggcgatcaggctaattcgcgataaaatcggcgtgcatgtcaatcgcggatccacggagcagttggccacgtttacggacccagcccgcacacctggcgagcgggctttggcgctgacttacatgacgtatctgccgacaatgcctaagttacggccgggttatggtgcaaccgatgcgcggtggtttgcttttagcgccactgccaacgattatcagttacaaaatggtacgctcacgtttcagttggatcaacaggtggcgcatctggcttttgatcacgcgcggattctaggtgtcgctattcgtcggattcgcaataaacttgattatcaacccagtattttgcaagtgctcggccacaccttcaccttaaaagaagcacgcgaagtttacgcgccttttctcaatacgaccgcggctgccattgacaactctaactttaaaaagacgcaccagcatctttttgttgaagtcggtactgcccatgatcgcacgcgcagtggccgtccgcctaaattgtttaaacttgcctagttgaaaaataccctgaacccgcgtatcgtagacagcaaataaaagtctaatgtacttttatactgcgtgagtttaagtaagttttactttaattagaaaggaagcctcaagaatggctcattcgaatgaagcactgctcatcattgactatactaatgactttgttgccgataaaggtgctttgacctgtggcgcggctgggcaagtgttggcgcctcacattgtcgctttggctgatgaatttttgcaacaagatggctgggtttacttgccaaccgatgtgcatacaccgcacgatccgtatcatcccgaaagcaaactgttcccgccgcataatgttcgcgggacttgggggcgggcgttctttggttcgcttgcgccttggtatgcggcccataaagatgaagaacgggtgaacatgtttgataaaacccgctactccgcgtttgccggaacgccgctggatctgcgcctgcgtgaacgcaaaatcgacaccgttcatttagtcggcgtctgcaccgatatctgcgttttgcatacggcagttgatgcttacaatctcaactatcaaatggtcgtccataaaaatgcagttgcggccttgacgccagctggccaggactgggcgttggaccactttgcacatgttttgggtgccgaagtaacggattaattaaccacggactgataaagaaggcttttaaagatgaatatgaatcaagcaatgttgacggatctctatgaattttccatggccaatggatattgtgcgaccttaccgcatgaagaccaggcagttttcgatattttctatcgcaatgtcccggatcatggcagttttgtgattgccgctgggttgcaacaagttgttgaagcgttacgagactttcacttcgaggatgcagatatccaatatttgcgttcgttgaaactttattcggatacatttttagactatttaaaaacgatgaaattagcttgcacagtgacggctttaccagaaggcacccccgtctttccacgtgagccgttgttaacggtgcaagggccgctgatgcaggtccagctactagaaacgctgctgctcaacattgtcaatcaccagtcactcattgcaaccaaagcccggcgcatcacggccgcggctgaaggacggccagttatggaatttggtgcccgccgcgcgcaaggaccggatgcctcggtttatggagcgcgtgctgctgtgattggcggctgtgccagcacctccaacgtcttggctgcacaacgcttcaacatcccggctgccggaacaatggcccatagctggattgaagctttccctgacgagctctctgcttttcgcgcttgggctaaagtctatcctgacaacagtgcgttactggtcgatacttatgatgtgctcaagtccggtgtgcccaacgcgattacggtgttcaaggaactcaagacaggcggccatcacccagttggtatccgcatcgactctggtgacatcacccagctagcgaaacaagcccggaaaatgctcgatgacgccggtttccccgatgccaaaatcacagcttccaatgcgctcgatgaaaccgtcattcagtccctcctcaaagaaggcgcaccgattgacaactttggaatcggcgaaaagttaatcaccagtgcctcatctccggttttaagcggtgtttacaaaatggccgcattgcaagtaaatggccagtggcttcctaaaatcaaggtaagtgccagtcgggaaaagaccactttaccaagtcataaacaggtttatcgcctgtatcaccgtgatgatcaaacggcttttgcggatgtcattgcgttggctgacgaaaacctgcctgcagaaattgccgcggtcaatgccaacccgctggctacccaaacgcaagtcaccttacgcgatttcactgccgaaccgttattaaaaccggtcttccctcaagcacaagagccgctcacaactgatgtttttaccattcaaaaacatatgcggtcagcactcagccacctgccagaagcaacacaacggctcgtcaacccggacctctatccggtttacctcacgccgaaattagccgctttgcaacagaaactgattgatgaacatcatcaaaattaagcaggcacttgttattaagcgcgtctcggtttgatccatcatgaaaatcaaaaactgcttcgaaagcaagattgcttccaaagcagttttttaatttcgtgaatgaaacttagtcttgcgctgtacttaaactggtgtctcggcttccttagccaccaagtcgcgcatatccattgcttcttcaaaacgattggtaatgatcccggtaacgtaacgttcgcgcatcagttgtttcattttcagcggatcatcaactgtccagacgcgctgggctttgttgaggtggctgttgtaatgttcaatgtggacggcttccaaatacgatggtaaggtggcaccggttagaacccgactcgttaaccacgccgttttcattttcggcgcaagggtatgaatgacgttgatactgtcgtgattgaatgaggagtagatgacgcgatcctgcatattgaactgctcaacgtaatcttgcgtcagcgcctcaatgcccggatagcggatcttgccggttttaaactcaatgttaaccatcacgtcataatggcttaaaaccgtcaatgcttcccgaagcgatggaatgtgttcgccattggccagccgcatccctttgagttgcgtccgggttaaatccgcaatccagccagtgccatctgttgtgcgatcaacgcgctcatcatgcatgatcaccaaatgcccatccgcactcatctgcacatcggtttcaatgccatcgatgccatgctcacaggcatattcgaatccttgcaaactattctccggaaaacgcgccggataaccgcgatgtccataaattgctactgtcatcatgagcctccatttcgcatactttactgatcaaaaaccgtctgcgccaagctgtatcaggcatctgctttcaaggcccgcacatgagcttcaatctgatcgcggacttggcgaaaaaccgccaacaccgcttcttgcgaaccactcgccgctgctggatccgccagcggccaatgcaagcggcgaacggttagcggcgtcaccgggcaccgatcccgcgcatccccgcaaagtgtcacaatcaaatcagcctgctgcagttcggcttcgttgagcacttttgattgctgttgcgaaatatcgatgcctttttctgccatgaccttaaccgccagtgaatttaggccatgcgcttcgatgccggcacttttcacctgccactgacgccccagcaattttttggcaaaaccttctgccatttgactgcgacaggcattccctgtacagagaaaatagacttttggcatgatcacgaccagctcctttgcgataatgatgtctaacgttgtcttgatcatacgcgggttacggtcgttgggcaatatgggtgcaactggcaacttaacgcttgtagtccagcaggttgccactgacggaattggtctttgaaatggccgtattcgtatcggcttccgcttcatctaaagccttcttaacatcggcaccgccataaatctgttgcatagccaattcaacattttgccgttcttcttggatattgctgaagaacgcacctgctgtggccgcattgatatgaccttggttcagttgttcaatcggaaccgctaaagcagggtttttcttaatcgcatcagccagactcttcacttggttagctttttggttaaccgcaaagtagcccgtgccgagttgccatgttgcttgagacttaggcgtcattaggtacttcataaactgccaagccccttcttggacagcggttggtttgtccttagtaatccatagacttgcgccgccaatcgctacaccattcgctttggtaccatccggatgcggtgtgaaggtcacgccgtacttaaatttggcgttcgtttgtaactgccctaacatagcggaactttgcatgaagatgccgaccttttgcgccaaaaacgccgcgctttggttgttgccagctgctgatccggtcccaaagttttggaaggcgttttgtttgatcacgtcttgcagccaattcatgcttttgaccatttccggcgagtttaatgtggcgctggttgccatcgcttggcggccgttatcgtggttgacgacaagtgaattttgattggcaaccaactcttccggcagccagccatagatctgcatcgtcatccctttgaccgcacctttactcttttgagtcaacgcaaccgctgccttggtcacgtcgctatacgtcggtgacagtggcaaatcaggaataccatactttttaaataggctctggttgtagtacataaccgaactagaggagttaaacggcatggaagctaacttaccattgattttataagcggctgtcacccctggatacaattgactcaaatcataatggtcacgatcaatgaacttttgtaccggtaccgttgaattcaagccgatcatcatagactggttggcctggtcactttgaatcaaatcaggcgaaacattactgccgaccgtattggcatatttcataatcgacaattcataactgccggcataaatcggcttaaccgtgtatttggtctgactcttgttaaattgatcgactaagccttccagaaccttttcattcgggccattcatcgagtgccaaaacgtgatggtcgtgcgcccgttgttatcagcagcactggccgattgttggtgggtgaagaaaaagccaagtccgaaaataacaacaatcgctgcgactatcgcaataatcttcttatatgtggttttcaacccttcgtcccccctgcattcaaattacgcttgaagaatttctggccaatgagcaacaatgccaaggttggtaacaacacaatgatcgccgtggccatcaccatcccccagttggcgaacgtatcttccgcctgtaactgcttcaagccgacttgaactggccggaaatcatccgagaaggtcgtaatcaacggccataggtattggttccaatgcgtcagaaacgtgtaaagggaaaaggtaatcaacatgctgcgactatacggcaccgcaattttccacagaaactgcaagcggctaaggccaagatacttgccaaagtccaccaagtcggttggaatctgtaaaaaggcttgacgcaacatgaagaccccaaaggctgaggtgaaaaacgggatcgtcaagccagcataattgttcagccagccgagtgcttttaccgtctgaaaattaggaatgatctgggcttcaaatggcaacatcatggtgatcaaaaaggcaaagaacaactgctttttgtagcggaagttcataaacgcaaaggcataagcagcaagtgtacataaaactaattggccgatagtgattaatccggccgtcacaaacgagttaatcatgtagcgaataatcggtgtggtgacaaatgcctgccaatagttattaagcgagatattggtggataagaaattccctgccgcaatatcttttgtcggtagtaacgatgcccaaatccccaacagaatcgggaataaaagtatcactgcaaccaccgtcaataaaagataacgtgctccgtgtttgacatgtgtcatgcgtaatacaccttccgttctgtgaaatggaattgaacccaagtggccaaggcaataatgacggttagcacaatggattccgcactggccgttccaaagttgtggaaagcaaaggcatcttgataaatcttatatgctaggaaattcgtggcattattaggaccgccgcctgtaattaagtcaatctgggcaaacattttgaacccatcaatgatttcaaccacaaacaagaagaacagggttggcgaaatcatcggaaccgtaatcttgagtgtctgcttgaattgtgaccagccagcaatgtcagcaacttcatagtattctggcggcacactttgaaacgcactcagaagaatcaaaaaggcaaagcccaatgccatccagacactggctaaaacgatgacaatcatggcaccggtcggatcaaccaataaattggcattggtgacgcccatcgcttttaaggcaaaactggcgaggccgacagatggattgaataagaacagccagagaatcgaagcagcggcggcactggtgcccatcgtaccggcaaatgccgtttggaaccaactgatccggcgtaacttcatcgttgccaaacgtgccaaaataacgccaagaacaatggtcgccaaagcaaaggcaacgacatagactagcgttcccgtcaaactctgcaggaataaaggatccttgaagatatcaagatagttacccagtccgacgaatttagccgattcaccgcggatgttggttgcaaagaaactgttatacaccgtcatgatcatgggataaaaagtaaataaggtcaggatcagaagtgacggcatcaaaaaccaaaaggccggcttattattttcccgaatcgtttcagcaagcttgccttgcgatttggcagtcgatttattaagttccttattaagctccataagcggccgcctccttaactggcgccacggcaatccgctcaccgtcatcaatattaaagagatgccattcatcggcattagccggcagtaataaattaagctcagcgccaaccgctacggtgaactgttccggaacccgactgaccaatgactggccatcaaagtcgcagaaaatcaaggtgtcattgccaagctgttgcaagctcttcaccttggctgtaatggtatccgggttggcaatcgaaaccggtaccaacttctccggccgaatgccaagatgataggaaccagccggcaagtcaaacggaaggacaaacgcattgtcagtccagaaagtatcgccaatgctaaagcgatcgccttcatcgctaaccgtaattggcagcagattcatttccgggctgccgataaacttggcaacaaattcattggcaggatgattatacaagtccagcggggtgccaagttgctgaatcttttcatcatccaacacaagaatccgatcgcccatggtcatcgcttcgacttgatcgtgggtaacataaatcaaggtcatgccaatttcacgatgcaaccgcgcaatttcttcacgcatttcggttcgcaactgggcatcaaggtttgacaacggctcatccattaaaaccaccggcgccttagttgccaaagcacgcgccagactcactcgctgctgttgcccaccagaaagctcttttggtttccgctcacgcaaatcggtcaagtgtaccaagtccaacgcccaatccacgcgcttgtttttttcatcatcagttaaatcctggttctccaagccgaagcggacgttttgggcaacgttcatgaatggcagtagcgcatagttttggaaaaccatcgccaatttgcgatcttttggcggcaaatccgtcacatcgcgttcattaaaataaatccgtccatccgtgacactggttaaaccggcaatcatccgcaacagcgtacttttaccggaaccagatggcccaaccatgacaaaaaactcgccaggctcaatctcgacggaaatgtcggatagtactttggtgttgccaaaatcctttgacacatttgctagtcgaatactcattcctcatcaactccttacactgagactaccaagcctttgtaaagatcagtgtcaaggcgatgtattaattatgtaagcattctgtaaaacgtatcgttccagcttgaaatttttcaatttaacgcttcatccgcggccacattcagcctgatagccatgcaaaaagcgttggtgaacgactgctattccgctcaccaacgcttttccacgaaagtactctccactactattcaatgccttcctgaacgaacacccgcaagattcgcggtgtgatcgcaatcatgtaaagcaacgccacaatcccgctgtatacaaagacgaggtaattcttcgcgatgttttgaaacaggaacgtataaaagaaggttgccaccggggtcaccgaattattgatcgtcatcaacgtcgtattgacccggcccaaaaaagaagtcgggaccgttttttggatttccacctgaatgacaatgttaggaatcacgatcaaaaaacctagtactaccatcagaatcgtgccgggaatcgtcacgccactggctgtcttggcaaaattaaacacgccgcctaatgcgatcaaaagcacacaatccgctaaaaccggcccgagaatcttaaggcgaatccgcttttcaccgctgatcgtactcataaacaaactgccaatcaaaatcccgatagcagaaccggtttccagatacccgatcggtgcactgcccagatgcagcgtattcgtgatgacaaaaggcatgccaaccgtgacgctggtgaagctaaaattcaaaaccacgccaaccatgatgacccccttaaccaatggacgcgttttgacataagccataccttgtttaaacattgccaatggccgactggcagcagcatttttcgcggtcggctgtcgcttggtcacatgaaacttcatcgtcagcataatcaaaaacgagaccgttgacgaaaccatttccacgaaaataaaggcttcaaacccggcaagcgtgtaaagtcccaagcccaacatcggcgaaaaaatcgaggaaatggagccagccgtggatgttagtgaacttaacttttgaattttccgctcattaaccaattcatggacagaagcagcataggctgttgagctaaaatcgctgcatatgtaatcaacaatggcaaaaaggacaaccggaacaagtttttgcacgccggaaaatcccggtagcgcccacgcgaacagccctagtcccagcaaacgcaccagattgcttacgattaaaatacttcgatgcggataacgatcaacaatgctgcccataggaacaaacagaagcaaactaaccagcggcccgacaattgttgataaaccgaaactgatcgccaggtgcgtttgattcagcaacatcagccccatcccaaacgaaaacatgccgccactcaacgagccaatcaggttgctagtaaaatctttgccaatttgaagattggattcccgatctgtaatcagaaccgggctggttgcgtgggctacctgcataggctgtcagcactcctttattttcctcattttttcgtaataattattaatcatattataataattttcgcaaaaataaaaccccgcctgcacacaaggtcatggaacaagacgcttgtgtccagacggagcttaagccgctgccaactcaattcatttttcagtgtagtcgattccggcgctgctgaaagtcatccacgattagcgcaccaacttgttgattaaaccgcatggccgcttcacgttgatgatcaaacgttgtcaaaacaactgcatacaattgttccccttcagccgcaaagcaagccgcatcatgttcacaatttggcagttcaccagttttacccgctgtccagccaacaaaattcttcatggttggtgccagcagcaacttggtacgattctgttgatgacgcagggcacgggcacaccagtcaccgtcagctggtcggcacggtggggtcaataaggatcgcaataaacgccacgttgctgcagccgagatccagttgtcattgtcggtatgcggctgcatcaaggaacggtttaatttggcacccggaaactgctgatccaaccatcgctccaccgttgttagcccatacgttttcaacaaagcattggccgctaaattatctgaaaccatcaacattaaagtcaccaaatcgcgcacgcaccaggatgaatcggccatgaaccgcagtacccccgcgccgccaaccggccgtggtaatactactttccgctgccactggctagaatcggcttgtgcctgcgctttaacataggcagcgatccccaacttaatcaaactcgccgcggggaaaagcacatcggttcgcgtcccaaaaagcacctgccgctcatcagcaagtaacaaagcgtgcgattcaccaaactgttgctgcagctgatcaagttgtgcaattaagtggtcatgcgccatttcacattatctccgatcgcaagccagccaccatcacttgcgacaagcggtgatgactaacccaagttactatcgatcatacacccacgcatggtcgtcctgccaagagccaaccaagtaacgcccaacctaatccggccaggaagtttcaatcccgaaaaattgagtcagcagttcccggcggatgcgtaaccaagcgcggtgcgtccgactcggataaatacgattggttaaacaaacaaagccacgctgcgtatcgcgatcaaatgcaatcgaagtacctgtgaacccagtgtgccaatattgatggcgaccttgcgcccagcagcgccagcccaacgtccgcccaccaacacagtaacgctcaagcaacgaaaatgctgccggaggtaaaaccttctcaccatgcgacactggcaaaccggccaacagtcgggtaaaagtcgtcagatcgcctaacgttgaaaataaacccgcgtgaccgctaaccccgtcaagcaaaaacgctttatggtcgtgaaccgtcccacgtaaaaccccaccgcgttctggcacattttcagtcggcacaaaatcgcttggtgccactgcctgcggacaataaccggttgcctgcatccccaaaggcgcaaaaacatgctgatgcaaactggcggcaagtgacccatccaccgccgcaattgcccagcctagtaatataaagttcaagtcagaatacagggtggtggtgtctggcgggacaactgccgccatcgttttaacggcctgaatcaaccctgcttgatcaagtgcgtgcacattagggacgtcagcaggtaacccgctgcggtgcaacatgagctgttcgatggtgatctgtgggtagcgcaatccactgaccagtgatccaatcggctgatccagctgaatttttcccgccagcagcaattgcagcaagcgcgttgtcgtgccaacgactttggttaacgacgccagatcataccgattctgaggcatcagcggcaaatggtcggctccggttccttgaaagcctaaaaaatgcacggcattctcgtccgctccgacgacactaaacgccacaccgcaaaccgcctgctgctgaattgctgcggtaatcggtgccaacaacgactgcgactcagagacttttgccatgttctgcctcccaagcggtcaaaacatcactaatcacgccatcatgagcagccagcacttgggtcgccgcagcagcatccagaccggttttggccatcacgatcgcaaccggaaccttgtgtgcagctgcctctagtaaggatgccgctcgagtcgcactgacaccagttgtttcggcaataatgcgttgcgcgcgatccaccagtttggcattagtcggcaacacatcaatcattaaattgccaaaaactttgcccgcccgaatcatcacgccggtcgaaagcatgttcagcaccattttctgcgcagttccggctttcatgcgcgttgacccggtaatgacttccgggccaaccacgggggcaatggcaatgtcggcatggtcggcaagtaaactggcggccacgcaggttacggatattgctaacgcctttacttgttgcgcatacgtcaacgccccaatggcataaggggtccgcccggaagctgcaatgccaatgaccgtatcgttggcattcagattcaacttcctaagatcatgttcggcaagctcagctgaatcctcagcgccttcaactgatttaaacatggctcccatcccgccggcaatcaagcccactgctcgttctggcggaatcccataagttggtaccaattccgcagcatccaaaactcctagcctcccggatgtaccggcaccggcgtaaatcaaccgcccgccgcgattataacgctggctggcttcatcaatcgccgcggcaatctgggctgtttgcgtagcgatggccggggcgattttggcatcctcatggttaatcagcgccacgatttccggcgtcgtcatggtgtcgatgtgcatgctggcgggatttcgttgctcggttgttaagtctgcgattgacatatttatcccctcgaatcttcaacgctccagttaagtgtgatgttgcccgataattctgctcggtttgcttaatttcaccatgaaccacgccgaggaaaagaatattggcaacataagtctccgtaaacattgacgtcacggctccgattcgtaacaacggctcggtcggcggcaaggcaatcacgcaactggccgcatcgcgcaatggacttggttcggcacgcgttacggcaatcaccggcgtctgattccgccgcgcttgctgggctgccaacaccacttctttcgtcagcccgctataggaaaagaccaccaccgcatcagccgccgttgtataatacacgcgctctagtgccgtgtgcgcatcggcgtcaaaaatggccagataccctgcccggatgagttttaaatataaatcctgggcgactaacgccgacgcactcatgccgacaagataaatatgccgcgcatggcgtaacgtggtaattgcctcttgaaccgccgcctgatccagctcgtccggtaaatcgcgaaccgccgcaatcgccgtctgactcaattttcgcatcatcgttggcaaatcatcatcatcctgaacaagcggatcgagcggcgtcagcgcgggggcttgcgtatcccgcaccaaggcgagtttaaatgattgcaagtccggatagtcaaacaaccggacaaaccgaatcaccgatgctgccgatacgccgctagcccgggcaatctgcgcagttgtctgagcgatgaaggcctcggcatcggttaacacatagtcggccaaagcgcgattcaccggacttaattgcggcaatcgcgcttgcaccttcgttaaaagggccttcattcgactttatcaataaaagtagcaatcgaggtcttactctcattgggcaccatctgcgcagtaatggtaatcccttgtttgagtaagcgccgaatcatcgcaatatcatcggcagtcaacgccactgatggcttaatcttctttgaccccggcttttcagacagattgccgacattaaaggatgtgatcggcacgccaccgtcaattaacttcgccatatccggaatattgcgggtaatgacgaaaacctgatcagcggcaaacttgccattttgcaaattttcaatcgccttggcaaccgagctaatggctaactttttccctgcaggtcgggcgattttcagtccttgaatcgccatgtcatcacgaaccaccgcatcattgacgaccatgagccgattagcgccaaccgtattggtccacaccatcgccacctggccgtgaatcatccgttcatcaacgcgtgctgccacaattgtcattcgaatcttcctttcaccataacgtttgaactcagcatgtgtgctaatcgccgtttcacgttagtacttaacaagctggcggatcttcttttaaaaagtgtcctcatgcttaaactaagctgccaatccagccgaaaatcgcgcctaagttgccgagaaccatgccgatgaggattaaaacaaaaatcagccgagtcgagttcatatgcttgcgtcccaaaatccaataagagaacaaggcaatcgccagcggtatcaaagcaggcatgatcttatccagcatatcctgcacattcatcgtgactttgccgactttataggttaaatcaagcttgtaattgataactgcaggaatcatcgcaccgacaacggttaaaccaagaatcgaggcgccttccgtaaaaatcgccatgctatcagcaaaagtcgtcgccaaccgtgtcccttgagccagcccgacattaaataacttccaccgcacccataaaataaccaaacagccaattacaggaatcagcaggccaatcggttgattcgataaggccaaatatgccgtaatagaatagataatcgcattataaatcgcgacaaaaatcgtatcgccaacgccggcaaacggacccatcaaccctgttttcaaaccggtaatcgctttttcattttcatcgttcatgcccaattgatcttgcaaggccacatccgcaccgacaatcaagtgtgccatttgcggggtggtattgaagaagcccatttccatattgagggcttgtttcattttcgccggatcatctttgtataaacgcttcagtgccggcatgaccgaataggcgtaacccaagccttgcatcttttcatagttccagcccagctgtagtcctaaaacattgtgaatgaaaatctgcttaagatcttttttggttaacttgcttaattttaactcagacatcgatctcgacctcctcatcgtcgctatcaccgctaccgccattatcaggcttacttgggccattgccgccgttgccattgtgcttgcgttcgttagcatctaagacatgtaacgccgcgaagacgaagccaaccagcgccgtgcccagcaaggagaatgacttcgcaaagtaagccattagcacaaagccaagaataaagtacggaaaataccgtttaatcggcaagtaccgcatcaggattgcaatccccatagccggtaaaataatcccggccgtcttcaaaccggtcatcaaccacgtcggaatccaagcgttgatcgccttgaccactgcagagccaaagaacaagccgacaaaaaccggtaacatccgcgaaaccgtccacgggataataccataaagattgttacgctcgacgcctttataatcacctttagccgccaacctatccgcgtgatgctggaaaatcgtattcgtcatccgcgctaaaatatccatctgggtcagcagcaaaccaatcggaatcgccaacccgatcccatacgcagccccgcgtcctgccataatcgcaaacgcactgcccatgattgatccggaaagaaagtccggtatcgtcgcgccgccataagtagcgacccccaacgttgccaactgcaaagtcgcaccgacaatcaagccggttttcaagtcacccatgactagaccagttactgccccaccaaacaccggtgaaaataacccgatcttcaatgagagtgcatcaagctgtgccaagccaacatagatggttagaaaaataagtgcaaaagcagatatcgccatgatgtttcccctccctacaaagatttcattgctcaacctgattatggcgctagatgaaactcaatttcaagtatttgagttagataagtttacaatgaaattttgtttctaggaggacacggaaaattgtgtgtaccaattcgcaactggtaagcccgttgcattggttaaacagccatagaaaactgtatgcggttaaagtctacgcattgccaaatttgtcagagagcagccaactgacaaaaaagcgcgggctactttcctataaaaccggaaatagtccgtgcttaatcgtatgcaataactttggcgaggttttacttcaactgaaacttcaacaccaccggattatggtcagaatactgaaatccggtcgacacaacatggacactttccgctttgatatttggcgacagaatgtagccgtcaattaaggtcacaaaactttttcccggcttatacggctggtccaacgcgcgtactgatggtacctttgccgctgccagtcccattgtcgggatataaaagccggctggtaactttgacttaggaaacagatgcgtccaggtttcgtctaggtccttggtgtggaagatttcggcggtatttttcaagagccggtggttataatcacctgctaccatgacgtaattgccttgctgataggcgtgattgatatatttaaacaacttggcaaactgtgcctgttggattttgacatttggcgtgaaggcggacatgtggatgttcaccatgatgaattgcttaccgtttgccaccgtggttttcgttgccgtgaacgcgcgatccaagtcgataattttattgaagtcagtgtccaccggtaaactgtagcggcgggcgctatcgactttggcctcactcaaggttagaatcccggacttggccttgccgatcggttgattaaacgggtaaaacagatacgccgaatcgtaattctggccgtaaacgttagcgtattgccgttgcgcattcgtcaccatctcgacttcattcacatgccgcgagcgatcgccatccggatcaatttcctgataaaaagcgatgtccggctgctgcgcctgcgtggttttgatcaccccattgatgcttttccgcacggcttgttggctataagcacgcgaatacttaccgccgtccatgaaaaaactataactgggcggataggagccatagccgatgttgtacgtcatcgctgtgtaggtttgtccgggcttaaactgcgcactttgctgatgcttaaccttcaacgcttgatcgtctggcaaacgataataagtcgtaaaaagatagatcaaataaccgcctgctgccagtaccaccacgccgataagtgccgctacccatttcaatagtcgtttcaagccgccgcctccaataagtttgcttgcatttattatagcagttgtctttttccttgagaccggtacgattaaggaagtaagtgtcaggcaacgattttcgccaacggactgtcaccgcaacatttttatcaagggagcttactcaacatgtcaaccgaaatcaaacagatccttgctgcttttgaaaaattcgagaccattatcattcatcgacacatcaaccctgatcctgatgcaatcggctcacaaaccggactgaccttgctactgcgcgcggcctacccgcaaaaaaccatctacaccgccggaccagccgcaccggatctggcgtggatcggtccgcagcaagacgtccccgccgctgcgtatcaacatgcgctagtcgtcgtgattgatacgtccaatcgtgaacgcgtggcgggttcgctttttgagcgcggggccatggtgattaaaattgaccaccatctggaagaagaaccgctgggcgccatcaactgggtcgacacgaacgcttccagtgcatctgaaatggtgtggctgctgactcaacacagtcaacgcctgacgctcacgcaaccagccgccgcagctctgtatgctggcattattggcgacaccggccgcttcctgtacgatctgaccaccgctcaaacccatcgtgccgctgctgacttactcgccaccggcatcgatgctccagcaatcggccgccaagaagatcaattcccggaaaatgtcggccgcctcatcggttgggcacttgaaaatgtccacatcactacaaatggtgccggctcgttgatcatcacgcaatccgtcctccagcagtttggtttgcaatatggcgaagaacagcgagcagttggcaacatcggcaaactcgccagcattgatcgctgggtcgtgttcaccgaacgccaagatggcaaatatcgcgttgaattacgcggaaaaacgaaagagatcaatacgcttgcagtccgacacggcggcggtggtcatcccttggccagtggcgctgtggctgatgatgaagccgaagttcaggcaattgaaaaggaattagcttctgattgaggacaacttggatcaggaaccaaacgactcatttaactgtggttcagggtttgaataacgtatcctcaatacagcacatctgaatgaatgaagtttgcacttgggtgaccaaaaggaactaacaattcggtttaactttttccttgctttggagtgcgctccaaggtttataacaagggcagcaaataaaagaaaagagattttataaatgcagacttttacattaaacaacggtgtcgagattcccgcactgggctttggcgtgttccaaattccgcaaggtcagacaaaacaggcggtgttggaagccttgaatgtcggctatcggcatattgatacggcacagtcttatatgaatgaagctgaggtaggggaagccttggccgcaaccaagatccctcgtgataagattttcctgacgaccaagatctggttaagcaattacggttacgaagcgactgcaaaatccgtggaagcctcactgacaaaactacaaacggattatttggatttagtactgctccaccaaccctatggcgatgtttttggctctttcaaggctctggccgatctccaaaaagcgggaaagattcgcgcgattggcgtatcaaacttcaatagcgagcgtctggccgatattgtggcttttcaagatgctccagttcaagtcaatcaaatcgaaatcaatcccttctaccaacgcgagcaagacttaatgaacgccaaagcacgcggtcatgttttactcgaagcatgggcaccttttgctgaagggaaagacggcattttctcaaataaaactttaaccaccattggaaaaaaatatggcaagtctgcggcacaagtcatcttacgctggaactttgaacgcggcatcgtcagtcttgcaaaatctgtcaaacctgagcgcatggctcaaaacattgacatttttgattttgctttgacccatgaggataaagcccaaattgccacactggataccaatactagtcaattctttgatcacaactctcctgactcggtagatatgtttgtgaagtttttgcaagaaagagacatctaagattgattggccagtcttcacaaatcgaaaaatagtgagtgatcaaaattatgaatatcaaaaaagctgctgacctatttgatttatcaccagatacgttgcgttattatgaaaaaacaggaattgtgccgcctgttcatcgcgcagcatcgggatttcgtgattatcaaacgcgcgatttaaactggatctatttagtgagaagtctgcgccgcgcaggcatgggcattgatgctctcaggcaattcacgcagcttgctaaaaagcgcgagtcaaacaacggttcatcactcaagcaagtagatgctgcacagaaggcaatcttacaaaatcaacttattgagcttgacgagaaaattgtcgaactccaacaaacacgaaaaattttggcttataagattgccacttacgaagatcacatcggcaaattcaagaacggtgaatgggatgcagaaaatcaagaaaagctatgggaacgctaactttttgactctcactattattcagagaatgctagccaactggccgcgattttttgtagactcgctgataaacatcgactaagcaaccaacgcatctccgtagccactttcgaatgcagaaagttggctatttttttcgcgccaaaacaataaaccgatcctcaaacgttgtgacgctgccgacactggcaatcatatcttggagctgatgcagctttggcatagcctggttaacgtcaaagtttggaaactcccacgggataaccgttgcataataaacaatcgcaccaacatccgtgaaacgcattttgacaaacgcagcatctgccttcaagatttcaaacccgtgatcctgcaattgcgtcaatacttgcggaaggttattgtcaggaaaagcgggtacatacgcgggatctagaaaccgtgacaacgagtaattgttagttgcgcccacctgctgcgaaacgaaaatcccttttgagcgaagtacccgagcaatcgccggaatcggcaagccgccatgactgttggtcacgatatcaaaatgctgatctggcacctgcgccatctgtccatccgggtcggcataaagcgtcaccccttgtggcaccaaggttcgcttcagcaagtcaatgttgggttgccagccttccgtgaccgaggttttagcaacagggtgtttaaacgtctgcatcagctcgccaccccctgtgtccatatccaaccactcatcactagactggagatgctgctgtacccactcactataattccatggcagcgactcggtttcacaacgaccctttaagtgactaaaatcccaaccatgcattgctaggtgactttcttcaagccacgatgcttcttcattcatgtcgtattcacaccttttttaatttgactcgttcgtttccgcaaactcaccatttacaatgtcccctatcaggcttcaggaagaacgacttgaagtctacgcttaatccgattcggtgacattacctcacctccagttaatggtttaagtctagcacgcaaaaggtgaaaatcctcacctactcgtcactttaattccgatgatgccaatgactaacaaggcgatgaaaaaccaagtcgccggttgtaactggtccttaaataaaatcaccccgacaataatcgatcccacggcaccaatgccagtccaaaccggataagccagactcaacggtaaatgcttcaccgccaatgccagaaacccaaagctgagaatcatcccggctaatgtcgccaaagcaaagcccaagcgcgtaaaaccgtgagataacttcataaaggttgcccaaacaacttcaaatccgcctgctaacactaaataaaaccactgcattttcttgttcctcctgtcatttaaccggtccgctacccaataaaaaaggcgacagtatccgcaaccgctgcatagacctaatgcggttgcgatactgtcacccggtagtgactggttattgaattgcgattagtagttatcttttcacatattttaggtggtgtcaaatggatgtgcgcgacacaagctgtccgcttattaacgctgaggtttggccattccttttttgaatcacgacattgacggctatcaattgttcctcgattaaacattccacgttacttatccttcaaatagtcaatgccggttttatatttgtccataagatcctggatggtggtaattaattcctctttgccttccattttacacccctttataacacgcatttgcactgttccatcttccatcatgttgaatcgaaccttggtattcttctttataccgctccgccgtctaatttcggcaggtatcgttacttgacctttgctagttacggttgcttctaagaactttttatgggacaaagacatacgtgccacccctagctttattcttacttttttctgaccttatttaaggtttaacacgaggcaaggaaaaagtaagcgctatagtttgattctcttaatctatttcttggagcgtttcacccgcttaatccttggccgtatctcgtggcactgaacaaagaaaactccagggatttctccataaagcaattaatcgacggtttgatttccgttatatttctaatctaactgattaccattagtccgcctgctcatcgtaagtaatttcttgattccactatagcatctatccctcagtcacatctcttattgttccatcgctcaagttcaaatggcggttaaataatcgttgcatcttcggatcaatatgatgatcgatttccaaaatcgttaatggactatttagcaaaatcatatgaatttcgtcagcagtcttaggatcaagcgatgcagtaccttcgtcaatcactaagaatgtcttattgtataaaaatgcacgagctaattcgatccttttttgttctcctcctgataagttcgttccattttccgcaaccatatagtcaataccattaactcgaacaaattcagataatcccgcttttttaagtgctatgagaatctgttcatccgtaaattctcttcccaatgttaagttcattcgtatgctatccgtaaagatacttgagctttgacgcaccacgccaaacatgtcgggtaatggtgctacggtgtctccttgcgtttctttaagttgcactgtgccttttcgtggcttgatttgaccaatgagaatattgataaaagtcgattttccagcaccagatggacctgtcagtaacaccttttcgccactgttaatttggaacgaaacatcacgtagaatactgggactattttctgaatgatatgaaaaatccacttcatccatggctaaggtggcgaagggaatcgaggtccgtgtactgcccgctgaagtgaacaaattaggatcaagaggttgaaaagatgtaatttttgcaatagaaggtcgtgctgcgttcatcatgctatttgcccgcgcaataccgagaaagacgttaataatccaactacttgagtactggacagccacaaaaccggccaaagaaacattccctttaatcaccataactataccaataccaataggaatataagtcatggtatatgcgagcgcctcagctgcaaagttactatttgcaataacgttgtctcgttgtcgtctgttttcgacgccatttgcaataacgccctgaccgcgctttaagaaaaaggatagcgcattataacttaagacagagtttatattacgcatgagatctgtcatgaacgtgacgtaactccccattgccgaactccagctttgagattttttctcaatcttagatttaaatattttaggaataaaaggcgttacgctaccaaataagacgaagattatggtcaataccacacttccccgaagtgcaactaccagtgtaaagaggaccgttgagactgactgaaccaacgtaaaagcttgtcggatatagttattctcgatcaaatctaggtcattgtttaaaaaagaagtacgatcagagaccccttcctcatttgtttcgataaagttggattgaataagccccacacggacgttttgattaaagtctgcaatatttttattcaaatatcgttgataaagccagtcaatcgttgacagtgctatcatcccaaaaataatgaagccaattgtctctattaccaccactacccgcttttggctcaccaatgcaaagatttgcgaataggcccatgtattgaatggaatcatcaagcctgaaaatgcagataatataatacaaactaagagtgaccgcttattcatgtattttctcataatagcctccacgcgccgttaaagtgatatcatctcttacactgtttgaacgccagcgggtttgtgatccgtaatccgtaagcggtcgtcaaaaaagctaaagcaatggacagaatttatgcttatctatccgctccgcatgatattgactatggatcctagcctcagttttctagaacacaatatgtcttagtttgcaacaagactgtttgaccagtcctaagtccagcagtgaactggaatgctttaatatttgctcttctgtatgtttgacaaatcacctagctaaaagcttcacagaagtagtgataattgttgtattaccacatgttgtattaccacacattctttgtctttctgttccatcgctgaattagatgaattaattgcgaaaatcttctaattttaaaacacgctaccgcaaattagatataactaatgatttgattgtaactacattaaatatcggtgtcaattaattatttcaacttaacttgatttaaatccggcatttaaatccagcttgaacttgcaataaattgtttgatacttatttcagttaaagaaagccgaaatccacgtgcagcttgtgattgcagaatgacatgcccatgttgatttatcgtaaactcctgatcttaactttaaaaaaatggttcaagtctacaactgccaatccgttctccttctcttttctggttatttcaggttacaatatggcgacgagtcatcaatagtatcttcatattcgatactgtcttcccgcatttattctccgatgaagtaacgaactttcttaaagtgaggtctaatcctatgcagacattttacaaaaatcgtcccgccacggtttggcaaatcagcaagacgaaccaacgtcctaattgggtacaagaggcgtttgatcaaaattaccttacgtggttagatgatcgccttcgaattgtcatggccggtttgtattcacccatgatcccaagcttgcaaaacgaaaaagccgatattttccatgatcatggtgttatgttcggcatcacttcgatcggttatttaggagattatctagacgttacaaatcatcgtgttgtcacgaaagaacaattttcaaagcactatcaaatccatgcgtcaggtacttggacataatgggtatttaaaaagcaatcgcctcgtctccaaaaactgacgagcgattgctttttaattgctgcggggtcagtaaatactgtggtaactaaaccctgtcgagcactttagaaattccgtgcaaaagaccagagaatgacccactgaacaaaaacaaatgaaagcgtataggtcagtgcccagcggctgccggattggacaatgaggaacccggccagatttccaatgatgatcaaaccgatcacaattgcgataagttctttggtgcgatgatcaattttgcctttgtaggttttaacgatccataaaataacaacagacgtaaataaaacgttaatgacatcaccgaacatcatggtgaccacctcaaattgtgcgagccaactcgttgttgcaaatggcttgttaacctgacatgcgagctaagttcctagtaaaagtatcgaacggcgccacgatccttttcctagcgttaatctactgccaattcgcactagacgtcaactattaatgcttcttctttttcctagagatcatcaaatcactttacccgttcaaccacctgctgtatcgcctccgcaaacgcttggggttgggtgatgttcaactcatgcccgcctgctagaacctcaagttgactttgcggcattaaccggttcaagcgcttggctgcaccgcgattagcccagtcgcgagacccgtataagattgtggtcgggacggcaacggttgccaacttcgcccttaaatcaagttgcatcagcgaatcagtcaaggtacgtacttgcgatttggtaacacctagatcagcgaatgccgaatctggttgaaatcggaacatcacatcttgcgccttcatcaataatcggtttggcggtgagtactgcggtgcgctaactaaggccccgacaattttagtggctgggtggcaaagctgcattagcgttaaaacagcacccaaagacaaaccgcacaaaataaccggggtttgattcttttgtaagtcccttgccagtttgtcattgagcatcgacaatgtcagcgagtcgtttggcgttagtccggcaaatacatcaaacgtgcgactgggcacccgtaactgcttttgaaccggttgccaaacatcggcagactgccctaagccctgaactaagataatttccatatgccctccgtcaataatgatattaggatcacttttgcatgatagttctaatctacctgatgattgacactttgtctgccccgcgcgccattaagttccctgagtggtaggtaaaaagatccccacttccgttttcgggataggcgtatgcaaaaagataggcagtttatcagcagaggcaggtgttttcctccgattactgtgccggcttccgcaccataacaagttcccgaatcgttccaaatttcgtcgcatcttcaaggaccgtcttagtttcagtgaagccaaagcggcggtaaaatgcttgcgccgcgtgattgttgtcaagtacgcgcacatagtcattcgaataagccccatcaagttccttgagcgcggcgttaagcaagcgttcgccaacatgctgccgctgaaacgctggcaaaacataaatcgagtaaagctcaccccacccagcacgttctgccatgcgcgccggtccataactacaaacgccgacaataccggcgatgtcgtcaattgctaggaacgtgttttgccagcggcgctcaggatgccagctggccggactcagctgtttcaaaaagctcgcaggaatcagatcccagtaagccacttgccaagtcgtatagtaaatttgtttaattgctgcaaaatcactgttcggtgtagctgcttggatgcgaatgttggtcattgcctacctcgcctctttttcctgttgattgtaccgaagaatccaagctgcagcggctgccaaatctgcacattcaacatagttcccgacaacatcctgccggccagcacttccgcgaccggttgcaacatgaatgccaagaatcccggcgttatcagcacattgcatatcggcccgataactgtcaccgatgattaccgcttcctgattcttaaaatgatatttcaaatgagcctgaccaataagaccggtcttcggctttcggcaggtacaaccagcattttcagcgtgcggacaaataaacgcatcgctacatcccagcttaaaaagcgagcggcgtaatgctgcttcgtccaactgacccgcagcaatctttgtctgattcgtcaaagcaaaaacctgaagcccagccattttcaaagcgcgaatccccgcgacactgcctgcgaaaggaacaaattgacgaataggcgtaaaatgaccatcgcctccaattgtcccgtcacgatcaatgaacacgatcttaatcggcatcacatcgtcaccgtcatttcgttaaatacagatcgcgaaaccggttaatttcagctggtgacaattgcagcccctcatgtaaatattgatcaaaagagccaaaatgttctgtcaccacctggaaaaaacgctgtaaatacgctgcatccaccgttaacgcttcgccaatggcctgtagtttctgctcgccagacccttgcttttttaagccagcgagaatttcttcgttggcttttttacgttcctgattagtccgcagataatccgccatgatgtcttgatcagatacaccgaggatttctaaaataatcgcagcgccaactccggtccgatccttgccggcaaaacagtgaaaaatcgttggccgatctggcaccaataacgcttgaatcaatgcgcgataaccagtttgagccgaactgcttactgccagctgctcatacgttgccaacatattttcgcggacactgccttgctcggtaatcatacggccgagactggcattattagcggtggcgtcttttaaaatatccaacaccgcataatcggcgcccggccacacggtatccggaaactgggcacgctcatcggcactgcgcatgtcaacaatctgcttgatgcctagatccttagctaaataatgttcctgcgcttcatccagttcaaacaactgaccggaacgataaatcaagccagctttaaccgcttgcccgttcgcattccgatacccgccaagtgaccgaaaattcgtaatcttttccatttctaatccgccctttcactgtgacgccaaccgataatagtttcaactcacacagaacggtgttaatgccgctgcggaaacttttccaatcgataaagctgttgatcatccaccgttgcatccccatttttaaacgcataccccatgtggcggtaaaagttcacagcagtaatcgaagcaggaatctcaacccgatgtgcctttttaaaatagggatcatgttccaatgtctgaatgatcaattttccaataccacgcttttgataagctggcagcacgaaaatgtcaaaaaagctaaattccgtctcactgccccagtaaggtccgatggcgccggtgcctacaattttatccgcatcacacactaagtaaaaatgcgtctgcttggccttttcaatgaagaaagtcggattcattcgctgaatacttgcctctaagtaagcttgcgagtaatccgcgcgatttgagattctcagcgtctgggcaacaaccgcggctacttcttgggcatcttccgaccgaaaccgcctgatatttagcatactgccatccccctccagaaacctgacgtgtccatgcgccccttgtatccgcttaatcctgatccggttcagacgccaagcaagcagccggcaactgcaaattgtgccagtcagtttcgtgatagtcttccataaattgttcaatatactggcaggcataaatatccaacagccgccgtccaccttctgtcaggtacatcagaagggacttttgactggtaaagctgccaattaaatcagttccatacagttgcccaagtgcctgattaagatcggctgacaacccgttcatcatcacgcgcggtcgtttacccaactgaatcagctggtaaaagatcatcgcttgcgactcttgggaaaacgtggcatagctgtcatcaatttgaaaggttgtccgatggtgatgcccatattttaccagtgacaagacgaaaaaatcccgatagcaaaaggtcagccatggtgccgtcttcaggaacgccgtcaaatcagccgtcaattgttcctgtgagcgcaagacaaatgtcggcactttttgaaacccgctgaaagaacgatgattgctgacccgaatcggcaaatattggttctgcgaatggccaagaatcacatacatggactggcttttacgcgctcgatagaaactaatcatatgatccccagaatctaatgcctgggcaatggccgctttaacatgcaactcaagtttttcactcatctgcatcagctcacctcgctttcaaaatcccggttgctactaacttaacacacggattgactagctggtgacgattaatgaaaagttatggttgctagcgatgttctgatgccaaaagtgcaacgttcttcggccaacaagtcttcaactgcctgattgataacgggatcatcactggcaaaagattggacctgccggctgtgaagatctattaactcgtacagaaaaagtctccgcaattggagactttttcttcggcatcaataaatactgctacatcaaagcggatacaccacatgaaaagactcaagcacaatccgcgccgtttccgggtcaaactgcttcccctctgctgcgtattcgtttttgaaaaatgccagatgaacggcgcgccaatatgccaggctccgatcgccttcaccttcgcgataagcgtgatcggcactgacagctaaaaagggctgcacttcaaccgcatctgtatacgtcacacaaaccggttcatctgcaccatttaaaatcacgccataagcgccaacctgaggcaatggttcatctgctgcgtacaaatcccgcgcactggctgctgctgtttttttgcctgcaaggactaacgccgccaacttatctgcttcggcgccgaattgataggcactttgtaaagtcgttggtgctggcaggttcaaagcctgcttagcctttgtaaaatacgcttctggtgtcatcacataaccctttctgttcatattctttgacggatcttcacgctcatttgtgatatggactgccgatattaatcataaaggcccggtaaatctgttccattaatactaaccgcattagctgatgcggcatggtcagcttgccgaaactaagcgtatcattggcccgcttcatcacggctggtgacaagccaagcgaaccgccgatcacgaaggtaatatccgaatgcccgtatgtaccaagatcggcaatttctttggcaaaaacttcggaaggtcgctgtttaccttcaatggccaaggcgattacccattctttgtctttgatcttattcaaaatccgatcgccttccttggcttttacgtctgccatttcggcttcggaaagattctccggcgccttttcatcggccacctcgacaattttaacttttgcaaatttgtccatccgttttaaatactccgctatgccgtcgcgaaaatacttctctttcagcttacccacaccaatgatcttaatgttcatacaactcagccctttatcacgtcattcatcaaccggtaacttatccttttcaagtataccagacgttttgcggcgtttgcctattgtcatcgttcggtttttagcgcaaaatatacaagttgaggttttttcaaatgaggtaaattgatgattgttattcagcgtctgatcagagatcgggtcctgcagatcaccgccttgttggttgtcataagcttattcatcggacggcctaaagcaagcgacataagttttgccacattatggtcaattcttgccatgatgacggtgattcaaatcttcgaacacctacatattcttgattactgggcttatcggttaacttcgcgagcaaacaacacgcgtcagttaacatggtggtttatttttctggcgatttttgccagcatgtttctttccaatgacgtgacggttttaaccttggtgccgttatatctgcgggtagccaagaaatatcaactgccggaaattcttccagtaaccttgatcgggatggccgctaattttggtagcgccttcacgccatttggcaatacgcacaatatcttcttgatgcaccaattcgaaatcgatctccagcagttctttagttggtccattccgctgttggggtgcagtttcctggtgttagtgctattgagtttattcttgcgtaatgtcccagtgccaaaagtaccgactgaacatattcacatccagatgcgtccgaccctgtttgccattgccgttgcgtgtgtggtttttgccggcgtcattggtgtcgttccggcttggctgggtgcaattctagccattgggttgtccgtagcgctggatcctaaagacatgaaagatgttgattatgcggtcgtgctcacgtttgccggcttcttcattatcgtcagtgtggtgcggcaaattccttgggtgacacattttctatccagccttatcaactctgaaccgtctgtttatttcagcagcatcatcacaagtcaggcaatctccaatgtgccgtcaacggttcttttagcgcggttcactggttatgtcgaggccttgttctacggctccaacatcggcggcgtcggaacgctggttggttccatggcgaatctgcttgtcttcaaacaatacatgatctatggcagccgaccgcatgcacgcttttttgtcggctttacgatcttcaacttaattggtttattgattctcggctgtgcgggctactggctgaccattcgctaaaatagatgataccgtgacactaggtaaccatagtgtgcactggaaaaaagtctttgggcacttacataataaataacacatgaaatgtatgcgttttcattgcttttccccaagaacgtgctagaattaggatttgctaaagaacgaagcgcatttaatccgcacgatggcgtcagacaaagttttgtctggcgtccttcatttccgcatatgaagcggttcgttcgcggactcaggaggaagataaccatgaagcgcaggacgttgttttcgatcatcgtcgtcacgctgaccgcaggatgttttaccttattctacggcatgcatagtatgtggactgatacccaatcagcccaagccgttcaagctgccaccgaagaagttgacacattattcaaggataaggcacaccaattaccggcagaccagcttagtcaagaaaagatcgaagcggtcgcgaccaagttacacgcagcgcggcaaaagctcacggaacctgaatacgccgccaaacttgccagtgcccaggctgatgtcgatgcagctaaacatatgctgaccgttaaaaaagcggttgcacaaaccaccactaacttatccgatttaaagaccttaacagacgaatcacaccaggccttatccgaacttgccacccaaaagcccgagtttgttcaggcctatcaaaaacgcgtggcacagttatccgatcaggaatcggcggttgcaaagattgccagtttatttgatgatcccgacttcaaggagccaaaagccggtcttagtgcttcccaagtgcaaaccgctttggctgcccttgaacatgtgaataatcaacagtttgccgaccaaatgctgccaatcatcgccaccgcccagcaagcagcaactgatgatcagacaacgagtgaagccagttcatctgaatcatcaacatcaggcgaatcaagttccgcatcgcagacaagcacaagtagcacaccgtcagcatccaccagcagtcaggaatcgacatcttcatcagcttctaatagtgaatctgaacaaagtcaaagcgtgccaagcaactcagccgccagttcgactagctcctcaggccaattgccataaaatcgtatcaaaatcaaaaagccgggtaccagcgcgaccaaattgtcaccgcgccgatacccggcttttttcgttatcctgatcacagggttggatcacttgtctgccatttctgctatgacctatgacggacagcatgcagaacgtcactaagctgctagttcggtcaccagttgcgttagataatcgataaatcctaagtaatccgcaatggcaacattttcgtttgggccatgcgcggtcgagttagcattaccgatgccacaggaaataatcggcgcatgattgacatcataaaaatacttcattggcccgctgccaggggagtttaactcaacttggacatcatcatctccataagtgtcacgcgccaatgctagcgctgtttgcacgcgtgggtcgtcaggatcggtgcgaaatggcggttcgccgagaaagtccgagacctcaatatccgggtaaccgcctgctatgagtgcggctttgaccagtcgcaccgtctcagctggcgtctggtccggaaccagccgcagatcaatcttggccaaagctgtatgcggtagaatcgttttgccaatgcctgggccttcataaccgcttgaaagtccgttaatggtcaagctagggcgattatacagagcttctttgatctgatcgtctgccaccgtagccggacgggtgatcccataattcttggcaaaggctgcataatcaaagtcagcttggttaatgagttgcttttgggtcgccgttaaaggtttgatcgcatcaagaaaatgcggaatggtgatctcatcctgagcatttttcaaggttgccagtgcctgaactagccgccatgccggattctctgtcaccgcgccgaaactggaatgaagatcgaaatcagcggtcttgacactcatctgaaaagcaacaccgcctttgacgcccaaagagatttgaaatttaccttgctcatttcgtccacctgattcccacaagcaaaaatcagaagcaagcagatcggcatactgagtcagcaggtcatcaagatggggactgccttgctcttctccgccttcaaccagaaacttaatcgtacatggcaacccgccttgtgcttgcaaccgggcaatcgctgccagtcgcgctgctaattcacctttatcatcattgatgccgcgtgcatagagatgagtagcggttattttcaattcaaacgggtcacttttccaaagctgcagcggctcggccggctggacatcgtagtgattatagaagagtaatatcggggcctccgctgtttggccgggaaacactgcatacactgccggattggcaccatccgtccgtagaattcggctggtggtggcacctaggtcagtaaattgttgctttaaaaaggctgcggtttcgggaatctgattttcagccgccagtgaaacggactgcagtcgaagatattgcgttaaaaagtcttgcatgggaagcgtcatcgtgacacctgctttctggttaatttatttgaagtatgcatagcgatattcagccggttgcaacatgctgtaatgcaagccgccaactttcgtgttaatcaggcggctgttggcactttgataaacaggaatgtaaccggccacgtcaattacccgggcattggcagcaagttcttgttgatagcgtgcggttgcgctttggccgttggtatcattcactttattcattaaagctgtatactcgtgatcgctaaatttcgaaaagtttgaaatattatcagcagtggcggtgtttagataatctgaggggtcttgaatcgttgaattccagctcatcaagacagcatcgaatttgccattcaatgatcgctgaatccgcgtcattttcggtaagctattcacggtaactttaagttgcggcaggactttggtgagctgactttgtaaatattcgcccacttgtttatcggtaccaacatcggaagtgagaatcgtaaagctgatgctgtcggtatgaagctccttcaaagctgctttgagataggcctttgccttcgtcggtgaataggttaacggtgttttggcatcgctggtgaaatctttacctgtcgtcggattggttgccaatcctttaggggcaaatgccttagccggttgcgaaccatcttgcaaaactttgctggtgagagcttggcgatccaaggcggcggaaatggcacgccgtaagttgacgttgttcagttgcggattcttggtgttgagctgcaggtaattcatattcgcagccggcgttttgctcaatgccggattgtccgcttctttttggatcaagttgcctgataacggtgcatcatccagcttgcctgtagcgaaaagattatcaacggtactggaatctttcaaaacattgacgtgtacatgattgattttcaccgacttagccgcatagaagttcgggtctttgacataatcccagctgtcactggtcgtattaaaatgcttaattttataagcgccattggtcacaattttgtcggcagccgtgccaaacttcttgccgtaacgcttaacggcagcttcattggttggataataaccggtcatctgactggaaaaataaggcgttggctggctcaactgaatcttgagtacgtacttactaggtgcggaaacgcccaaagtatccggcgacttttttccagcgacaatatcctgataattcgcgatcgcatcgtattgatacgcgaattcggttttagtcttgggatcaacaatgcgtttgagtgagtagacaaaatccttggcggtcacaggcgtcccatcgctccatttgacatcgcgccgtaacgtcagcgtgtaggtcttgccattgttggttggcttaacaacctttgtggccattgccggaatgattttgccggattgatcgtgatcataaagcggcgtcatgatctgctgaaggatcccgccgctggttgcatcaaccgcatgagccggatcaagtgaactggcttccgtgctgactgcaacgttgagcgttcgccggttggttgctgcttttgctgactggccgcatgcggctaaaaggatggtgacgcctaggagactaagacctagtgagagctgcttcttcattttgtacacctcgtgaaagtatttttggtggtggaatttggtacaggcgaaggagggggagtgcggatggtgaggcttggggtagctgggtgctttttgatatagaggcctttcgtttggttgcggtaaagtggaccgcgtgtacgagggggagttctattttgggcacttggttggttggggcttgcgttctataacgcgctcgccagcgcagaagtctgcgtgtaaggacctcagccgcaatggccaagggcgggccatcacgcccgaggccgcttacactccgatccctaaccgcgctggctcgcgctcacacaaaaaaaccgtccataacaaacttcttgttaaggacggtttcccgcggtgccaccttagtttgatcatgagactgcgcctaggtattgtgtcatttggcagtttctgatcacgcttagcccggggccaacaccccggcgacaactgacgtatgccaacacgtttccccgtacttgcggtgctttcgggggaaccctcagtggtccatttactgacttgcgttcggccggactctcagcaacgccggctctctgtgcgtgcaccatcagcttgatctccacttcaaaggtttgcatgaacggttatttgattacttgcaactctaaccgtttgtcaggttatttgtcaagcgatatttaactaaaaagcttgacaaactttttaagctaaagcgccagacaacaaaatattgaaaaaatttttttaaatttagacaacgttaataaagtcaagggctcgcaagttttgcttcaccttaccaaacttgcattcaactagtaaaccccttatattacaactatattaatgtgtaacaaaaaagaaccatttcgtgacctgtttgcaatggtcttgttaagtccagcccgtaccattaggatattggaggtggcatcaatgaagcgaaaacatattttccaagtcttggtcggcaccttgattgcagggtacttgaccgttttctatgggatgcggaatacgatcgatacctcatttacacaacatgccgtccaagcggcaacggaacaaactaaccaactatacacatccacgaaacgcgcctttccagccaaaaacctatctaagaatgcagtgacatctacgcaatccaagcttgagcaattagctcagaatgtggatgatcgcgatcagaagaaagttgtcctcaaagataaacaggacgctgacgctgccagtcatatgctgacgattgaagaaaccgtaaaaacacaaaacggtaatctggctcagactgctgaagacggttcccgtgccaacgcagcttacaaagcaatcgcgaataccaaacctgaatttgcggctgactaccaacaacaagtcaatcagctttacaagaagtcgctagccattgcccaaattcaaaaattataccaagatcagaatatgcaacatccaaaggcaaacctcagcagcgacagcattgatcttgccgtcaatgccgtcgaaaatgttgagaatcaggattttgccaaaaacgttcttcccctagttcaagtagcgagaaattcccaagaaagtaacgactcaaacattgcgatgggccaaaacagtgcaagcagccagagcaaacagacggaccagcaaacgtctgctagtggtgtcgaaccagctagtggcgtaggaacaacagctgcagcttcaagtcaaaagacgccatctagcagctccagccaaactccatctgaatcaagccagccgtcctcaagtaacccggctggcagcagcacttcagcttctgatgatcaaggccagtcatcatcaacccctgcttcaacgggtagcattgaacccctgacaaccgtgcttagtggcggcctttacaaaacttacgatgatgctgtcgccgctattaaggttcaaggcaaatctgttgacgacatgaccgtcaagtcagtcaccatgagtgatggctcttaccagtggacttgggggccaaacggtgatagcggcagtcaagctagcagcagtagtgcctcaagtagcggtagcgatgaaagtagcagtaccggtacttcaagcagttccagtcgtgctgcttcttcaccaagttccaatgccaatcaagcttctagtcaagcaaattaattgatcattcgttttcataaaaatgctgtcatctgacttggatgacggcatttttcttttgtctggatctatcaattatcagtactgacgagggattaatggttctgttgttttatttatactatttttcccgtatgcttaagatagcaattaaatttgttatgatttcggatgtttagattctgaataacgcgttcgccaatgtaaggatcgcgcttcagctaagacgaggaggtagtatcgtgccaagcattttcaatggcgttccctggtatgatcagcatcaacaagtcgttaatgcttctggcggctgtttgattcaagaaaatggtaactattatttattcggtgaatatcatcaacctgattcaattacctttgccggattctcacggtacgtgtcaaccgacttagaacattggaaagataccggtctcgcactttctcctcagccgtctggtcttttaggtccgcatcgaattggtgaccgtgtcaaagtgattcaagccaaaaccgggcagtatatcatgctgatgcacaccgatgatgaacgtacatttgatccggttgtggcgtatgctacagccgatcatttaaccgatacgtttgagtttcaaggcccgctacgttatgagaaccaaacaatccgcatgtggcatatcggtagttttacagacgatgatggtactaattatctgttaacgcatgaaggtgacatctatcgcctagctgctgatggaaaaacagctgaagctaaagtcattagtaatattgctcctggcaccgaggctcctgcaatgtttcacttcaacgatcattatttctttctggcatcacaaaaaaccagctgggatcataacgataatatttattttaccgctgaccgtttaaacgggccttggacaccacacggcccattttgcccatcaggaacattgacttacaactcgcaaaccgcttttgtcacactcatcacgactgcaaagggaacggttcctttatatttaggtgatcgccacacttacccttacctgaacaacagcacccatgtctggttaccattaacggtcaacggtactgagttatcaattcctcattattggccaagatgggattggtatgaacaagatgcccaaccgatgacttttaattccttggcatggactggccagacaagtgatgctagcgtaaccctttctttttatggcaccaatattacgatcaccggacagaccagtccccaaggcggttttgctaaaatgacgcttcgtgataaagaagggcatatcagatctcaagtttatacagacttttacagtatcctgaccgaggagacggtctgtttccgttcacccactgagcaacccgaccattatcaactattgattgaagcaatgggcattcacggtgactggtatgataagtcgcgtcgacgctatgggagtgacggtaatcatgtaacgatcagcggttacagtattgataaccccactgataaagatactaaagccgctgtgacctaccacgctagtaaacaggcatttatgattcataaaatgggccatcactggacgcaatcagcagtggcaagacctgaaggcagtgcttattaccaatggctgcaaagtgacattggcgaaggggagctgaccattggcgaccaacaaattcatttgcgaccgggtcaaggcatcctcattaatcttcacactagttacgcttatcacccggttacatccctttggcaaaccagttatcttagttttggcggtacgatcattgacgcaatgatcccgggtattcacacttcaaattcaatcttctttccagtccttggctcagaagtgttgggttttatccatacccaaatgcgccatcgtcatgaacatcattaccaagacgaacatgcctcatctatcatccaagatttcttaaccaagctaaaaccttataccgcacgtttaaaggctgatcctaccaagcaaaaactagctgaacagactctaactttattacagcagcattttgaagaagacctaaccaatgaccagcttgcggaaatgacaaattatagtttgcaatatatgttgcaaacttttcatgagttatatcaaacaacaccgcggcgtcttctaacgatctatcggattattaaggcaaaacaattgctgatcgaacaacctgatctaccattattgcaagtcgctttacaagcaggatttaactccgaaacttatatgattcgtgcatttaaacgccaggaaaacttgacaccagggcaatttcgcacagttgtccatcaattacgttcgtgacaaagccggtgtcgctttggttcaaggtctgtcaacgtttgattactctgcagctaagcaaaaatcgatccagacagtatgaaagttgcttaaatactactgtcagaatcgattttttaataatcacgttctttttaacttttttaaatcgaacacaatcttgccgttcttttaagtttgttccgactatcaactatgactattcaaaaaaacctagcaaccctgggagtagacgttgctaggcatttatgatgatctaagcgaattcataagcgtgaaaagaatggctttttcggggtagcatcacctccttaaattaggtatttgtgactgacaaacgcttatttagttgacgtgtcagcaggtgtgctagtcttctgatcgtttctgcgccagaattcaattgaatcgtatggtacccctgtcaattgttcacaaacgcgtttggtatcaggcttaacgtccttcatgctgccgcctttttgtaaacgggttaactcagcggctaagacattaaaggtcttcttactgaggtggaaccggctcgcaaagaacatcgcgatcaggatcataatgcccacgccgccagaaacgataaacagaatcatatttgtggcacttgcaggctggctaaccgcaccgcttgtggactggcggaaaccggaaacatcaagcaggtatccagcaacaactgaggccaggccttgactgatctggttgatgaagaccatgactgacgcaaacaagccagcacggttcttaccagtaaccaaggtatccacatcaggaatgaacggaaagacattccacggaacaaagtaaaggatgtacaaaccaatttcataaagcaacgtgccaacaatcagccagatcataatgccggctggcttagttaaaccaatgaagacccagtcaatagcactgattaaaatcaaggaatagccaaacaggtacaaggaacgtggtgaaatcttagtcacaatgtaaccagctaaaatggtaactggtacagatacaatacttaacgattgcaacataccggatacacttgttgatttaccaagtacgaagacaatgtagtaaacaaatgtggtggaccatagaatcgaagcgaagtaagaactcagataaattcccatgtgcgtacggaaactcttaatcttgaaggtagagaagtagttgcgtagttctgacttcagtgaactcttcttaccgccgttatcttcaagcgcttgagctgctaacttcttagcttcattcttggttacgaagtgttcccatgttgtcttataggtaatcagaatcaagaagaaagtgacaactgagaacatgatctgcataatcagatatggcatcggggacgttttcggatagaagcggaacagttgggctggcacaaattgagctaacatgttacccaaaccggcaatcaccatccgcgttgttgacagggtcgtccgttcgttgtaatccttggtcatttcatttggcagtgtttcccaaggaatctgtaacactgacatcaagacagtcgtgatgacgtaggtgatcagatagtaccagtaactcatcccggcaacccataaagtgattgcaaacaggacagatggtgcagctgccaaaatgaagatgtggcgacggccaaacatccggccgatcttatacttgtaaatattatcagagatattgcccatgaccagtgaagcaattgcatcggcaacccggccaatcaggaagatagtcgcaccttgaccagctgacaagccacaaaatgtggtgtagaagaacagcaaccacgcaccaaccaaaccttgcatggaaatactgaacattgaaaagacaccgaatcctaatgatcggccaattccgatcttcttaccacgagcatggtaaatactcttagaagcgtattcgtcccaaccgtcgtggacaacgccttttttattttgcattgtttttttcctcttttataaagtttgtacagttaacggcaaaatgtggatgccgagaacttacttgtcaattaactacttttcgtcaatgagttgttcacgtaacttcttagcaatttgatcatccgaaagtgccaagtgggtgttagaaagtaacataacccgggcatctgctggctccatcagatatttacgttcccatacatcctcatctgacccgtcgcctaagacgcgcagataagaacgcaagcgccgtaacttgattgcattcaattcgatgtttgaataggcatcattatggaaaaagtccacccattttggtgatggattgtcccgccgcaaacggataatttcatcattggcacgcacagcctcatctgcaccaaggaaggcatggacaatttctgcctgctgataatgacggtaggcctgaatgctagcacgtaaggcatggagtgaacatgcgtggacagcaattcccaacaacatgtcgttatagaaaagccgctgcggttgttgacccataatatctgcgtaaacttgaacggctcggcgatacaggcgatcccattccgcgtattttgtatcaatcaactctgtaaccttggtaagctgatcatcgagtgaaacatcgcctgtcaaccatttcatttcttcaagttgtgggtaatgacccatccaagctttgacaactttccggattagataagtagcgaactcatcgccggctttttggtcatcgtgtgggccatactggatgggtgccttgaaataatcttcgtagatcgttgtaatttctttttgagcttcggaatagtaatgtgatacatagtccttaatgatcgcttcttcactatgtacctgatagtctcggcgccatgaacgggcaacttcgcgaataaataagatatgcggtttaacattgccgacgttgattaattccaaagtatccatcttagctttgcgaactttttcaagctcttcagccacaaaatgcggactgtttggcaataatgtcaggaaactggatgcctgtaaatcatggaaggtgacatgatagtagataccccgagcgcggtgtgccttattaggaatggtcaaaactggtgaacgcggatcatcatcccattgccgccgagagaccatcttgccatagccattgtcagcccagatctcaatcacgtcttgtggcaatttaagcaagcctttattgaacaaacccgtcaattcaccgtaaatgctaactgagcattgcgcacctggatcaagttcttgaaccatatcgtattgaagtttgatggtatcattaatgactttcgctttttcctcatcagtccactgatgtgacgcatcatccaaccaaaacggtcgatcgccctgaccccggaaccctaatccataaaccacttcatgcccacgctgttctaaaatgctatcgcgccaaagctttttaaagagttcaggatatttcaagtaagaagcttcaagggtaggataaacacgggcaaacatttccgatccaagtggttcagcgtggtgatgggcgatgataagacccatgtcacgagctccattacgatgataacggctttctttatcggtccccggaacgacaagattaccgccaacccgaagtaaggtttcgtagatgcgatcccaaacgtaatctttggaatcgtgatcctgccaagctgcaaccagcaattcatcgttaacgaaccaaccacgatactttgtctggaaatcgggtaaatgttgactgaagtcggtccaactaactgtcgattgcttcttaataggcgtatccataaagtaccagaagtcatcaattccaagcacttcacgagaaacagctaaggcaccatacatcaagccacgggtcgttgctgcaacaatttcaactttccgtgggctaacataatgcatcgtgaacgtatcaggaactttttgatcggcatcttttttcaataccaaagtaatttgattcgcatctgcctcgccagtggttgctttttgaatatctctttgtaaaatatccacagcgttttttaaaaccggatttgccatattatcggtatgaacatccgtttttctagaaataacaaaggtgtcttttgacatacacaactccttctttcatgtaacttacttaaacttctgctttcaataattgcttgaacacccgttgtcatgaggtgtcttgaaacttttgtgaactgatatattaaaaccttaattacaaaaagattgtagcgcttgcagtaaccgcttccaataaactagtttctgcaaccattgcactcgttactgttgttcactgtttaacatcctatgtacaaaaaaaggttcaatcagatgcgcttatatcgcgcgtatctgattggaccctgaaatctcttgatcttaaattgttaattaagcacgtgcttctgcgcgaaccggatcaaccaacgcctgccgatgcaagccattacgtgcccgcagcgcgtataaaatggtgaccgtatcgacgacttcttgcaacatggcgccaataatcgttggaatcacgccgaagctggcaatgagcatcaatccggtacaaatcgcaatcccgatcagcactgactgcttggcaatgaccatggtttctttggcaatcaaggttgctgctgccacttttgctagatcatcgcgtaacaccaccgcgtctgctgattcactggcagccgttgcgccatgtgcacccatggcaatcccaacatcggcaatcgccagcgatggtgcatcgttgaccccgtcacccaccatgacaacgggacgatcatccttaggcacattgtccagcacttcaatcttttgctgcggcaattgctcagcatacacttggtcaataccgacttctcgagcgaccttatcggcaatggattgttggtcaccagagatcatgatcaagttggcatcgtttaattcgtgcaatttggtcatggtttcttttgcttcaggccgaatttggtcggaaaaggtaatggcaccggcatattggccatcgacattgacataaaccgccgttgtatccaaagtctcttttgcaccggcgaactcagccttgccgactttaaccttatgcccgtcaacggttgcataaacaccgaaactagttgcttcactgacttcgcttgccggcagccgatctgctgctggcactgcgtctgtcaacgagcgcgccaagatatgggtcgattggccttctgcactggcagctagattcaaaagctcatcttgggaaaaaccggcctgcggtaaaactgtcgcgactttcaaaataccacgggtgacggttccggttttatcaaaagcgaaagtccgagcgtcactcaatttttcaagggtggtccccgacttcacaataatcccgttacggctattgcgactcatacccgaaaccatggcaatcggtgccgccagaatcaatggacaaggcgatgcgacaaccagtacctgtgcaaaccgaaccgggtcgccagataagacccaacccaagccggcaatgacataagcaactaacgtaaatggtaccgcataccggtctgccatccggacgaaatgagccggacgagcttcggattccttaacaagtttaatgattccctgatattgactgtcttctgctcgctgcgtaactttaacggttaatgccgaatccccgttgatcgtcccagacatgatgtcactacctgcgtttttggcaactggtttggattcaccggtcaaactggcttcatccaccaaactctcgccttccaaaaccgtaccatcgactggaacaacttcttgaggcttaaccaaaatcgtctcgcccacttgaacggcatcaacgtcaacatcttcaacgtggccatcaaccaaccgatgagctgtcgttggtgcgttttctaataactgcttcagttcactgctggcttttgtcgcagcataactttccaaggcgtccccaccagtcagcatcagcaaaacaatcatcgctgcccaatactgactgactgccaaagtggcgactaccgccgtaattgctaacaaatcaaccccgaaattacctgaacgaatggtcttgaccatgccgccgaacataatcaaagcaataattgaccccatgactgtaatcagtccctgagcaatcaatggctgttttaatatgaacgcaaagaccagcgccacagcactcacaacaagcaccatcataagctgccagttcttcttcattgttgccactcccttttcctaagtaccccaattataaccattacaatttaaaaacgcaaccctttttataacgaatataatctggacgttcaaatcctgtaaccgatataattcagtctaggctaactcagtaaacgataaggatggcaagtgttagctcggagctgttttctaggccttcacctagacaattctcttttcggttatcctaaatgtttaccttctattatacgcttttacagcgaaacgaatcattaatttgaacttatttcctgttttcagtgacctcatctgctctgaagaagctgctactgctgttactttcttcgtcaggatcgaatgaccggtagctagttgttgctaagcgcccctgctcacgctcgaaaaagagccggatcagtttcccgatccggctcctcaaggtattcatactagacaaacagatccgattcaatcgatcgtaatctgatgcccttcctgctgctcagctgccatctttggtaaatcaatggtcaaaacgccatcactgactttagcactaatcttaccttcatcaacgcttggcaaccgatagctgcggctcatgcggccatagctgcgttcagacattagcatattgccttccttgtctgaatgatcagcctgttcctcatgtttaactgcaatgctgagaacatcatggtcatagcttaaattgatattttgcttctcgattccaggcacatcaaccttcacaacatatgactcgtcattttcctgaatatccgttttcagcaggcgactgttgtcaaccccacgagttggcgtaaagctgtcaaaaatatgccgtcccaaatcattgaagaatggatcattcaaccaatcattccgccgcataagatcattagccatcatcgaaaacttcctttcattttgaaggttacgacttcctcttccgaacatctttagtataacacaaaaattagcactcgtcatgttagagtgctaatttgaattttctgctattttgattgtttgtcgttttacaggttcagcggattatgatcgtacattaacaaatcttgccgcctagcgatttcatttcctcacggcgtttgtcatcgttttgcggcgttgaagttacctgattaagggtaacggcaccgtctaaaataccactatcatcacgcaaggctaacgaagcatttttaaaatcaagcgtcaggccgcttccgaaataatcggtttccggatcgcctgtggtcagcttcaagcccgcatcattttccagtggcagtgcatagtcttggtcgtcctgattggtcacaacaatttggtacttattgccaatagcacaggagccgcctagtttcgaatacttacttgagccatcatctaatgccagaaacaaatgttgatcctttgcaacgtgctcgttcaagtacgtcactgcagctggtttaatcgtgattttcatgacggaccatcctttcaaatacattgtgcacaattcttttacctatttcatcgtaaccacttccgcaaccgaagtcaaatgttaagtttttcgcagcaaacaacaggttgtccacaccggttatccacatgttcaaaactaaaggcccaaaatatagtattaagtatgtccattgacactaaatagacgattcaaaaaattcaagtaaaaaatttttcgacaacgttcatccacagtttttaattgttcgatttcacaaagttcagccgcttaatcccgctccagcagccgggaacaaacgttttgtcacaagtcaaaaaagtttatccacaagttatccccagtttggtggacaacttactcacacccggaaatcttagttatgaacagtatccacagagttatccacaggctagggcatctttttacgcaaaagttacccactcttgacaaatcttttacttgaacttttccacagattagcgctaaaactttcgtgaaattctgaagaaaccgctttcgactaatttcgctgaaagagcaaaagagcctcgatcaaaagacgaatcttttaatcgaggctctcatcatttaattcttcaaatcacttgttgtctgtgaaagttttatagaaacggtttgctgctcacctttacgatacaaggtcagtttgacggtatcgccgactttatgcttatacagttgcgtgtgtagcgcagcggtattggagacgctgacaccatccagcgcagtgatgacatcatactgtttcaatcctgccgccttagcactgctaccactggtaaagccgccgacaacgaccccaccggtaacactttcaggtagcttcaaaacggatttttgctgactagcagaaacggtggacaagtcgcgcacttcaatgcctagcgctggccgaacaactttaccattttcgaccagttgattgatgatcgaaacgacttcatcacttggaatcgcgaagcccatcccttcaatcgttgctccttcagaactgctgctcgagcttccggatagcttcattgaattaattccgataacctgacctgacagattgatcaacgggccacctgagttccctgagttgatcgcggcatccgtttgaataaccgttgcctgtccggtggtgttaccactgctatcggtcacatcaacggtacgactcttcgcactgacaatcccttgcgtcacactggtagcatattgtgagcccagcggcgacccgattgccaagacagtttgcccggcttcaatcttgctagagtcgccaaagctggcaactgtgttaaccttactgccatcaattgtcaaaaccgccaagtcagacgttgaatcggttccgactaaactggctgtcagtttggttccatcgctcaaaataacttcaagcttatccgaaccgctcaccacatggttattggtgacaatataagccttgccatctttcttttgataaataacaccagaaccttcgctggcctcttcaagacttgatgaactactgctcgaactactgttattttggttatcctggccaaaaatgccttcaagcccgccaaaagtatccagcccatcgctgttactttcagccttttgcatgttaacaactgagacgactgcgcctttaacctttgcaaaagcctgctctgaagcactgctttgattgactgaaacattggaaatcttggtcgttccggctttaccagaggtgtcggtcacgccaaggcttgtcgtatggttgatcgcccaataggcagtaccaccaccaacaccgccaccaatcaaggcagccacaacagcaacaattgcagtctgcttcaaaccattcttcttcggtttttccgccgaccgttgcggcttctgatcctgtggcgtctcctgaaagttatgacttccgttatccataacggtttcctccttacgggcattctaactcaccctgtttacaaagattattgtaagtgacgattttgacgaaactatgaacaacatcggtattttttcgtgagcgcgaaccggcgcgtttagggatcggagtgtaagtggcctcaggcgtgatgacccaggcttggtcattgcgactgaggtccttacacgcagatccctgcgccggtgagcgcgttatgggcgtaaatcagaacattagtggcctcggacgtaatgacccgagcttacccattgcgaccaaggcccttacactccgactcccacaccagtaaacgcgttacaacgagcgcaaactgccacgcgcatcctccccaacccacaaaaaaaccggccagcttacatgcttccatctaagtcgtccgcttttccacactgctaaaactgctttcaaaccgcttcacacaacaaacaacgggtcggcaactgccgggtcagtgtcataaatatgaaagtcatgatccaccgccagaccttgctgtgccaacaacgacgccacggttaaatgcgccagtggcttattgttgttatgcggtgataaatgccccagataaatccgcttcgtccgcaaaccgatgacatccatcaaggcatccgcaccatcctcattggacaggtgcccttgatcgcttaaaatccgttgcttcaacggccacggatacggacccgtccgcaacatttcaaggtcgtgattgcattccatcacatacgcatcggcatcgcgaatcgtcccggcaacccgatctgaaacgtagcccgtgtcggttaggatagtgaaggccttgccgtcatgatgaaattggtaaaactgaggcgcggcagcatcatgcgaaacgccaaaactttccacatccaagtcacctaacgtcaaagttgtccccatatcaaacaaccgcagctgtgcttcagggattttgcccacactttttggtaaagctgcaaacgtcttggcattcgcataaacgttgagctgcggataacgtcgcgccaacacgcctacaccacgcacatgatcgctatgttcatgcgtgataaaaacactgtcaacatcggttagatctcgaccgatgctcttcatcagtgcttctattttcttgcctgacaaaccggcatccactaacaccttgtgaccaggcgtttcaatataggttgcgttacctgagctgctgctggcaaggacactgacacgcatcccaaaatcttcgcccacgatcaccatctccaaactttttaccatttagtcaactgcctgatctaagcaatcggctctcactgccgtccattctaccacttaactgtcattacggtttttcataactgttcgagtgatcgcattgacacgttttaccgtgacatttccggtcgaacgattcttgacgccaatgtaccaagccgggacataaaccgtactgccttttgcatcaagcaggtaactataagccaactgtgtggacacaatcgccgaattattagggatatcattgtcacgatataaagcaatgacagcatcctgttcactcatcaagcttaaatgatcccgcaaaatgtttaatttggtcagataagtctgtgtataactaaccagacgattatcggatacatgcaatgtcactgccgcacgccgatcgtaaatcagtccggcttggggatgctgggcaaacaccacgcgttcgtcattagagagcgccggtgcatactcatactccttgccatggtagacattgtttttaacaaaagtcttcatctggcgcagttcctgattcttctttaacgttatgggcacatccagattggcctgcaattcctgataatcgccttcgctaatggaaacctgctgcttcaccaggttcgtgtgtgccgcggttaatgctgagttggcttgacttgcaagataatcgcctttgggtgtctttttgcttaaacgtggcagcttaatttgatcgcgcgtaatgtccgtgatggttgccgcatcgccacttttaatcgttgccaagtcaacctgctgcgcctgaaaatagctaattcccaggaaaatattcaggccgacaaacacaactagaaagatccattcaatccgtcgaaaatccacaaaatcgcctccctcagcaagcagtttattagcttgtcagttagttaaagatccgttattgcgttggctcagattcgctcgcactactatcatcattgctcggcgtcgcagtctggccactagcggcattggcagacgcatcgctactatgattcagccagctttgataatcccgatattcgcctttcatctcaacataataagtcggctgcaaatcgaccacttgctgatcattgctgctaccggtccactggtaaccaatcaggatatccgtaatctgactggcacgatagcccgcagccactaactgattcaccacggtagcagttgccggtaaggtttgtgccggttgatttgtaggaatcggcactgtcagattggtattagagaaattaatctcctgtgacgtctgcgtataccgaacagtaacgtcgcctttttgatccacattaaagatcgggaacccttgcgcataggttttataaaccacttcaccacggctggcatcatattgaaaataccgcatactagccaggtttgtcatctgtaaatcgctaagtcctttgaaggttgcgtgcaggaaattagttaagccactgtcaggaaatgttgccgtatagttttcaaattcaatcgcaccagttcccgaatcagcggtcattcgtcgagttgaacccgcagtataaagcgtgctatcaccaatttcacgtgcatcgacattgctggcggttttcgatggcattagcagggagacataataattggcactttgttgatccatcagataagcatatggcggcagtttgattggctgcgtaaagaacgcaacttcgtgattgcctaaccgcttttcttcaatcggaaaagcgcgggtaacctgagtcgtcacaagcttttggagctgatcctgtgagacgttggctaacttggcttcgtaaaccctgcgcgtggcatcgtttattaaggtcagttttttaaccgcaccgtctaagttcaccaaaacccgattaaaatgaaaatcagaggctttgatttgatcttgcttgctaaaaaaccactgttcaaactgtttaaaactcatgacgtcttgatagataagttgcaagttgccatcttgttcaaggtaagtttcataattagccggcgagactttgcccaccgctttaacctgcgtcatatgccaatccgccattgcttgttgaacttcatggccgatattggcattggctttaaatagcagctgcttttgaccacgatgcgtgtaataaacttggttaggcaggtaaacgttgccttccatttttttaacattcggatcattttcggttgttacctgcacgttcgatgtacttcggcgctccagccgcgatggatttcgccaaatcaatgacgtaaagacgaggcttaaaataaccatggcgatcagactcacgcgcaaaatccaactactaagcttcatcccagtcatctcctccatcggtaatcggttcgtatggcagtgagatatagaatgtgctgccacggccttcttgtgaatcgacccaaatgcggccatgtaaggcttcaacgacttcttttgaaatcgccaagcctagaccggttccgccttgtttgcgggagcgtgccttatcaacgcgatagaagcgatcgaaaattttacccagatcctgacgcggaattcctaacccttgatcgctgatggacaaaatcacgtggtcatgcgtctggaataggcgcgcggtgattacgccgccatccggactatacttaattgcgttattcatgatgttatcgatcacttgcatgaacttgtctgtatcgatttcaacccaaagatcttcgtgggtaatttcccgcttaatcgaataacgcttcttttggccatccggctgtggcaacggttgtgcagtccgcgcctcaccggtgtgttcgttatccgtcttgagcatcatgtcaaaccgatccaacacatagttgaagaactcatttaaattgacggtttcaaggttgaacttactggtaccggaatctaaacgcgacagactcagcaagtcgttaatcattcgaatcatccggtcagtttcctcttgcgtaacatttagaaactgcggtgccagcttaggatctttccacgcaccatcacttaacgcttcaatataactgcgcactgaagtcaacggtgtgcgcaattcatgtgacacattggaaacaaattccttacgatcgcgatcaatcttttgctgctccgttacgtcatgcaaaaccgcgaccagtcccgaaataaagccggtttcgcgttggatcaagctaaaatcaacccgcaaaatcagatcatgatcaagctgctccgaaaaatccaacaacaattcagtctggtgctcaagtaagtcacgcaaggtataatccttggcgatattgagtaacttcaaaatcgaaacaccaataacatcctcattcttggtattgaggaaactcaacgcggtctgattaataatgatgacattaccgcgacgatcagtagcaatcacgccatcggtcatatgcgccaacacgctatccaaccggcgccgttccgcttcggaggcttcttgggcttcttcaacacgcacgcttagattattgacggcgactgcaagctgcccaagttcatcctgcccgtaaattcgaacctggccggaatagtcaccacgagccatccgaatcgcctgttttttcatttcgtcaatcggccgggtaatcgcgcgactaatgacaatggaaagtaacgtacccaataagccagcgactaaactggaaatcagaaaaataccaacgattttattaatactatcgtaggcttgctccattgatgctgaaatggcaattgcgccaatgaccgaattattgtcgccggttgcgttcggattcttaatcggcacaactttgtaataagtcgaccctgtacgctcccgatattcatatccttcgtattgttggccagagtacaacgtgtttttaatgttggaattagctgacttttggccaacattagtctgggcattaatatcactgtcaccgcgaatcgttccttttgcgtcaatcacttgtagatcagccgaattggcaatatctgcctgactcaaggtgcttttaatatcgtcattggcattgtcggtatcggtgcgcaacaaatccgcggccagcttatcttgaatatagctgtccacgttaacactcgtcttgaactgttcaatgttttgctgctctaaggtcttaacaaaataagccccgatcatttccagtgtcacgaccagcaaaagaataaagacgatcgcgattttaaagtgaattgactgaaagaagcgaatctttttattcaacagtggtgctcctaattattcagcgtcaggatttcgcaaataatagcctacgccgcgtcgggtcaccaaccactcaggatgggacggattgtcttcgatcttttcgcggaggcggcgaaccgtcacatccacagtccggacatcgccaaagtagtcatagccccaaactgtctgtagcagatgttcgcgggtcataacctgtcccaagtggcgggcaaggtaatgcagcaattcaaactcgcggtgggttaattcgatattctcaccgcgtttggataccgtatatgcgtccggatgaatcgttaaatcgccaacttccaattcacgattggcttcgtcttcctcactgccggcagcattggctgatgaggtacggcgcaagttagctttcacccgcgcaacaagttctcgattggaaaacggcttggtaacataatcatctgccccaagctccagtcctaacactttatcaatttcggaatccttcgccgtcagcataataatcggcgtgtcatgttctttacgaatttgtcgggcaacttcaagcccatcaattttcggtaacatcaaatcaagtaaaatcaaatcaggtgattctgattcgactttcttcaaggcttcttcgccatcatatgcagtgacgacatcatagccttctttatccaaattaaacttgacgatatcagagataggcttctcatcgtcaacgaccaagatttttttcgccatcatcggccctccttggtttaagatacacttctatagtataacggttttaaagcaagagcgcgagcaggagcggttagcaatcggagtgtaagcggccttaagcctaaatggctgggctttggccatttaggcttgaggtccttacacgtagattgctgcgactgcgagcgcgtttaggaaagtgtcatcccttcctcggtctacgctttaagtgacttccgctgcttcgatccgactccgcggtgatagatgcagccccccgctccgccagctcttactttccgtcccagatcccgaaacaaggtacccttcccgccgctacttaccgtaagttaacaccccacgcatgaatttttggaggttattttatgtttttccaccacgatcatctgaagctctactatcaaaaaagcggccacggaccggcgattatattgctacatggcaacggtgaggatcatacactcttcgccgacttaatcacgtatctcgccccgcattatactgtgattgccttggacagtcgtgatcacggtcaaagttcggctacggaccggcttagttatgatgcaatgacgtccgacgtttcagctttaatcactgaattggagttagcccggccgatcatactcggcttttctgatggtggcattattgctttgctgctggcaattcggcatcccgaacaagtcggcgctttgattgttgccggggcgaatctgacgcctcaaggtttacgctggtattcgcgcattctttttcgtattgccgctggtcatcggccgtctcctaagttagccatgatgctccatgaaccgcaaatcaccccgcaaatgctgcataggatcaccgtgccaaccttagtgctagcgggcagccgcgacttgattacacgtaaagaaacttttacgattgccagttcgattcaaaatgccgaattgcatattctccccggcgaaaaccacaactcatatattcgcgacaaccacaagctttggcaccttatcagaccgtttctggccggactgcaagcggtcgattaaaatgaattatttttgtatatttaacattttacttgcatattcactccaatgagtatatattcaatccataatcattaatgaggagtgaactatatgcggggaatcaaacattgggcggtcgcgatcattgcgctgatcgctatgatcgtcggcttcaccagttatcagccggttccaacggcagctgccagcaaagacttagcggcgattcaaaaacgcggctatttagtcgttggtctgtccgccgactacgccccattggagttccacgccacgattaacggtgctgacacaatcgtcggcgcagatatttccatgtccaagcaaatcgctaaggacatgggcgtgaaactacaaatcaaagaaatgaacttcacggcgctgatcggggctttaaaaaccggcaagattgatttgatcgtctccggtatgtccaaaacacctgaacgggaaaaagaggttaacttttcaacgccttacctgtatgaaacgcaagtcatggtcattcgcaaggccgataaagccaagtataaatcgattgccgacttttccggaaaacgagtaggggcacaaaagcaaacgacgcaggaacagcttgccaagactcaactgcccggtgcaaaagtcacgagcctggataaagcaaatgatgtggttgcacaaatttcgtacaacaaattggatgccggggttttggctagtaccattgccgactcctatgttgcccggacaccgagtttaaccgtgattgacccgcattttgcgactgacaaagccccaaccgccatcgccgtcagcaagcaatcgcctgccttgttaaaacaagtcaataagacgatcagcaaggttaaaggtgccaaatacaagagttatctgcaagccgcctacaaactacaggatcaggatcaaggcttctgggctaagtacggtaactactttatccgcggcgctatttatactttggtcttcgcggtcttaacagtcttattcggaactatcatcggcacgctgcttgccttgatgaaactcagtcgcaattggctggctaaagtggtggctaacatctacatcgagtttattcggggcacgccgttgttggttcaagcattcattgtcttcttcggtacgcagattctcggtttagatctcagcgcgtttgttgccggcgcgatcgccatggccatcaactccggcgcatacgttgcagaaatcattcgtggcgggatcaattccgtccctgtcggtcaaaccgaggcggctcggtctttgggtctgcaccaaagccaggcaatgcgatacgtcattttgccacaagcgatgaagaacatctggccggcattaggcaatgagttcgtcaccgatattaaggaaagttcggtcttgtccgttatcggtgccaccgaattaatgtttgaaggtaccgttgtgcaaggggcctcgttcaagccattcctgccactggtcgttgtcgccattctttacttcatcatgacgtttaccctatcacgactactacgcctgattgaaaaacggtttaattaacatttgctttagcacgcctgccataacgcgctcacatttattaaaggaggatatattttcatgacagaaaaaattgtactagcttactcaggtggtcttgatacatccgttgcgattccttggctcatggacaagggttatgaagtgattgcggtcgtcttgaatgtcggtcaaccggatgcggattttgacgcgattcaacaaaaagcacttaaagtcggtgccattgattcgattgtcgttgacgcccaagacgagttcgccgatcactatgttgcgccggtcatcaaggccaatgcgttatacgaaggcgactatccgttagtatcagcgttgtcacgcccattaatcatcgagcatctggttaaaatcgcccacgcccaaaatgccaccgcaattgcgcacggttcgacgggtaaaggcaacgatcaggttcgctttgaagccgcaattcacgccttggatcccgaaatgaaaatcgaagcaccgattcgtgattttcactggtcacgagaagaagaaattgattacgccaaagaacatcatgtgccagtcccaatcggcaaaaagtcaccgtactcaatcgacgccaatctctggggccgtgctaacgaagccggaattctcgaaaatccttggaatcaggcgccggatgacgcatgggggatgaccgttgcccctgaagcagcgccggacaagccgacttttcttgatctgacctttcaacaaggggttccagtagcattaaatggcaaccccatgccgctggctgccatgatcaaacagcttaatcaaatcgccggtgcaaatggcattggtcggattgataaaatcgaaaatcgtctcgttggcattaaatcgcgtgaagtctacgaagcaccggctgcagcagtcctcatgacggcgcaccacgatctggaaaacctcacgctcgaacgcgatgtccaacacttcaagccaaccattgagaataaattgacgaatatgatttacgaagcccaatggatctcacctttattcgatgctttgatggctttcatcgataaaacccaagccgtcgtcaacggtaccgtcaagatgaagctttacaaaggcagtgccgtcccagtcgcgcgtcagtccactcacaactcactttacgatgaagacctggcaacctacaccagtgccgattcctttgatcaggaagcggccgcgggcttcatcaagctttggacgctgccgaccactgtctttgagcaagtcaaccatgttcactccgaggaaaagcaacatgactgataagctatggggcggccggttcaccgaaaaagccgcgcactgggttgatgcattcggcgcatccatcggttttgatcaacaaatggccaaagaggatcttgaaggatcgctagcccatgtcaaaatgctaggcaaaaccggcatcatcccgcaagccgacgccgacacgatcaccgctggcttacatcacctgaaaaaagaactggcagcaggcaaattgcattttaccgttgaaaatgaagatattcatctcaacatggaagccttactgacagccgaaatcgggccagtcgccggcaagctgcacacggctcgttcccgcaatgatcaggtagcgaccgacctccatctatggctcaaacatcgcctacctgctattaaagaggccttgacgaacctgcaaaccgttctcgttggtcaggcaaaagcccacgccgccacgatcatgcctggttacacccacatgcagcacgcccagccaatcacctatggccattatttgttggcgtatttcgaaatgttccagcgcgactgggaacgtttcgactttacccaaaagcacaccgacatcttgccattaggcgcggctgcactggctggcacgactttcccgattgatcgcgaactggtggcccaagaattaggcttcgatcagctgtatcacaacagtctggacgccgtatcagatcgcgactttgcactggaatttctcagtaacagtgcgattttgatgcagcatttaagtcgcatggccgaagaattgattttgtggtcaacatttgagtttaattacatcgaactcggtgatgacttttccactggcagctcgattatgcctcaaaagaaaaacccggattttgccgagctgattcggggcaaaaccgggcgcgtgtatggtgcgctgatggggctgctcaccaccatgaaggccattccgctggcgtacaacaaggatatgcaagaggataaggaaccgatttttgatgcttataacacgatccttggctccttgcatattttcaccggcatgcttagtgatctcacggtgcatgaacagcgcatggccgccgccacaacgcatgacttcagcaatgcaaccgagctggcagactacttggcaacaaagggcgttcctttccgccaagcccacgcaattgtcggcgagctggtactaaaaggcatcaaaaccggcacggcgcttcaggaaatgccattaagcgaacttcaggaagccgcaccgcaaatccaagcagacgtttacgcagaactcacctcaaaagcagcggtcaatcgccgtacctcccttggcggcacagcggttagcaacgttttgaaagaagttacccgcgatgagaaaatcattgccgatcatgaaaacgcggcaccttccatgtaagtaaagcaacgatatttgaagttgtgcatcacgacaaaataaaatcggtcttagagtggcaagacgctctaagaccgattttgctttccttacgacatttgaatcaacaaggacacaacgacttcaatcattatcttgtgcgtttttgcaaactaaacgttgaccacggtttgattagcgttaacagatctgcgtcatcagccgcaacatggccaattaaattccgctggccatcatcgctaaatggtgtcaaaacgatttggaactcgcctttatagcggccatacgcatcgttgacgaccacaatatcgccgcgtttgaagggttggccatggtcgtgggcgggaatactggccgtgctatacgtgatacgaggctgggtatcccgcagtaaatacgccgatgcatccccacgatataaatgcggcgcggcaaatgctattttttcttcaagcggcgtgatacttgccaacatttcggcatgcaagatcgggtatggcgccagaaaagtatcggcaacggctttaagttccgcttcagtcgcaaaagcattaccgatgatcacatcatcaatcaagccggtcagacacaaatgcgttgtttgactggcaatgttgcgatggcgatcagactccattgtcggcaacccatcatgcagcggccaaggcccgattttaccgctggatgacgacacaaatgcggcggtatgcaatccatactctcggtactgctgggagtattcggtaaagatagcctcactcagacctgtgaacgcctgcggatagaagttatgacagccgattaggttatcgcggttagggtcataagccatgatgcttgcaagataattggttccatggctcatattcaattcgatttttaagccatatggattgcgggtcatccgcgcttcttctgcgccggtgaagccttcatccagtcgcagtccccaaacatgaagcgtttcaaaaaaactcagatcgtcatagctaatcttcagctccttgaacaacgccggattaatatcaacgatcgtcttaaacccaagctgattggcataatcgattgtctggcgaaacttagccaacagatcttcaccatcttctcccagcagttgcaagagtgaggtgaaaatgcgggtgtaaccataccgatgtgccagatcaagataggctttgttctcctcgaaactgctttgatccggataaagcgagatacctaatcgtttcatttcacaagaatcccttcttagttaaaatactgtgctgccatttgccgtgacatcttcttaaagcgatgtttgcgttgccagtttaataaaaacccggccgtgcgattattagctttgccttttgcggttttgccttcaatgatttcagtgtaatccagctgcatctgctgatcaccgagatcgcgtaattgataatccacatgataatgatcgcggtcagtgtctagttcatacgcgtaacgctgattggcaatggcatgcgtaatcgtcagcttccccgtcatgccattcgcccacttcttctggtacgtgaacccatcaagactgcccaccagaacttctcgcccagtgtgcgccttgatgtccgcctgagccgagcgaatcagttgcccatacatgaacgccgccggaaccttgagtgtcatctgaattttcaactgaaaaccgcctttctaaaacaatttttcctataaccgttaatcagcaagctgggctggtttaattcgattggccgccttaacaaatggtacatagattaagaagccgatgatcatattcaccgcctgtaacacagctgctcgccagtccatggttgcaactaaagcatttaaaaatggcggcatcgaccatacaatctgattcttgatcggtgaaaccaagccactcactaccgcgccataagcaatggaaaccatcactaccggcgccaaaataaacggaatgaagtaaatgggatcaagcacaatcggcatcccaaacataaccggttcattgacattgaagaaccctggcgcaatcgacagctttgcaactgcacgctgatcatcgcgctttgagaacatcagaatcgcaatcagcagcagcaaagttgagccggcgccaccaatccacgcatataagtcaaatgaattgcgagtccacagatacggcagtgcttggcctttgtgaaaggcattgatattcgccaactgcgccgttaaccaaatactatcaagcaccggtcctaatacattggtcccgtggatgccgaagaaccagaagacttgaaccaaaatcgtcataatcagcacggaaccataaccttgactcaaacttaacaaaggttcttgtaaaactttagcgataaattcaatcacggtcgtaccaaattgagtaaacagatagttgataatacccacgccgtacaaggcaaccgccgccggtacaatcccggtaaacgcattagcaacagccggtggaaccgaatccggcattttaatggtgatatgtttcttcatcaaccagatgtaaatagttgcggcaatcgcgcccatcagcataacggtgaagaaaccatacgccccgaagaacttgccaaagttgaagaatccccacatgctgacatctttaccggaaacaaccgttccggcatcggtcaatgtttttacggcaccttttgccagcccggccttcaacgtcatggtgaagttttgcggcaagctcataatgaaggtgcccaaggtgacgattcctgccgtcacaggttcaaccttgtactgcaccgcgagctgatagccaaacgtgaatgagaagattaaaccaagaatagctaaggttccggtccagacaacagcgttaatgccgataagccactgcattgagttaacgaaaccggtccagccaaattgagtcggaatatcccgaatcaaagcgttcagcacggtggaaaccgcccctgccatcatggctggcatgatcgcaataaaagcatcacgtaaggccaccagccaccggattgatccgatacgcgctgcgattgggacaacatgtttattgagccaattgataagtccgttcatcttgtacactctccttgagttttaagcacgccggccgcttcttggcacaccagcgcataatgatttcatttgaaccaacttcggttttaactaccggttcaaatcgatattggtcgtatggtagtacaacgttagacccggataaacaaaataagttcgggaaaagttgaagactttgccactagctagatagttgatcccgtctaagcacaggtgatcagtctgtgccgacatcgccatcaactcggcatactcggctggtaatggtcgcgattggatataattttccgttgtgcttccaaccatggcataggtgttacgcaaataggtgaagatcgaacccgccgcaatctcagctgaaagatgtggcacaattgcttgcggaaaatacgattcttccaagtcgtacaactgcccttttaaatagcgcaaccgcacgacttgatagaccatatcgccgcggctgacatttcctcgttgcgccaaggctgctgtcgctgggataagcgcaaacttaaccactttggaagtcagcggtccgcctttcaccatggctgtctgatcaaagcctatcgacatattgaggacagcatcggattgagccgaatgatcaatgacatagtacccgctaccttgaacccggcgaaccaacccatgggcaaataccacatccagtgccttccgaatcgtattgcggctggcttgataacgatccatcaacacctgttcagtcggtagcttaaccggatactgaccagccagaatatcttgaatgagttgttcggcaatatcgtgatacatcaaagtcctcctccaaacttaaagtgttcatttattttcaaacctatcagccacgggcagttgccattgcgcgctaacggcatgatccgcagcctgacaagttaatgagcacggtacaatgttctgaaagcgcttgtaaaatttgtacctacgaattataatagcacatgaaacggaaaacgattacatttttttaaaaaaggagccgatttttatggcagaaaaaaagatcatgttagtttgtgcagctggtatgtcaaccagtatgttagtaacgcggatgcaaaaggccgccgaaaaagatggactttcggttcatatttttgctacagctgcctctgatgcagacaacaagcttgaaagcgaaaaaccagatgtcttaatgttgggcccgcaagtccgttatcttgaaagtcagttcaaacgcgacctcgatattccggttagtgtcatcaacatgcaggactacggattgatgaacggtgaaaaagtgttaaaagcttcacttaaagccattgatgacagcaaaggagcagaagcctaatgccagaagacgaccaaaatcttgaaaccgttatgggcttgatcatgaatggcggcaatgccaaaagttcagcctttgaagccattcacgctgctaaggccggtgatttcaagctggctgacgataaactaaaagaatcggatcatttcctcaccgaagcgcataacgtccagaccggcatgctcacggctgaagcgcaaggtgaccacgccaaagtcaccctgctcatggttcacagtcaggatcatttaatgaatgccattaccttccgcgacctagccggagaaattgtcgcactgtacaaacggttagccgaaaaagaggcctgacaacacaccgtagtcacctgcaaaggcttatttgttgtgtctaatttccgatatatcgatacctccagaaattcaaagcaagcaaaaagacgactcgcttgaagtcgcctctttgcttgctttattttactttgattgacgctgtgcttgccattcctcacgtaagatgccgtacttcacggaatcccaataccgatcctgatagtagcgaacctgccgcacgcgggcttcttgtttcattcctacagacttggcaaggccgatcatgcgttcgttgccggaccaagttgtgatccccagatgtggcaaatcaatgagtccgaaaatacgatcaatccactgatctaatgcctgcttgccaatacctttactccaataagtttcatcgtaaatcacaatgcctaaatccagccaccgttgcaagtcgccatcttcgtagtgcgcagatacatccccaaccagaatgccatcgacccaaataccattgacaaaaggattcgccacccattggtaccctgtttgattagcctgattctcctgcatctcttccagtgtcggaactttatcgttaaagtaaggtccattccatttgtgccattctgcatcgggatcggaaaaggcaactttccacaacgtttcaagatcctcggtttgaaaatgttttagcgttactgtcatgcctcagcactcctcttttatgtttgttaacaacataccacaattattgcccgggaaataatccaagttgtatctatgttaatctaaattttagtatgacacttatttggtgctggtgttagaccatatttaacctgtaggctggttggcgtatgctgtagctaggtttggtgatttgtgttttgggtgctgcaggtggtgctcgctcaccggcgcagaaacctgcgtgtaaggaccttaagcgcaatggccaaaacccggttgtcacgcttaaggccgctcatgttccggtttatgcccataacgcgctcaccggcgcagaaacctgcacataaggaccttggtcgtaatggccaaaaccgggcagctcgcttatgcccgcttatgttctggtttacgcccataacgcgctcaccggcgcagaaacctgcacataaggaccttggtcgtaatggccaaaaccgggccattacgaccaaggccacttatgctccggtttctaaccgcgtcggttcgcgcttactttttttaggaggttttcccttggcagattatattaaacagattcgtgcaaaagttggccatacgccactgattatggctggggttattggtattttgactgacgaagcgggacgggttttgtttcagcaacgtagcgattttaaaggtcaatggggtcttatcagtggcaccattgagtatggtgaaacgccggcacagaccatgattcgtgagtttaaagaagaaacgaacttaacggtcaaggttgtttctttgctcggggttgatggtgacctcacccttacttatcccaatggcgatgttgcgcaatggctttgtccggtgtttctcgtgaaacaattaggcggcgagcttagtgccgataacgacgaaactgaacagttgcaatactttgcgccaagcgaggcaccgcggctttttaatcagcagcatcgtgccgcattggcccattttattgctggcgaaacggggtacttcgattgatgaaacaacttattatcctccgaggtaattcaggtagtggaaaaacaaccaccgcaaaggccttacgtaagcatttgactaactcgctgctaatttctcaagatgttgttcgtcgcgacatgttagccgagaaggataagcccaatagtcctaacattgaattgattgatctgattgcccgttttgggttttctcatcaacaaatcgtgattgttgagggtatcttaagtgcggctcgctatggccaaatgcttaaagcgctcatgaacactgccgatcaaagtctggtttactactttgatctatcgtttgacgaaactctccgacgccacgcccaccgcccgaaagcagccgcttttggcgcagaggctatgcatcggtggtttcgaccgcatgactatctgggtgtccccaatgagcacttgattcaggctgatcaatcacaagacactgtcgtcagtcgaatactggccgatcttaacaagcgaaactctgatcaagcgcgctattccgactgaaaccttagcccacttcggaattttggtttaaagacgttgtataacctcctcagggcaaaatattactgctttcgtctgtttcggactagaatgatggcgtaatgatgttcttggtaagtattggcattcatgagactgcgttaattggtacggcagctagcaagtaaggaccgaacagcatattgggctgagggtttaaatcgcctacctgttggctgtcgttttcgcagttgacgcccactaaggagtgtttttcatgacaagttatccacgtcgcgatcccgtgacagatcagctgttaaccccggaaaattctgctttgattttaattgattaccaaccgacccaagttgagtcgattggctcgatgaatcaccatacgctcattcaaaatgtggtgatgacggccaagttggctcaagtctacaaagtgccgatcatcctttcaactgttaacgtcaaaagcggtcggaataaggacacgattcctgatctgaaaaaagtccttggtgatctgccgagtattgatcgaacatcgattaatgcgtggcaggatcaggactttgttgaagcagtcaaagcaacgggccgcaagaatctggttatggcagctttatggaccgaagcctgtctgacttttccaacccttgatgctttagcagaaggcttccatgtctttcctgttgttgatgcagtcggtggcacatcaacgattgcgcacgaaactgcattgcgccgcatcgaacaagccggtgcccagttgaccacgaatgcccagttagcttgcgagtggcagcgtgactggaatcgaaccgagaccgtcccggactttgttaaattgatgcttgaatcaggcgacttcatcaatctgggcgcttagtttaaggtgctacaaggatttgcaggttgaatcggtcttagagacgaaatatgtctctaaggccgatttctcttttcgcatacgccttgttctaaccagatcagtcaaaatatcgttcccacataaataatgggtgggtcgcggaggtatttcatatgcaacatcttacaaccacgtctaaacgctggtggttactgattgcgctgggcttttttgcgtttatgacgaatcttgacggttcaatcgttaacattgcaatcccgctgatggccaagaaccttcatgtctccgctagccggatggaatggactgtgtcgttatatctgattgttttaagtgccttgctgctgccttttggtaaactcggggatcgcattggtaaacgccggattttcaaatggggcacagggacttttgtgcttggctctttaatggcagggattaatctgggttttaactttttgatgttgggccgcatggtgcaggcgctgggtggggcgatgacgttagcgaacacttatggcatcgtgacttccacctttgctttggcggaacgcggtcgggcaatgggcgtcgtgagcacctttgtcgcactgggggggttgccgggcctagtcttggcggacttattctggcacactttagctggccgatgatttttctgattaatgtgcccattggtttgatcgcgctaggcatctccttgtggtcaatggacaatggtcggccccaacccggcgcttatgacggcgtcggcatggtgttgcaagcaaccgccattgccagcgggttctggggacttaacttagcgcaacaaagcggttttggtgatcccctcgttcttgccacgttagcgttggcggttatcagcttaatggcatttcttggctttgagcgtcatcagtcagccccgctactacccatgagtatctttcgcgtccgcatctttacactcggcgttttgactgttttcttcatcttcatggttcagttctttagtaccgtcttgatgccgttttaccttgaagacgcgcgcaggctcacaccgggtgcggctggggcgctgttgtcgctgtacccgttgatgatggtcttctttgctccattaggcggatggctggcggacaaatggcaggttcctgctgtcgcgctattaggtagtctactcattgcaatcggcagtctgctgggtgccacgctcaaactcaacgccccgttaactatctatatcatcagcacgcttttgatcggcatcggaagcggcttgtttcaatcccccattggcgacgtggtcatgtcggtggtgccaaaagcgcaacttggcattgccggcagttttaacgccttagcccgcaatctcggcatggtaagcggcaccgcggtagcaaccacggtcttatttggcaccatgagtcacttggcagcgcgccgggtcacgacctatcccaccaaccacccggaatttttcatggtcggcttacagattgcgatgctcgttgcggccggattagcgctccttggtgccattgccatcgcgctcaccatcaaaccttggcaggcgcacaagaagaactgacgaaccgtcttcaccccggcatcttttccccttcactgaaaaaagtgatagcataaaatcactgggcacatttttgaggaggaaaaagacgcatggaaaagaaccattcaacaactttgctcacatggggcatacttttggtgggtgcgaatctgcgcctgccgattaccatgatcccgccgctgctacccaccattgaacgcactttggggttaccggcttcgatggctggcatgttgaccaccattccgctgttgatgttcgcattagcatcgccactcatcgccaaaatgggaaatcggcgcggtaatgagtggagcttgcttattgcgctcattattttattacttggcagcttactgcggatcatccctagtctcatcgccttagtgatcggtacgctgctcatcggctttggcatttcaggcggcaatgtcttgctgccggcgatcatcaaagatcagttcccgcagtcgattggcgccaaaaccagcctctacaccgttaccatggggctagtcgcatcgctgggaaccggactggcaggactgttgaaccaacaatttcatatgaagttcaccatggctgccttctccttagttggcgtggccggcttagtggtctgggcccttgcctttcgtcgcctggcaccgataaaaaatcaggccgcgaccggtcggcgaaatgtgcgcgtgtcccgttcgctattagcctggtggattgctttatttttcggcttacaaagttttctctattactcattactgacatggcttcctagtctttggcatgcggctggtttttcgcaactggctgcgggcaacctggcaacaatttttcagttgagcggcatgccggcaaccctgtcgattccgtttatcgcagagcggcgtcatggcatggcctatagcgtttggggaattatgctcggttttgtattaggggctttgggcgtgctcatcccgggggccaacttcgggttgaatgtggtcttctccttactaatgggcgtggcttccggggcggcttttgcgatctgtatcgtcttcttccagaagaaaaccgccgatgcgtacgaaacagccagtctatccggctttgcgcaaagtctcggttatctctttgctgcagttggccctgtgctttatggttttattcaaacaaccaccggctcatggaatctgttattatggatcacagtagggttgaccctattcatgtttggtgccggacttatcattaacgccaaacacagtattttcgccccccagtgatcatcggtagcgcttgcacgattaatgcgtattccttaaactgacattgaatgacaacaagaggaggccacaaaatggcaatcacaacaacaattggaaaaagtcatgtcgtcaccggcaaacttggtttaggcaccaataaagttggcggccacaacctttttccgaatctacatgatgaagacggacttgcggttgtgaaaacggcgctggatcatggtattgagatgctcgatacggcttatatgtacggtcttggccaatccgaaacgttaatcggtcaggccatccaaggctatgaccgcgcaaaaattattttggcaaccaaagccgcgcaagatccccatcaagatttaaaaccgaataacgatcctaagttcttaacgcaggcaattgacgacgccttgttgcgccttaaaaccgactatctcgatatcttctacattcattttccggatgacaaaaccgataaggcggaggcggtcaatgcagttgccaatgcgcgtaaggccgggaaagttcgcgctatcggggtttccaacttctcacttgatcaaattaaagaagccaaccaagacgatcaagttgatgtcgtggaagatcattacagccttgtccaccgcgatgccgaaacgacgcttttcccttatctaaaagagcatcagatcagctttgtcccatacttcccccttgcctcgggcttgttaaccggtaaatatgggcctgatgatgctgacaaattcaagaagcgcttttctgccgatgaattcaaagaaattttagccgcacttcgcgaagttgacggcattgcggatgcacaccaagcaacaattgcgcagattatgctcgcttggtacatgaagaaccccgacattgccgttgtcatccccggtgcccgcctgccagaacaagccgctagtaatgctaaagcgctcgatgtcgatctacgggatgcagaatacgaatcgatcaatgagttgttcaaaaacttcaaaacaaagtaaccgacgcttgctgatttccagcagtgaaaataaaccgctccataaaaaacagctcacagccttcaaaaaagaagtcctgtgagctgttttttgtcttatacgcctgggatcgttgctacttcttgcgtgtaaaggcgcgctttacgacttgccagaaagttaacgacttaacaattcgctcggcgggaatgtgcacccgaatggcacgtaaaacccgcttaggatctttcgctgcaaacgtatacgtcccattctttttggttttaatggcaaagcgcgggatccacttacctttgaagatgacggaagcaatgacccagtccacttcattccacggaatctgatagaagtcacgtacgtttttttcattgaaaaattcgaatcctttatcaccgatcatgatcttgccataggccggcattcccataaaggccgtaccttcaatcactaactcggatttggtgttgattgattgaaccattttttgccatccttttaaactgaagttgactgtgcttgctgatgtgccttgcttgttgggtttattggttttggagagactttcgccaaaatgcgtttgtggcgaagtttaaacttaccctccaaaacgcgttcgcagtcgcagtcgcagcaatctacgtgtaaggacctcaagtctaaatggccaaagcccagccatttagacttgaggccacttacactccgattgctaaacgctcctgctcacgctctccattataaaacaaaagcccagactttgtgtctgagcttttgaagtcttggttcgacttttggtggttgatcttacatcaagccgatgacgtggaagacaaccccgacgacgaacagaccaagaatgataatgattggagaaactttcttcttcagcaaccacatgcagaacaaggtaagcagtaagcccatcaaacctggaattaagctatccaagttatcctgtaaggtcgtaaccttgtttttagtcagtgacaagccttgagattgtaattctaaagccttttgaactccagcttttccgcttggtaatgaactccagtcaatgtaagcacctttttggtttggaacatttgaaacaaccggggtgaacttgacggatacccagcggttaaccagtgatcctaggataaacataccaaggattgtggcacccttcgtaacttcaccaagcaagccacctgacaagtcttcagtaatcttactacctgctttatagccaaattcctgcgtgtaccataggaaggccatacgaatcgcattccataaaacaaagtacaaaattggccctaagagattgccggccatcgccatggatgcggctaacgcaccgataattggcttaaccgtgaaccagaacactggatcgccgacaccagccagcggacccatcatcccgactttgacaccctgaatggctttatcgtcaattggggcaccattagcacgttcttcttccagtgccatcgtaacacccagaatcggtgaagccagatatgggtgggtgttaaagaattccaagtgccgcttcaaagcagcggaacgatcttccttagtatgatacaaacgcttcagtgctggaattaaggtataagcccagccaccattttgcatacgttcgtagttccaagaaccttgaaggaaggttgaccgccaccaaaccttaattcggtcgccttttgtgatatgaacttcttcagccatgtttgtcaacctccttttcaataattatcaataatgtcgccgacaggatcaccggcaccactattcgaaccgccattacctgagccgccgccttgcttggacaatgccaagtaaatcagtgccagtgaaataccgatagcaccaaggccgatcagggtaatttctttaactgttgccagcacaaacccaatcgcaaagaatggccatacttcacgagtcgccatcatgttaataaccatagcgtacccgacagcaacaaccatgcccccgccaatgccaagaccagtcgttaaccaatcaggcatctgttcaagcaatgcccgcactgggccggcaccaacagcaagaattaagcctgcaggaatcgcaatccgcaagccctgcatgcagatcgcgacccattgccagaaatcaattttaccgaaactaccttcttcagcagcacggtccatgatatgaacgatcgcagttgccaaggtacgtactaaggtggtcagcaacaaaccggcaaccgccagcggaaccgcaatcgcaatcgctgaactaacacctttagtaccctgaccgccaagaactagaataatagctgatgcaactgaggccaatgcagcatctggtgcaacggccgcgccaatgttagcccagcctaaagcgatcatttgtaattggccacccagtaccaaacatggggccagattgccggtcacaagtccgatcaacgtgcacgcaataactggctgatggaagtggaattcatccaaaataccttccataccagcaaggaatgacacgatgaggaccagaatgatttgaataaaattcaaagtcatgagtcttcttcctccgtttcaaaaattacttctgcgcattcagttcgtcttgtgctttcttcaaaattgcattcatgtcatccggatgatcagatggcaccttgcgaacgtcaaacttcacaccatcatcagccagcttatggaaggtatcgatatccttctgatcaaatgctagcactttgttaggttgaactttacccactgaatgtgacattgaaccaatgttgagttccttgattggaacgccgccttcgattgcgcgaagggcgtcttccggtgtttcaaataatagcaatgcgcgctggccgccaaagtgtttatcatctttggccagcttaatcatctgatcaattggcacaacatgcgccttaacgccagacggagctgcttccttaatcaggttcttccgcagttcgtctttggcaactgaatcagaaacaacgataatccgtgttgggttcgttgtcttggtccaggtcgttgcaacctgaccatgcagcaaacgtgaatcaacccgcgccaaaacgtattggaatgaacccggttgaccagcattagccgtacttggtgcagcagcctgagcagctggtttcttcactttatccagtgcttccggcttgatcttgattccgtcacgtccggcatcgagcaaatgcgcagcgatgtcttgtgcagaatccatcgaaagtcgcgagccatatgcttcaatcaacatcggcaagttaagcccggtcacaatcgcccatttatccttgtgctcctcgtaaatcgagtttgcctggttaaacggtgatccgccccatagatcgattaaaaacaatacttcgtcatctgggtcgaacttagcgatcgcgtcttcgagatgcttgtgcaagtcatctggtccttcatcgggcatgaaggtcacagcttcgactttttcttgctcaccgaagatcatttgaccggattgcttgatgccagcagcgaattggccgtgactagcaagaatgattccgaccatttttacgcctcctaaaaatttgtggttgcctcgaaaataatatctgctaaaaacaaaaataatttaaaaaacaaggcttcccaatagcttagtatgacgtcccgggcacagctatgcaagcattttcactcaaaaacaaacctaaaaaagaagcgtatacattgcaagtacgcttcaaaaaagatttttttaaaatcggtctaattggtagataccaattatcgcaaaggttccctaggccttagagggatcgctttcaaaatcggtaaatatcggatcggcaatgcggttacccatcaccaaaagtgctaaacacagtataagtgataaccctgccatgaccatccagctaactgcggcgctcacgacattggcaattgtgaagaataccacttgtcccactggcatcccgagtagcgcgacgagattaatgaccccggctgtcgtccccatctgccgctccggaacgagtcgcatcatcactgttgaaagccgtggattgattttgcccataagataggcggttgcaaaactaaagatcatcgctgcccaaagtgaccgcagaagaaagaagctgcaacttaaaccgatcatggccgccatcaacaaccctaacagcttaaaggtgctcagccgctgcaggccgtcttttgcaaatagcgcccccagaatcagtcccactgaaaagataatgttcatgatcgcaacagttgtcccgaaattgcgcagccacatcatcggttgttgaaccagcgtgactgacatcaaaccgtcaacggatgagcccagtgtgttaaccagcatcgcaaagataatcactgccaacaagaagtgattcgttgtcagaaatcggatcacgttgcggatgtttttaaaaatcggttgatgaacgtgggttgcaacaggcggttcggcttgcttgagtcgtttattttgccggatcaagacaaccgctgccagtaaaaaagtcacggcattgatggccccaaacagtgcatagttgtgatccagcagaacaatcagactggcgcccactgcctgaaagaccatttgcacggtcgtccctgttgcactctgaaaactaatcgccgtattcagttccttagccggaatcaagcggtgcaagattggcaaggttaaaccgttaccatattgccccaacgtatcggatatgatgttgatggcaagtaaccctaagaataacggtaggcttgcaggcaacacgatcatcccggccagaccacagaaaagcaacatctgcccgatccgcgcggctaccatatggcgggttttggcttgcgtccgatcagcgagactgccggtgatcattgacagcatcgtcggcaaacttgtcgccatggcggctaaggtaaccgccaaacttttgaatggcattgtagcggcgtagataatgaaaacgatattgtataggctatcaccaatgccacttaatagactggcgtttaagatggcccgatagccatgattgttcatgtattcatgcatgacgaccacactcctttttgtactgcgtgatgaacttgtttgtactttgagtgtaggcggcttagaataacatcgaggtgaaattccactatggtagaaaaaatcgatccaactgatggcgccgtttttcgccaattgcgtcttaatcaccaccaaaccttggcacaagtagcagacgatcagaattccattgcgtttattagtaaatttgaacaaggcaaatccaatatcagcttttcccggctcagtcacctgctcttccgtatcaatatgtcagtggaagagtttcttttcattcgcgatcttcaagccggaattgtcccgccgctcaaggattcggagttcacgtacaacacgttaattcatcgcgattttgaagcggtacttgcttttcaggatcgctttagctctgaagaaccaacattggccgactatcgctatttacttaagcaagagaaaatctggcagcaacgttacgctcaggatcacaatcgccaaacccagttcgaatttatcaccattcgaatttttcgcttgaccatgattgatcgggttaagccgcctgaacagccatcgccatttacaaatgttgaagatgcgatggcccagttgcaagcgcttgccaaacccgtggtcagctacttgtacacggttgaagtctggaattactttgaactgtattggtttcgtcatctgatggtcgctttgcctagtaagacgatccataatcttttaccgctggcgatcaagcgctccgaaaaatatcgcgcgttcaatcaaatcggaactttgcgtgtcaaaaccctcttttcagcctttacggtcttcatcaatgcccgccagctgccggatgccaaaaaagcacttaccactgcagaacggcttttgtatgacgccaatgatctagccaattcagcactgcttttattccttcgtggctggtatcaagccgtcgccggccaaacagctgccggttttgaattgtgccagcaagccattagtttggaacacattttggatcaaccgcggcaggaacgatggttgcgttatttattaaaatttattcatcaaaacattgcagatcctgaaagtagcgcactttttctgtgagcagtggttaacacccaaaagccccgttttcttgacaacgtttcacgtggaacacaatatcacaccaaaaaggacgcactcgccatcctctcggcagtacgtccttttcaactgtaaacactcactttgatactgacacgtcacgcttgatctaaacactgtttcataacgcagctttaagcatccttgccacagcgttttgcttctgccagtgcttccagcgccggcagccaggatgaggtccattccggcgttgcaatcttctgcagcatggcaattaacgcgtcaagttcctgttggccgcgcatcgaaactcggcgatcaggggcatcaatcatcaataagcgtttggtgcacgcaatctgaaattcaacccctaaatcaccaaccgttgcctgtctaatgaaggccagtgtctgttgtgcttcttttcgccgtcccgcgtcaatataacgcagcattgcggtcaaaaaagtccggttagccagattcaagtgatcttgcggggtattcgggctttgcacctgaaccgaaaatgcatgcgtcaactgcgctaaatcacttaaaggaaccaccgcagctagctgcagagcaatcaagcgtaataacaatgaccaggccgccgtttttaacaataacgtctttgcctgcatttgttcacgagccagaatcgaaaatcgctccggtgccaggttgtgcagagtcaggtgcaaaagcagccgctgattcgtgttcgctaatggcaattgccgcaagattccggccagcgtctgcacatccccgtgtcgaacagctactaaataacggtgtaaaaacggccgcttattatcggactgtggctgggtaaaggtatcccaatccaagttcaagcgatccagcaacaggaaaaaccgatcagcggccaactgagacgtgtcattttcaaattttgacagacttgacaccgataaaatatcgccagcggcctcttttagcgtaagtttacgttcctttcgcatcaacttaaactgtttgccaattgtcaattcgaacgcacctcctcttcaagaaaccgctgccaacttttggtcaacaattgcgcaaaaaaaggcgaatctaataacgccaatgtcgtcaacaacttttcgatctcggctttggctgcccgatgctgaccacgatgatacatcagcagttgatgctggtaactcagcatcaaccgcgaataaagatcgtccggcggtattgccaagttcatcgcaatatgccacagacgggtcgcatccgcaaactcacggcgatgaatcaacaaggcaatactattcgtcaaaatagcccacaaatactgatcccgcaccggatgacttttagtatcaggcaagtccaaaaccattccggtcaccaaattaaccaactgctcactgtcataaagcatcaaggtagccgcaaaaagatccagttcatacaagccccaatgccgaatccgctttaaatacttgatcacatcatgcttcatcttcgtggtggtctgaaagctcggatcggaaaattcattatgggccaaaatattgatctgattcaggcgataaaagataaatcccgtttgccgccaaagctggtactgtttctgcgccaacgcctgcagtgccgacttgccggccaccgttgcccgttccacttcttgaaaaaagttctcctgattgagcgcccgatacccttgctgaatcgaggccacgtcttggtcaaatcgagtcaacagtttcaaaaccacagcggcactaagctgtgtctcgccgcgttcaaaccgtgacaaagtagcggccgttgtgatcccagccgctatttcttctaatgaatcattttcctcgagacgcaaagtacgtaaataggccccgattttgatagcttcctccgtcatcagcacccgacccttttatgagaactttattaaacaaatttaacacgttttgccattttttcaaaatatctttttgcttgtatcttcctgatgatatgttttaatcaagtgtgacaccgtttacaccaataaaacgaaggagaatagccatgagcgaatcgcaaacctggatttcttttttaagcaccagaaaccccgccctcaagatgcgtcccttggcatactgtttcataaagacttgtctatttgccggcccgtatagcgcttttatgagcttgttcatcaccggtgaaacattatggactttttccgcaattatctttatgtgcatcgtggtctttgttgctaatgttgttgcaactatctcctatgcaaagaaaggaaccttggtaagcctttttaagtccaaaaagaggtggctcgtacaagcttttgtttcagcgttgggaacttttttactactttcgctcaggctcttagtcgcatatatgtaaaagcgattgctgcccagacttaaactctggctatgactcttcaaatgttggttaagcttcgcagcgatgcgtcatggctttagcagaagctatagcattgtaataaagcaccttaactctagcaccttaactctgccaacttgaacttttaattatcggttaacaatgtctcagccttgccagctgtcaccttcatgtatagagaaaagttaaaatacttcgcctctaacattctaactaacgctatacgtgctatgattagcaccaccgttattcactttatcaacaacttgtgctcatttacattaagaaatcgcgtagaggggtgtgataattttgggccttgtagaaaactggtttccgtttatctggttgctactcttaggaagtgggagtctttccgtttatacgttttatttgcgtcgtaagtttcactacaatccgtacagtctgaaaaaggcctttagtaattcaccaactaatccctttcaatttggaaaacaaagcaattctaagatacgccagttaataacttggtcaaaggtgacgctgcttctttttatacttaccgatattgctacattcgttcttttaattatgaccatcacagaggtcatttccaataattcaattgatgatccttggccaatcatcattgtgacttcctttactgttggactagggattctttttaacgtcatcgctcagaaaaaaatgacattacagataaagcattatcaacaaataaaacataaggtaaccttcgcgatgccgattcaaagtttttttgacagtcaagcgccgtctgtcggttttcgtatccttagcctaagcattatcaacctagtttgtctatggagcgctatttttgcgactgttatgcttctagcaatccctaaccttcattaactctgcatttacacttactttttctggcttagtacttgtattgagtgacgatgtgttatgatcgacaacaacaccactgcatgctagtgttgcttccgcacccctgtcttctcgaggaccaacttgaaagcgagtgatatgctcttgtccttttcagtaaattggttaataatggcgattttccccctatttctcagtatctgtctttcagtttattctggatacttaaggaaaaagtttaggattaatcctattagtataaaaaaggctttcaaaagttccgatgatagttattttcgattcagagaacaaaataattctaaaataggcaaattggcgtatttgcaaagaatgatgctggttattattggactcggttacctcattagcttggccctctttctttcaatttttttggaactcattaaccggaatcctttaataagaaccgctcccttcgccttatgtgctgtgtctttaacgttggtatttgatattcttcttcaatcgactagcaaaaaaaagttgatactccaaattatggagtaccaacatcttaaagcgaaagagtcactaactgctccgattaaggatttcttcggatcaaaacagcctttgattagcatgagactgtttactctgggaatgaccagttcggccctcttgatagtttcctttttctgcctctttattgatctaacgcagcctctatcccgttaaaactatccaccaaaatgttgggtaattttttcacggtgaattgagttcactgctacgaactgtcaaacttcctttgagtatggcaatctattcttgttatttagacatttctagaggatttcttcacagtattagtttggatcaatattattcctgacactgtccgcctggtgtattctcttgattttggttcggcctttaagcttccctgacgttcttaattttaaatcattgtcttcattaaagttacagatgctgacaattgacatactccaaaagactctttgaatggtaaaagcagactttgttaccatcagaaaattgcttcccgttattttttgatatcgctcgaaaggtagtgacgtttctatgttttcactatatagttgggttatttatgccatactgtttctcatcgcaagcttttgctgtgccttttattcactctttatccggcacaagtttaagctccatgacagactattgacgaaagcatttggtgatcccctccataatccgtatagattcctagaaaccgaagatgatcaaattgcccgcttatcacaagcgtttaaattcaccacgtttatagggattggttgctattttattggcttatttctctttttcaaaaacctgaataatttctcaaaccaaattaatctaggcttaattgccattaccatttgtttcatgttaattggaatcatcagtttgatcctagcccagctaactgatcagcaaaaaatgatacgccaaattaaggcgtatcatcaacagaaatacaaactaaaattttgtgatttctttgattctgctaaaccaagtgcaagcatccgccgaaatcaggccaacatagtcggattattatttctactagcaatgcttttttgcattttcatgtttttcaattcagtaaattattctcctctttcaacttcccgtatcacaccaacctatcttttgttaggcaaacactaaaataagcgccccgccaacaatcaccgctgtcgcgaccaaacttgttgccgccgaaagatagtttgttcccatatttccagctaaatctaaggaaaaacctgttgaaaacactggacgctcggcgaccttaacctcaggatgattctgccaatagataggcataaatttgatcttccagttaaccgcaatattcacatcaacatttgaaagctttttagctttgataacgtttacggtgatatctaactctactgtcccaatttggtctgttttaattgagtagtcgattgacccttgcgaaatctttgcccccacttgtattaccttcgactgatcaattacagcttgataactggttgcatctttaatgtttccaaaattcgactcgaattttttctgcaatgctacactatccagtttgccatctttaataccaatagggccgttcccagccgtaaaatctactgaccaagtagcgattacacctgggctcggcattggaaacatgtaatctttgcctgctgagaaatttaccaaatcgtcaatcaagccattcatcaagtcattagcaacaactacttttgctgagtccggtaaggcaccaggcgtgaatgtcttcgtgcccggatcactaattttgacatccgttgcaacctgatcaattggaatgtcaccaatgctgtactcaataaattgatcgaagctccagtttaacggcattgcataacctaaattacctgaatagcccgttgacatatcggatacgaaacagcgcaccgcatatcccgcttttaagacatgtgcacaaacatttcgcgtgccatagattccagcacgaaagcctgatttggcaagccctgaattgacaccccgcatataagcgaccacagttgcctcaatatcgccttccagaatgtcaacatcacaagcaaagtagataatagtgctattaggaaagccaagaactcgtgcagttgaagcaaccgtcattgcatcaagcacaccttgagtttcggtgaaatatttaatgtcggcgccgccatcttgatagattggaaaaatgctcataccgccatcggtaattgatttaatctcagacgcagtcaaattcttaggagtaaaagcattccctactgccccctttaggtatcgcccgataatgctgaaaccatatttacgtaacaatgcaacatcagaactcgtcagttgcttagatgtgtcacaagcgattgaatcgcgtgttgtatcaccattgctagttaataggcccttaataacccgattaccagcgattcttcctgtggttggttccaggttcatcattgtgctaaaggcagccactgcatcgccaactgcactggtgaattggccattagtcggaatgtctgtgaaaccatttactaacagaccgtattgtaggatgcgaacggcgtcagtatctgttgatccctcagataaaacagggcaattgtcaattgtcttctgcccatagataccatttgcaacatcagcagccatcccttcagctctttgcaatgcataaatcaaagctgtgttagtgtcacgttgatagatgccatcgcaaggtagaatgccaatgttattactgaaccgtccattaagatattgctgcattgaccgaaccttctccgatcccccagtaaccaaggtaaatgcagccatatcgaacaatgccgccataagattaactgtaactacgccatttgcggtaatacccgcattctgctgtagtgttttgaaagcttgctctgttgcatcagaaaagtcctgattaaagtcgctaccaggattgatgcctttacaccagaaggcgccttgaatgagctgggcgatattgcccttataaccgggcttcaaactgcctaccaccgaagctaatgctgtcttggttgcatcgccaaatccttcaccaatagcgctaataccaatttcatgttgtagccccatccgcaaactataaatagtgggccatccagtttgtccgttctcgggcgctgtcgtgaaaccagaaacactgctatacgttttattaagccatttttgaacggctagtaccgcttcatctgccattttaaaaatctcttttacaaattttaaggtgacacgtctgtcatcgaattaaacagaacacacgttcgatttaattctactgcggagacttctttttgtccaaacttttcttaaataaacttctgatcgcacaaaaaccaagttagcgattacgattactccacaaaaattgacattccgttcccgttccgctacactcgtttttgacatttaaatacaccaccaagaaatagaggttgcggtgggcaacgaaaactggggagtgccgagtcatgttgaaccagtcgtaagtgccgccgccgaaatgttgaatcgtattcggacgattcgcattgggccatgggcgcataacccatggactgtcgaagctggttgcttcggggcgctatgattctggttcatgactaaaatcgatggaatcgacctttattgcggtatcaataaaggtcgattttttggttccagctctatttcccactacaagaagggagaaatgtcacttatgagaaaacattgggttgcgcgtttaggcgtgctagggttcgcattgagcctcctgcttggcagttttgccgcaacacctgtcagtgctgccagcgatgacaacacgtttaaagtcggaatggaggccggctatgcaccgttcaactggacgcaaacaacgagtgccaacaatgcggttaagattcaaggcagccaagaatacgcaaacgggtacgatgttcaaattgcccgcaaagttgccaaggcgttgcacaagaaggttgtggtggtcaaaacatcatgggatggtctgccgcctgcattaacttctggcaaaatcgatgccattattgccggcatgtcgccaacgccagatcgtcgcaaaaccatcgatttcagtaatccgtactatatttccaacctgacgatggtcgtccgcaaagatagtaaatatgccaaagccaaaagtattgccgatttcaaaggcgccaagattactgcccaactgagcacctatcactatcaggcgattaatcaaatcaaaggcgttgtcaaggaaccggcgatgaacgattttccagccatgcgcgtggccttggaatccggcacgattgatggctatgtttccgaagtaccagaagggattactgccgaacgtgcgaatccgaatctgatgtatatccattttgccaagggtcagggttttaaaaccgatgccagtgatactaacttagcgatcggcctgcgaaaaaatgatcctaataaggccaagattaatgagttgcttgctacgatctctacaaaagaacgggcacggttgatgaacgaagccgttgataatcagccgtcaaccgaaaaaagcggcaactggttcatggcgattatgaaacagtatggtcccatgctattgcgcggtaccggcatgacgctgctgatttctttggtcgggacacttgttggctttatcatcggtttgctggtcggtattattcgaaccacgccaaagccaaagaaactgggtcagcgtgggttacgggccgtgatcaactggctgctgtccgtttatattgaagtcttccgtggtacgccaatgatcgttcaggcagcggttttgtactatggtgcggctcaagcctggcatctgaacatggatcggacaaccgcggcgttattgatcgtctcaattaacacgggtgcttatatttccgaaattatccgtggcggtattatctccgttgatgaaggtcagtttgaagcagccaatgcgcttggcatgacccatctgcaaaccatgatgaaggtgattctaccgcaagcggtacgcaactccctgcccgcggtcaccaacgaatttatcgttaacattaaggatacttcagtgttatccgtcatctcggtttccgaactgttcttcagcggcgaaacgattgccggacaaagcttccagttcttccacacgtatctgattgtgagtggcatctacctcatcatgaccttcaccatcagccgattattccgtctcatcgaaaagcatctcgatggtccaaaagattacaatgtgatgaacaatcaaatgcaggtcgaaacacccaaaatcagcacggcaaaggaggactaactgatggcaaacgaacctttaatccaagtcaagaaccttaaaaaggcttttggtaaccacgaagttctaaccgatatcaatcttgatgttcaagcgggcgaagtcgtttccattattggtcgtagcggatccggtaaatcaacgctgctgcggaacattaatcttttggaaactcccactggcggcgacatactttttcatggcaaaagtattctgggagatgatgtcaagctgagtacctatcgtgccaaggttgggatggtgtttcagagtttcaacctgttcaacaacatgaccgtcttgcaaaatgttatggtgccgcagcaaaccgttttgaagcgtgacgctgctgccgccaaaacgcatgccttggaattgttgaaacaagtcggcatggacccgtttgttgctgctaaaccggatcagctttccggggggcaggaacagcgggtggcgattgcgcgggccgaggcgatggatcctgaagtcctcttgtttgatgagccaaccagtgcgcttgatccggaaatggtcgatgatgtgttaaacaccatgacggccttggcgcataccgggctgacgatgatcatcgtgacccacgaaatggccttcgcgcgcgaagtttccgatcgcgtcgtcttcatgaataatggcgtcattgccgaatccggcacaccggatcaaatcttcggcaatccgcaacaacaagcgaccaaggaattcctgaagcgttatttgaatcgggtatgatgattcaagtgcgcgcagttcttaattgaaaaaggcatacaaaaacgcgaccctgaatttccggggtcgcgtttttggtgccggttagtattcaagtataaccgtgacagattcaccgtttgaccggcttatttgattttgaagccgtctgctcacgcttcttttcccgatgttcccgccatgtgtctaaactgacaacgattaaaaatagaaaaaagccgcccacgactgactctgccgtcaaaacaagataacgcagcgccaggtacccttttccagccgtaacgtcttgatagccgacatagccaaacgtcatcagtacggctaggcccaagaccagcagcgtataaatcagggtgcgttttaatatccgtttgaatgttgtcatggacacggcctactttctatcggttcgttaacgattatctttcaaaatggtttctgcctgcttttgtaactgggtcaaaaccgtcttcggggccgccttcttggaaacggtctggtcaacagcatccagaaggttattacgataggtgttatagccaatgaatggcgttgatgaaaaggcgtcgtcataagccttgatcgcagcttgatatggtgggttggccttcagatatgcctgataagcactcgactttgttgcggtggaaacaactggcacgtacccgctcgccttggcccattgcgtctgaatcttcttactcatcaagaatttcataaacttaacggcacctttaatctgtgctgccgacgcccctttgaatacggaaatgccgttgttgcctagaaccgaactggctttgccttcaaaactcggcataaccgcggtgccccagtgcatgtctttaggtgcagtacttgcaatctgctgaatcgtggcactggaaccgaagccggcaaaaatcttgccttggacaaatggcacattaaagtagttatccaacccagcggtgacggccgtcttgtcttgcaacatgctggtaatcgccgtcatcgctttaatgctggccggcgtatcaatcttggcctgatacttaggggtaatcaggcggttgccggcatcataagccagcgtttcaaactcaaagtcatagctcttattaaaggcaacgccggtgataccgtcacctttgagctgctgcccgatcttttcgagttctgaccaagtcttaggtacactgagatgatacttgtctaaaatgtctttattgtaaaacatgatccgagtgccagtagcaaacggaatctgataatagctgccatggtatttcaggttggtggcgatcccgggataaattgacttcaattcagcagaagaaaactgatccttcacctgctgatcaatattgaccaacatcccgtcatgaacgtattccggaataatcgtgtccgtcacttgcccaatcgtcggtaacgttctggatttggccgatgctaagtatttcttttgcagattatcatatgaaccttgcgaagttgcaacaactttatactgcttctggctactgttgaaagtcttgatataactttccagtgccttgttgtaattaccggtcatgcgatgccaaaacgtaatggtaaccggacccttagagcttttggatgttgaactgccaccgctgctgcaagcggtcagcgccaatgccatcaatccggtcgcaataccaagtaaccaacgtctcttcatcatgattccctccatcattgcgttgtgtcatggacaggcccgctaacttaccggccccgtccggctaccaatcatctagaaaccacatacagtataccaatactcacggcagctaggggattttgttttatcataacgcgttcgccagcgcagaaatctacgtgtaaggaccttggtcgcaatggtcaaatcccgatcatcacgtctgaggccgcttatgttctggtttacgcccataacgcgctccccggcgcaaaagtctgcgtgtaaggaccttaagcgcaatggccaaagcccggccatcacgcttaaggccgcttacactccgacttctaatcgcgccggctcacgctcactttctataacgcgctccccggcgcagggacctgcatgtaaggaccttggtcgcaatggccaagaccgggccatcacgaccaaggccacttacactccggtccctaaccgcgccggctcgcgctcacaaaaaaagaaagccgagaatcaatcccgctttcttttaccaagttatgctgtgttatgctgcttgtttgtccttcaacttgagatagaaattcgcaaaagtcatggttcgatacggcatgacccaaatagccgctaagccaaatgtaatcagttcgagcagccaccaaccgagaaaactcaggatcaagacgaaaaattcccatttgtaaccgtccatcagctgccggctttgggtaatcgcttcggtatagccaatcggttgcccgcggtcaatggcatcacgataaagccactgtgcctgcgaatatgccaaggctttgacgattcccggaacaatgagtagcaatgtccacaggaagacccagacccactgcaataaaccaataagcaggctgcctagaaaatactcgcctcgttcaaatattttgaacatctgccgccaaccaaaatgatgatccgagcggccgcgcagcccatctatcatggcaaagccgacgccaatcatcaagagtaatcctaaaagcgagacaaagatgagaattgattgccacatattcaagtattcattcatatgactacctgtgactgtatcgaggcgacttttaaccagtatttgccattcaccgtgatgtgcttctcgaatcgttggaaacgggacaattgccgccaaccctgtcaaaagcaacgccggtaaactaataagtaaataatagctgaaattgggattcaactccgccttagcttgatcttttaatgctgtccgatccatcgataatgcccccttctaacgacgatacatgttgtcaccgctggggctatcataacagaaagcgaccattctagacgaattttagcggcacctttggattaagttgcggttttccgcgcaacaaagtaaattcatccccattaacggtcaactcggtcttggtatcaaaaagtccacaggtgtaactcttaatcaacaccggtccgactggggaatcaaggtgcgcatcaaatacatctggcacattacggcgcggcaatatcagcagactgaatttagcttgcgttggatcgtgatacgaccgtgaataagggccgatgccatcatttaaatctaaaatcaagacccgatccgcgcgtaatagcggcgccaaccgagctgctgcctgtgcagatatattaagctccatattccgccccttttagtatcataatccctgttttccccattatgaatccattgtcgccaggatacaactggcttgtaaaagtttatcgaaatgcctagaattggagtaacgagttccaatgttatttagctagctaagacgaggtgtgccaatgaatatttattcggctttaaaatttgtccagatcgatcatgcaccagtcaatcatttacaggttgtcgtcaccgatcaaagtggcaagcctgatgctggcatgacagacttattaatcgactgcctcaacaagatcgacattttcgttgatctcagcaccaccgaccgcgtcagtgacgtgattgatgatctcaatttactgacgccactgccttatgatgttctcgaagaatatcaaaagattctcgagcagcccatcaccggtatcaacatcgccatgaaaaaacagttaatcgaattcgtttatgcgcccttagtttaacatcacggtgcttcatccttacaagtccgcctgtcggtaagcaacgtatgctaccaatgacaggaggatttttttatatggtgagcgtgaaccggcgcgcttagggatcggagtgtaagtggccttgggcgtgatggcccggttttggccattgcgacaaaggtccttacatgcagattcctgcgccggtgaacgcgttatggagcgtgaaccggcgcgcttagggatcggagtgtaagcggtcttgggcgtgatggcccggttttggccattgcgacaaaggtccttacacgcagattcctgcgccggtgaacgcgttatggttggcgaacgcgttgtggttattatctcacaagagtgcacccggtttcgactggcattcgttaaaaaacctccgttattccaacacttttgaagcgtaaacggtttcgtttagaccaattttctgctatcctgacgaaaacggaggcgacgaacaacatggaacaaacaggacaggctttaccggccaccattcaacgaatctggcgtgccagtgccgcaatctgggctttggtcattctaattgccggcttacttttgattgcggcgtggcatttttggcattggtcgctgtggttagcaataggcgccatgggatttgccattttacaattgattttccgtcttgctttagtgccctatcgctaccgtttctggcggtacaacattacccccacagccgttttcctacaaaaaggcttcttctttcaaaaaaatgaagccattccgattgcccgcattcaaaatgtgaccttagaagccgggccgctgctgcaatggcaggaacttcagcaagtcaatatcgaaacggccagcacggcacatgttatcgacggtgttactcgaccggttgcagatcaactgcgaaatcagattctacaactggcccaggaggcgcgcaatgaatgacaaacccaaacgccttgcacccattgccatccccattcattggctgatgtcatttattgcttggtggccgctatttgtcagtggcggcttttcaatcttgaagaatgatatgaagccccaagaatttttgttctggatcagtctggtattaggcattttggtattaacgctgctttggtccatcgtgcattatttgcgctttacctacttagtcgcaccagacggcttgaccatcaatagcggagtcttcattcgaaaaatcaatcatatcccatacggccgtattcaaaccgttcagcgccggcagtggttctttttaaaaccgcttggcctggagcaggtctctattgaaacggccgggaaggaatccaagaaggctgaagggatgctggccgccgttccgacaacggtagcggatgccatcaatcgttatcggcaagggcttactgatacaccaacaacttcggctagtgaccctacgactgagggcgcgcaaaccgaagtaacaccggcggcaaaaaccccagacgctgcctacaaaatcaatgcacatgatctcaatcaatatgcgctcacttcgcttgggttcattcccatcattaccgggattctctggctggtacaaaaggttcaagaataccttcccgatagctggtataagcaagctgaacacgcgctaaccggactggccatttatctgattattgccttaacggttatcgtcttagtgctcggctttgccatttcttacctgaacattttgcagcgctattaccacttcacgcttgatcgaaccggtaacgaattgcaaaccagtcgtggctttttccagaccaacaccgtcagtgcccaactgtcccgcgtccaagccgtacgcttcaaacaaagcgtgttacggcagtggtttcatctcagcacggttcaggcacttctggcgtcaagtgctgccgatgatgaaaaaaacgatgatttggttctgatgcccgtcatcaggcaacgacaggcgttaacgaccatgcaaacattcattagctggttaccaaccgccgcccctgaattagagccgataccgactcgtcatcgctggtactatgtgcgaaacatcgtgctaggtaattttggcctgatcgtcttgccggctatcttagccagtaccttatggctgcatcttagctggtggctgtggctcttgccggttggcttgctgtggcttgtcatcgtggctttacaaggccaatacgccggggctaatgcggcaatcggcatcgccgcccccgatcagctcgtcatccaagtgggtgagacttggacaaagcaacgttattttgtgcgcaagaaggatattcaagccatgagtttcaaacagtcgctgtggatgaaaccgcgaaaaatggcacatctggaaattcacatccgcaaaggcaataacgatcagagtgtcagttcacggtacatgaaagccgatttagctaaacgcatcatgagctggtaccaaccattgccttaatcagtcactttaaaagtcaggagtctttcctttgctactcaccaagatcgaatacgcaccaccacgtcatcacagcgattacccgtttaatttgccttggcaagccgattttcacgaattaatcctgacccgtccggtgaccattttaaccggcgacaatggtagtggaaaatcaacgttgctcaatgcgatcgctgccaattacaatgccatcctcatgagtggtgccgctttggaagacgaccctgagtatgacaatagccgcgccttggcccgccaccttaagctaacgtggacatatcggaccaaagccggctttttctttcgcgccgatgatttcatttcattcattcgcgccacccgcggccacatcaagtacgcgcaaacgcaacttgaacatctcgccccgcaaagtttggagcgcctgccctatctcaataccctaagcgcaatcaaacatttgtatcaggtagatttagacactttatcccacggccgggcgtttctggccttatttcgggcgcgattgcatgccaacgctttatatttattagacgagccagaatcccccttgacgccggaaaatcagctcagcctgttagccctgattcatgccgcagtcgcaaatggtgcacagtttatcatcagtacccattcccctatcctgatggcttatcctgacgcccaactgctcgcattaggcgacaccttggcacccgttcactatgatcaaatcgaccatatcacttttctgcgtaacttcttagatgacccgcaacgtttcgtctatcacctgctcaacgactaagcgattggcatgatcgctaaaagtgttttaagctgaaggtgacaagtagctgacattgtttatcaaagggaaatccgatgccaaaacgcatccatgaaaggagaagttgtatgctaacagcagcttggactaagcaattaccgttgcaacacattaccgcgatcacaccagtaggcggaggcgatgtcaatcaagcatatcgggttgacaccgcggaaaagccttattttctactcgttcaaccaggctatccggccagtttctatgccggcgaaattgccgggttagaggcatttgagcaggcagacattctggctccacgggtgattgctaatgacaccattgaaggtgatggctacctgctgcttagcttcctgaccagcggcagtggctcgcagcgtgatctcggtcacttggttgcccacttacatcaacaccacgaaccctctggccgctttggcttcgactatccatatgccggcaccagcgtttcgtttgccaatgactggaccgactcctgggctgacttattcatccatcaacgcctcgacaagctctccgcccatctgcgtcaaaaaggcttgtggcaagcagccgatcagacaacttttcaacaggttcgaaccatcattcaaaaaacgcttaatcagcatcatagtgaggcgtccttattgcacggcgacttatggggtggcaactatatgttcacagcagacggtcagccggcgttaattgatccggccgctttgtatggcgaccgcgaactcgatatcggcgtgacgaccgttttcggcggcttcacccaagacttctacacgggctatcaggaagtttatccccttgatcccggctatcagttcaggctcgaattctaccggctgtattatctgatggttcaccttgataagttcggcatgggctatgctggcagtgtcgccgccgtcatggaccgcatcttagaccacggtttggcatgagactcccatttcctgctaagcatccggattatttcccgggaaatgtggcagcaatttcgaaaataccactcaaaaatcggttcaggatcatatcccgaaccgattttttagtatatctatgcttaaatttgaacaacctcaggcattcaaaaccttattcaagaaactcttagtacgctcctcttttggatgctcgaaaatgtctgtcggtgtcccttgttcaaggattgtaccgttgtcaaagaagaccacccgatcggcaacttctttagcaaagcccatttcgtgggtaacgatcaccatcgtcatcccttgtttagcgagtcggcgcataacgcccaagacatcgccaaccatttccggatccaaagcactggtcggctcatcgaacagcataatatccggatgcatggccaatgcccgggcaattgccacccgctgttgttggccaccggaaagctgtgccggcatcgcatctgccttatcggtcaagccaaccacttcaagcatctccttagcttgttgggttgcttcttctttgctggcaatgcctagttcaatcggagccaacgtaatattacccatgaccgacatgttcgggaacaggttaaaatgctggaagaccatgccgattttttcgcgaactttattgatattcgttcctttatgggcaatgtcttcaccgtcaatcaagatctcgccgcttgtcaccgtttcaagaccattgatcatccgcaaaacggtacttttcccggcaccagacgccccgatcatgacaacaacttcattgtttgcaacgtttaaattaacgcctttgaccacatcgttatcgccgaagctcttgtggacatttttcatttcaactcgatactgactcatgctttcaccttcttctgaacccagttactcagccaggttaatagggtaatgataattaagtaaatcaacgcgaccattgtccaaatcttgaacccttccatgttccgggcaatgatgattttcccggtttgcgtcagttcaagtaagccgatgatggacagaatagacgtatccttcaaggtaataataaactggttgatgaaactcgggatcatgatcttaatcccttgtggcagaatcactttgcgcatcgctttcccaaaaggcaaccctaaactgcgcgccgcttccatctgtccgggatcgacggcttggatgccgcctttaacaaacgccgccgtgtacgccccttcgtttagggtcaaggttacaatcccggcgatgaatgccggtacttttgatccgatgagacttggcaccccggtataaatgaagagtgccagaaccatcaacggcagtccgcggaaaatataaataaatgtcgttgcgatgccttggcacaacttatttggaatgacccctaagaagccaatcaaaatgccgaccaaagtagcaaagaaaatggcgacaatggtcaagaccatggtctcacgcaggccatccatcaaggtcgaccagttggctttcagtaagccgataaatgaccgatcagtggtctgactgttgccagcggcggtcttttgcgattcggcactgccattgccaaggtagtgctcgatgatcttatcgtattgcccattggcccgcagcttcttgaggccggtattaaacttgctgatcaatgcctgattattcttagaagctgcaaacccgtaagaaccttcacgtgccggtttaccgacaagcttcagtgccatgccgttattgataccgtattgcatgactggctgatcttcaaaacacgccgccgaattacccgtaatgacatcctgatacatgttgttcgagtcatcaaaagtgacggtcgtaaagccgtatttttgtttaatgctattggcataatcggccgaatccgttccggtcttgatggcaacgcgtttgccgcgtaaatcttttaacgacttgatcttactcttcttggcaacggccatgactacgccggatttatagtacggatcactcatcaaaaacttttgcttacgttctggtgtgatggacataccggcaatcacaccgtcaatctgttttgcttcaagcgcctgcaccgctgcattgaaccccagcggtttgatttcgaccttgaatccttcctctttggcaatggccttaatcaaatcaaggtcaatcccgacatacttgttatcctgattggcaaattcaaacggtgcaaaagtgacatccgttccaatcgtatatgttttctgtgctgccgccaccgtcttgccggggattaatgccccgagcattaaaggtaaggcgactagcagacttagcagccatttccgcttcaacccaaacaccacgctttctaatgattaccagcccattaggccgttattgcatgcgccagtttaaaaataactggttgtgcgccaaccaccgtcactcagtacattgctgcccgagtctggttctgccacctacttgtttaagtatgcggccaagcgcagctcatctcctcgcactagttcgatttttaaacttactatcctatgctagcggaactaaatagttgctgtccagcgttgatgttagctttccttacatttgtcacattattttacgtagccggcctagacctccatgcgtcgttgtacccagttgctaagccatgtcagcacggtgatgataatcagataaatcagcgcaaccatggtccaaatcttgaacccttccatgttgcgggcaatgataatcttcccggtttgcgtcaattccagaataccaataatagacagaatcgaagtatccttgagcgtaataatgaattgattgatgaaactcggaatcataatcttgatcccttgtggcaggatgactttccgcatcgcttttccaaatggtaagcctaagctgcgggctgcttccatttggccgacatccactgcctgaataccacctttgacaaaagctgccgtgtacgccccttcattcagcgtcagcgtgatgatcccggcaacaaacgccggtatcttggaaccgattaaacttggtacgccggtgtaaatgaacagcgctagcaccagcaacggtaaaccgcggaaaatataaataaatgtcgtcgccaccccgcgagcaaaccgattcggtaaaacacctaacaacccaaccaagatcccaacggcagtcgcaaagaaaatagccacaatggtcacgaccatagtttcccgcagcccgttcatcaaggtgccccagttttcccgcaataaacctagaaaactccgatcagtgtcttgggtcttggcgcttgtctgcttttgcgctgcttgtgtaccattgccaagatacttggcaacaatcttggcataagtaccatcagccttgacctttttcaagccggcgttaaacttttgatcaagttcgtcactgcgccctttttgagtggcaaagccgtaatagctggccttactttcaggtccggcaagtttgagcttcaaaccagtcgcaatggcatattgcaacaccggcttatcatcaaaacaggccactgaattgccggtgatgacgtcttgatacatattattggaatcatcaaatgtcactgtgctgaagccatatttagacttcaagctcatcgcaaagtccgcggctgcggtaccagtcttcaaagcaacgcgtttaccgcgcaaatctttaagctggttaaccccactgtttttcgcgactgccattgcgacggccgttttataatatggatcactcatcgcaaacttctgcttacgttccggcgtgatctgcatgccggcaatcaccccgtcaatctgatgggcttctaatgcctgcaccgctgcgttgaatcctaatggcttaatgtcgacacgaaatccttccgctttggcaattgcctgcatgagatcaatatcgatcccgacatactgattatgtttatcggcaaactcaaacggggcataagtgacatccgttccaatcacatatgttttcttcgccgcgtgcgttgataccggcatcgccatactcagtgtcagtatcaacgcagccaccccagctacgcaccacttccaaacccgtttcatgaaaacaccatctttctcatatttacttaacaccacgacaaatcaaccatcgtgatccggcagtggccctttatgactgagcccaaaaaacattttgccgtattcacagctaccaagtctaccgattttctgaaagcttgtccatgcgcactgagaagaagattgttttatactaagagaaactaataagaaaatgggatgaagccatgtttagctacctaattgattatgacctgaaactagcactacctcgtccggaaattgatggcccgcttttattcgagcaaatcgaaactagtcgcgattcattggccgcttttttaccatgggttgctaccacgttaactgccgatgatgaaatcaatttcttagctgccaccttgaaaagcttcggtgaacaacgcgcgctgcatttggtcattcaccaagctgatgccccggttggtattatcagtctcaataccatcgatcacacccttcatcataaggccgatatcggttactggctgacatcatctgcgcgtggcaagggtatcatgcataagtcagtcgaagccatggctgatattgcttttcatgattacgatcttaataagctgacactgaatgcagccgtcaccaacgatgccagcaatcacgtcgccgaaaaagccgggtttcatttggacggcattttacgtcaggaagatccgcatcacaatggcgactttcttgacgtaaacacctactccttgcttcggtcagaatggtcttaatgttccacgagaaacattaagcgcttatttttcaaaacgggcacttattgaaaagtggcccacgaatcatttaaaaagcgaatgagtctccttaaactttaggagaactcattcgctttagtttatgttgccaaaaaaagattgacactcggttcaagacaaacatccatcagctatcaatgaacaatcagtcgcaaaagtaccggggtcacaaaaccttcaatcaacgctgccactgcaatcatgggtacgacgatgcaaacatattgtaaggcaatggctttgacatccagcggtgacttttcataatgagcatcagaaaagaaacgcttgattgaatgacgcagtgcgcgattgacttgtgctgctagggtcacaccgataatcaaagcgctcatttcaagaatgccgtgtggtagaattcccaaagcaaatgcggctagtgctccgctgagacccatcttggctgcataaacgcccatgactaagccgactgacgcacatgtcaccacatacgaaagccaataaagaaatggaatcgggatcatacttattagcatcagccccaaagcaacgcgttcattattaagcaagatcatccaaaaagcatggagattgtcttttggttctgcaaatttgtctgacaatccggtcacaatttggtgaataaatgtcggattcgcatccatcacaatgtaggtaagtaagctcaccataatggtaatcgcaataaacaagagccagcctaccaacaaataatgcccgataatatccaagtgatacgtcaaccgttttttcatatggtcccctccaatcagtctgcttatggggtcaggctatagtataccctacgctgaaataaggcgctattgagaagattaccgccaacaacatcagcatgagtttgactgattgccaacactgcaggaagaagcaaaaaggttgccactgacggcctcagcttgtgacttgctgtttccacaattttactgaataatggccgcatggaggtgtcgtgatcgtgatggaaatcagcgaagcacaagcaacttttaacgcagcgcgcaaacaggtcgaacaagtcgtcgttggtaaaccgatgccgattttgctggcatttaccgctttattagctggcggccatgtcttatttgaagatattcccggggttggtaaaaccaccctcgttcaaaccatcgccaaaaccttggacatacccttttcccgaattcagtttacgcctgatatgctgcctagcgatgttctaggtacctcaatcttcaatcgggccaccaatgcatttgaatttcaacgcgggccaatcttcacaagcgttttgctggccgatgagatcaatcgcgccacaccaagaacccaagcagcgttactggaagccatgggtgaaggccgagttactgtcgatggccgcacttatccgcttccgcctgactttttcgtcatggcaacggaaaatcccaccgattacgccggcacctatccgttaccagaagcgcaattagaccgtttcatgttacgcctatccctggggtatcccgatgcggccgcagaaaaaagtctccttgtcagtcctgatcggcaaaccatgattgcaaatttgaaacccgtccttgatgcggctagcttggctgcaagtaaacaaatcgtgccaaccatcacagtcactgacgccattgccgattatgtcctgaaactggttcaagccacccgcgccgatcagcgaattcgactaggcatcagtccgcgtggtgggattgccttagtgtcagcagcaaaagcgtttgccctgctcaacggacgatccttcgtcaagccctctgacattcagcatttggtcattcccgtctttggccatcgcttgattcttaaagacccgactgtaaaatcagccgatctgttaaccgagattcttcagcataccgccgctccaattcggaggtgaacccatgcattggcgtaacgtttttctgaacagtgcccttgtcgccatttttggctgcctaatctgttttggcatggcgtttaattcgccgacgagttggtttgtcagcgagtttgtgttcgtgttgttgctgctcctcgttcttcccttattactaccattgcgacggcgccttaagtttaccgctgacaaccccactttaattgccaaccggccagctcggcgtttctttacgctgacgcacggcaaatggctgcctaatttaattttattagatgctgctaaaaccagcacttggcaccttcccagcggtcagcgaacagccagaatcacgttacaattaccccgcggtgtttatcgccaacttcctttcagcgtgaccgtgaccgattggtttggttggttccgcaaaacactacccttacagctcacgacgccgctaaccgtgggccctacccgtcagcctgaagctgctgcgcggatggccgaccattttgttcaaaaaatggccgcttcggaagcaggtctgccgagtgatcggatcaaaaatttccgtgattatttcccgggtgataacattcagcaaatcgcctggaaaatcagtgcccacgctgattcattaatcgtgcacgatgatgaacatgaaagccagaccgcttggaccttgctgctcatcatcagtccttcactgtctgttgaggcgggactaagtttgtttgcaagcttaatggataccggaatctttagtggggatggctttttgctggatcagcggctcacgcgtgtttttcgtggtcaacaagatgctttgcttgcagggtttgaacctaagggcagcgccaatgtcgaatggctgcatgacttatccgccccgggtcaccaacgcgcctacctaattctcgctgccaacactgcaaccgccgtcccgtttcaacaagtacttgctccggctgtgacaaccgtggcaacactgtcaggaggtggcgaccatgcctaagtggctgcaacgacttttagcagttttgttatcatggtggctacttgcgcttttcttagaaccttttgctactatcaatccaatcgcccacccacgcgcattaatcgtctatatcctgatgatgagtctgattgactttttggccgtgctactaccgcgccaatggccatggtggctgctattgggctgcggcacgacaatcggtgggctttggggcgtactgccgctgaagcagccatttggcgtttcgtggttcacggcgtatttacacacctttaccagtgcaaccggaaaattcgtgcaggctggcggcgtcgatgttccaaccgtcctcagcatgacgctggtgatcacgttggtagcttttctgttgctgttaacggttgtggttcgtttctatcctggcgctattgccatcgttcttagttatctggtggctgtgcacatttttaacggcagcgaattaaccattcaatttatccagttggctttggtaaccggtttgatggcgatgctccatctttatgctgatcattggcgcccgttcttactgggatgtgtcttcataagcggactaacgcttggcctcgcttggctttcatcggcgaccccactaaatgatcagctggcaaatgtgtcgattccttttcgtgaccggttaaatcagcgtggtttttatgccggtattgagacttatatcaacggccccggacgaacgggctttactgaaaatagccgcgttttgggaggaccggtctacgatgaccccactccggttttcacggcaaccagtgctaaagccagttattatcgcgttgccgttgatgcagaatataccggtactggttggcaggctggtgctgatcaaaaccagagtatgccattagacggtgccaccatgcgcgactcggcggctactatcgattacgggcctgccacaagtacggccttaactttcaacggtggtaaaacctatttaccgcttccttatggtcaattgaccttcaccggcggccaacccgatcccacgaccgattttttgctcaatccggaaacccgccgcatgcaaacaaccgaccaagcacgttttcagcgattggacattcaggtgcaaccaaaacagatctcagcagcacaattggccgcggcgaccagttcccgtcaaaaggttgcgtcccgttatctacaattgccacgcaccctgccaaaaaggatcagaacacttgccaaaagaatcaccgccaaggccacgaccccatacgaaaaggtactggctgtccaaaattatctcaaatcagatccacgcttcacgtattcaaaaaccgatgcacgccgcaccccgccaacccgggactatgtggattattttctttttgattcgcccatcggttactgtgataacttctcctcggcaatggttgtactatgtcgcagtatcggcttgccagcgcgctgggctaagggattcaacactggcacattgctcggtggttccggaaatcagaaaagatacgtgattcgcaacagcaatgcccattcatggccggaagtttacttcgataacttaggctggctgccgtttgaaccaacaccaggcttcagtgacccggcaactcccgatgaaaatgtttcgcctccaagtcccagtagcagcggcactgaaagcgttcagccgtccagcactagcaattcatcctcgtccagttcgcgtgtgtccgccagtacagtgtccaaacaaacgaaacgacaatctcggccgtctctcaaccgcctgagttggctaaaaaaatcattgttcatcatcttattagctctactgttgataagtgtctggcagttaccagcgctcgtcatgctgatattaggaatcggactgggatcgacaaacttttcggcgcgttatcgcatacttcttcgggcgttacgttgggtcaagaaacgacccgtgaaccagtcgcttgatgattatgctcaggccatcgataaacgattaggccagcaagcgtatatgtttaacttaaccaaggcttatgaagaaacagtttttggcaatctgccggttaacacagccatattgcgacctcattggaaagcactcactaagcaacttgtacatgatcgttattggtggcagcgctcaaaaaagcataaatcatagcgcgaggttgtttcacgtggaacactcggtttaatctttttcgccacgaaacccagctcatccattcctttgcgccatttaggaaaatcagcataaaagcccggtcatcacgcccaaggccacctatgctccggtttctaaccgggctggctcgcgctcactaaattgccggttacagtcgaaaagcaaaaaattttcttgtgaattttcagtttaggttataagatagataagcaacgtcttagcttaagttgcagttacacgtgaaacagaacgcaaacaattcagccacttatcataatcccttttttctaaatgaaacaagcactcacaacccttgataaatcaacggttgcgagaaaaaacttgcacttactaataaaaagcgcgtatgataatataaacagtttctcagaagaaccaaaaactgttatgaccccgctactatttttttagtagttgtgccacttcgactggacgctgcagtcagctcgtaacgtactcagaagaaaggggggagccgctgatcttagcggcgaacacttatgaaagttatgatcgttctagaaaatatcgtcatggatggcgttaaacgcgcttcaaccgttttaggtaacgacctcgtcaagcactacgatgttagtttttatactttagcagatgcccctgcctactttgagttggacgcacctctgctcatcgcaccgcgcccaaccgatcctaaacttttaaacttttttggtagtgacccatacacccactatcatgaccaaattgcggatttgatcacgacaattcgggatcagcactttcaaacagttatcttaccagccggtttaacaacgagttttgctccgctgattaaacgggctttgccagacgttaatctcattggctggatgcacaacaactacgctacttacatggaagattactatgtccagatgcaagctgagtttgaaggcggcttgcaagctgtcgatacactcgttacgttaaccgaaagcgatttgaattcctataagcgtttcaatccgcgtaccgttaaaatctacaatccgctcacccttgttcctactggtgaagctgatctaaacgcccaccgcatcgccttcaccggccgaatcgccatcgcccacaaaggaatcgattttttgcttgaggccgccgcttcacttccggacgactggaagatcgcaattgccggcgctggaaccgatgaagacatgaaaaacttctatgacctgatcgactattttaacgtcagtgacaagcttatttatcaaggaccgctaaaagataaggctttgcgtgatcattaccgtgccgcttcaatcttcgtatccacgtcgcgttgggaaggcatgccgctggttatcggcgaagctatggcctcaggtttaccggttgttgccatggaaaataccggttcccgcgaataccttggcaacaacgactatggcctgctgaccaaagcgcaggatgtcccggattttgttgctaacctcaagaaaatgattaaccaaaccgatttgcgccagcactacgcccatcaaagtttggaacgtgccagccactttagcccggaaaacattgtgtcgcagtggatgccgattattgagcaccaaccaacacacgtctcaattgccggatagttagcagtacagttctccaaaagttaccatgcttcatcaaaaaagcactcacggaaaatccgcgggtgcttttttgagtgaattagattatagaaagcttgtacgttccacgtgaaacctattgttgatgacaaaaagttccacatgaaacacctaaaccgaagatgcttgtttcatgtggaacagttgtgtcacttggtaggaaatcacatcaattcttaccgactgcagccgctttaggaattggctcttggtttgtcatgactgctggtgagaacagtcgcttgatcaactcatctggcagttggtgctgccggcgaagaagttcaggaatggcaatgtgggttttaagactggtcttaacgagtttggttgtcgcttcatagccaaggtacggactaagaatcgttgcgctaatcgccgagtgttgcacattttcatcagactgcgcttcgttgacggttaatccagtcacgcaattcgttgtcaaggtgtcaatgcctcgggctaaatagcgctcgccttgcaacaagtcacggaaaataatcggttcaaaggcatttagttccaactgccctgcttctgctgccatactaatcgttaaatcctgcccgataacctgaaaagcaatctgattgacgacctcagggatgaccggattcaccttccccggcataatcgaagaccctgcctgtttcgccggtaaatgaagttcattcaaaccagcttgcggaccactgctcagcaaccgcaaatcgttagcaaacttagataaatccgtcgccaaccccttcattgctccggaaaaggcaactaagacatcacaattctgagtggcatcgatcaaatcatcagctgactcaagctttaagtcaatgagccggttaacctgggacacaatgtgcgcgcgataataaggagtcgcgttcaacccggtaccgattgccgtcccccctaaattgacctggcgtaaatcttccgccgctcgcgtcaaccgtttttggtcgcgctggaacaaactggcatacgcatgaaaactatgaccaaatgtagttggcactgcatcctgcaattgtgtgcgcccgactttaaccacgtccgcaaactcgtctgctttgaccaacaacgacttaattaaaaaggtcaaggcttgctgcaatggcggcaaagcttgcaaagccgccattttcccggctgtgggataagtatcattcgttgactgactctgattcacatcgtcattcgggtgcaccggctcagcggtatgctgactggccaagttggcaatgacctcgttaacattcatattaaccgaagtcccggcacttccttgaatcgccggcgccaccagtgcatcacgatgttcacccatcaacaagctgttacatgccgcaacaattgctttcgctttagcggctgacaatgtcccgccagctgcattcacttgtgccgccgcctttttaatgataatcagacttttaaaaagcaaagcatcggtccgttcatgactaattggaaaattcgccagtgcgcgggtcgtgtggatcccatataaaacatcctcatctactgccagcttgccaatacaatcttcctcgatacgcattgtgaactccctttcatataccaatatttacgttcttagtatatgcgtgttccaaaaagcgtcaacgtttaatgtaagctagtctgacaagtagattaaaaagtataccaattaagcaattttcttaccatcttgttggtcgcgatctaccttatcgaaacaggcaagcgcccgccatcgttccactggccaatcatttgatgcgcctgacatgagtcaaaaaaggtaaccaaaatgagtccggacagtgacattactattttgaatatcaagaacttgaaaaatacagcgtctcacttgcaactttttttccgagtgcaaaaagacgctgccgtcaagaacgcttctagcttcttgacggcagcgtctaccacttaagaacccttgcgatggcaatcatccctacttcactctttatggattattgttttccaaaactatatataacttttccaaactattaaatgacataaagttggacaaatccaaggaaccatcatgcttaacagtgactttctcagaaacgatgccacacaggacgttatcgagagcacgctgcgtaaacatcttttcttcctgaagactttgtatgccgagaacaagtgccttcagtcgcttgttttttctatgaatgacaacaaagcaaattaaagggccaatagataaaactgctacaatcaggaaaaccgcaattaagtgattcatatccgaacaactcgcttctataagattaaaaccagacaatccaggaacggcagcactgccgaaacctgagtcttacttttccatcttcattgtctaccgtgcaggcttttttaaattcttggaaaatataacaactaggaaaacaagtataaacaaagcgaaaagtattcgtaatcctttaaaagtaaataattctccatcttcaaagagttgataaagattaataaactcaaacataaaaagtaaacccagcggcccaaaaaccgctcgcctttttcgtttcatttcactgtgcgcgaatccatcttgagatttaaccttatgatcatcactgagtgccacacttatccctccctacaggtataagcataacaaaggcggtcatcatttgatccaacaacatttaaacgtagggatttcggcatttaacgttcatttcagctataactacgccgacaaattcttttttcacctaatgtcttaattcttatagataacgccaagcaaaaagcccccgtacgcaatcgtcatcgaccttgtaaggaagcttctaaattgatttctaggctttcgctgttgcttttgctgcgtcccgaacactttctgctaccacttcagcaacatccccgtcaaacgcattagcaatgatattcgtggttgacaattcatcatccggaatcaagctggcaattcctttagccgcggcaatctgcatgtcaattgtaattttgcgtgccctagcatccagagcgccgcggaaaatgcctgggaaagcgagcacattgttgatctggtttgcaaaatcactgcgcccagttccgacaatatacgcaccagccgccaacgcttcatccgggaaaatctccggttccggattggccatggcgaaaataatcggtttgggcgccattgttttgatccacgccggattgagaatgtgcggcgccgataccccaataaagacgtccgcacctttcaaggcatcttctaacgtcccggtgcggttttcgcgattcgttatcttagcaatcgccgcatgatgtggtggcagttgatcagcgttcttttcagctaaaatgcccaccttatccaccactatgatgtgtttgaccccggctgccaagaatcgccgggcaacggatagccccgccgagccgccgccattaaccaccacgcgaatgtcttcaatctttttatccgctactttcaaggcattgtacaaagcggcgagcaccacaatcgcagtgccgtgttgatcatcatggaacacggggatattgagttcatcaatgagccgtgtttcgatttcaaaacaccgcggcgcactgatatcctcaagattgatcccgccaaatgttggtgcaatggctttaaccgcagcaatgattgcttcagtgtcttgcgtatccaacacaatcggcacggcatcaaccttagcaaaccgtttgaacaaagcggcttttccttccatcaccggcatcgcagcttcggcaccgatattgcctaaccctaaaaccgccgaaccgtcactgacaactgcaaccgtatttttcttagtggttaagtcataaacgagcgactgatccttggcaatagcagaagaaactgccccgacgcctggagtatacgcaatactcaaatcatcgcgcgtctcaattggtactttcggttccacactcaattttccgccatttatttttgcttgatctagcgcaagttgattaaaatccttctttgccatgtgaatcatcctccttaagtttcgaaactagtcgatttaaaagatcatccgcaaaatcgccgtcattgaaataaccgtaatcgcgccacccaagcgtgttgccacctgagcaaatggcatcaggttcatccgattcgccgtactgagaatagccacgtcgccagtaccgcccatcccgctctggcaagccgtcacaatagccgtttcaaccggattcatgttcaggaaccgcgctacgaagaaaccggtggaaaccacagtgagcaccacactgataacaatgataaaatattgccaactcaacatgccaacaacatcttttagcggaatgtatagtaaacccaatcccgccatcaacggaaacgtaaaattactggaaataaacttgtataactgtttggcgcctcgttgggtttcacccggaatgacattgacatatttcagaatcgccgcggcaacaatcatcaaaaccggccctggaaagccagtcacggattgcaacaacatccctaaaatgaacaaggtacatgccgtgaggacgcctgcacccatcatttttagatcaagcggtcccgtatcgtctttcaacgcgtctgccaagtcatcttctgccccattcagtcgaaccaactgtccctgccccgataactccggacgcttctctcccaaccgattcaataaacctgaacacataatggcaaagaagttaccgataatcgttgccggaattaactgagccacaagcgcgccgctggtcgtccctgtgatcgtgctgtatcctagagacagcggcaagatgccttccccgatgccgccagccaaaaccggcgtcacaatgaagaacaacgtatgcttccactccagacccaataacacgccaaccaaagtgcccacacccatcgccagaatcatgccaagcatcatgggaataatcatccgcatcaacccttgaatcaggatcttgcggttcatccccaaaatgctcccacagactagacatgcaatatagaaataaagaaagtttgcttgcttcatcaacatgtcagttgcttttaacacgttcggattcagggcgttataaaacacaaggatcgatgggactaacaacgacagtatggctggcccgccgaaattcttaaccaccggaatgttggcaccaattgtccctaacaaccagcccatcgtcagaatcactgcaaagccaccaagcatattgaccggcagctgctgcatcgcgccggcaaggatgatcaccatggccatcaccagataaactggcaacggcacggaaccaatcctgatcgccatccacttactttgtgaactctccggtgcgctaggtgttcccgttttactcgccattttcttttccccccttaggactcttactatccgcagcataatgtaagcgctttaaagagtgaagattatttaacttttttaagcatcaaagcatttatttaagccattattgagtgattcacaaacaataacttctgacggaggaaggtgaaaggcttgaaaataaaaggatggcgcctctggagttggctgtcactcatcttcacctcaactttattagtgacggttttcacagtctatggcttcaccttattggaaaatcgccagcagttcgagacgcgtgaaagtcaacttttactgtcagtcggccgccaattggctcaagaaccacgtgtcatttctgcgcttaaggccaataaggctgatccggcaacgcgcgcttacgccaattctgttgccaaaaacttcaaactcgactttgttgtcatcatgaacatgcaagcgattcgcctcacccatcctgatccaaagcagattaaccgccattttcgaggtggggatgaggttcgcgccttgcagggacacgcctatgtttccgtgcaacgcggaaccctagggcgctccttacgtgggtttgttcctgtgtaccaaaaccacaaacaaattggggtagtggcactcggcattaaagtcacggccttacaaatgctcattcataactcccaaaacggctttcgcttggcattactagtcggcatcgttatgggcatcctcatcgcctttttggtggcttattacattaagcggcaactacacgatcttgagcctaaagaaattgctcggttgcttgaggaacgtaatgccatgctggaagaaaccaaagatccggtaattgttgtggatctcaaccagacgattgtgctagttaatagagctgccagcaaactgcagcgccacctcattcatgaacaagcatttattggccggccgttaaccactttaattgcccatccggaacgcattaagctgacggtcaagaccgagcagttttatcagcaagatggtcaggattatttgttctcagccgcaccaattatcgtgaagaagcaaaaaatcggttacgttatctttttacgcaacgccactgaggctattttcgttgccgatcagctggcgaacaccacagcttatgccaacgcactgcaaagccaatcccatgagtttatgaacaagctgcatgttatttacggattggtttcgatcaaacagtacgatgaattggcgatttatttacaagaccttttgaaaccggaacaagaatttgctaatcgcctcgcattgttagtaaaaaatccgctcgtagctgggttcatgattggcgaacgcgagaaatttgcggaacgtaaaacaacgctcaactttgaaatcgtgccagaactgcctgccaatcccaatgttagcgaaactaaatcacttttaaccctcagccgttatctgcactttggtcttttacagcaagatttgcctgcgaccattctgattcagctcgattatgctcaggaccaactgaccatcacctatcatctagcacaaccgcttagccgtaacgcgttgttgtcagtgattcatcaagattacttccaacaattactttctgatttgcatggcacagccaccctaagtccagccgaaccacttgtgttgactttggtggtggactaccacgaggaggcaaaaaatgaccaacattctcatcgttgaagacgatcccatggtgcaatttattcatcgcaactatctggaaaagcttggtacttttgagacgatttactcgtcggagaccattgccgaggccaaaaaactgctggcaagccgttcgattcaactcattcttctggatattcgcctgaaagatggtaatgggatcgactttttaaccgaactacgccgcaccaagcaaatggttgatgttattttaatcaccgcagccaatgaagtcgaaatcgtaaatgacgccttacatctgggtgtcattgattaccttatcaaacctttcacgatggaacgcttcgaaaaaagcatccagcgttttaaaacgaaaaatcaagcgctggtcagtcagcaattgaatcaaagtcaactcgatgcttatttagaaccacacacgcacgcttcttccattcgcgacttggataaaggtctaagcaaagcaactttgaaaatgattcaagccgcaattcaacaattgccatcatcttttacggtcgcacaattaaccgctgaaactggcttatcgcacgtctcggttcgaaagtatctaaactttttggaggatcatcgctttctgaaaagtgatacgatttaccgcaagaccggccgtccattcaagacttatcaggtgatagcgccattgccgatgcggtcgtaaattaatccggaaatcttcagtacggctaattggaggttagcgcagtgcctttctataacgtggccacataaaaaacgttaacgtcaatcaaactaactagttgatcgcgttaacgcttttgatattggccgaggtgcttcttgacttatttttggccactgacgatgcttgctgacttactgattagtgacccgtgaccatgttagtgaagacccgtgatgtgatgaccggatcgtccttagtcttctgtgattgtgccgatgcccgccaatgataacgatctaacggttgcacctgaatctggtgcgtttgtggatgcttcttctgcatccctttcaacgtgcgataccagctatgttcacctgttttcagatcgattaatgcatagcctttaccatttatgccagactttcgaaaatcatagttatgatcttcttttgacttcacaaccaacattcggcgattccagcccgctgcctgcacatgataaagcagcgtgttggcatcagtggtcgtttggcgtttttgtgggatccgttcgattagaaaaggcccaacgccggattttgtgatttcaaaatgccgaggcagtttgattgaaaagccctctgcatcggccccaggatcacgcttattctttggaccataaaggctcatcgcaatcgagctgactgtcaacaaaacacttaatccaatcatcgctgatattgccaccaaattcctctttttcaagtgtttcctcccgtttgatctagctaagtcgtacaatcaagatatgttgatttcagtataatatctcttttcagtgatccaccgctatcagtttgaaagttatagaaatttcaggattttccaaaaatgatttcatggcagtttcacgtgaaacacactcaccgtgaaagtactagatcgatatcaaggaagtatttatacgagggagttttatagatgataaagattgttttactcgatggctatgcattgaaccgcgatttagattggagtgctttaaagaagctcggggaatgtcatttttacgatcgcacaccggtcaacgatacgcagaaaatcctagctagaattggtgatgcagagatcgttttaacgcacaagacacctttgactaaagcgattattggcaaggcgcccaatcttagatatattggtgtcatgggagacggttatgatgtgattgatgttgaggcagcaagtgccagaggaattcctgtgaccaatgtccctatctacgcaaccgatgccgtcgctcaattcacttttgccctcatcctagagataaccagtcatgtcgggcttcacaatcgacttgttcatgaaggccgttgggaagcgagtcccgactttactttctgggcaaaaaagctgaccttattagcggggaaaacccttggattagttggctatggccgaatcgctcaaaaagtagcttccattgcccatgcattttcaatgaaggtagttttctatgatcggcggcccaaaacgcatgacaatcaaatgagccagcaagttagtctaaaggaattactcactaccgctgatatcattagtttgcacgtccggcaagcaccggaaacccttaatctgattcgacgtgaaacaattgaacaaatgcgtccaggggtgatcatcattaacaccgcccgcggtaaactcatcaatgaaaatgaccttgcattggcattaaaccagggaaaaattgctgctgccggactggacgtctcacaacaggaacccattcaaccggacaatcccctcttaaccgctaaaaattgttatataacaccacatatcgcttgggctccctatgaaaccagagagaaattattggcactcacgattgctaatctaacggcctttctcaaaggcacaccgcaaaatgtcgtcaacgtgcaagcatttcactaaaagcgaagaacaccctttacagtgatgacaagtaaagtttgggatcagttgttttaaatctcggtatgcagaaacactctcctgagcactaagctatagtgaagctggcaaggctattgacattaataaatgcactcaaaccttcaattttttcgaatgacactttaaaatgataggagagaaaacctttgcttaatacgaaggctctaaaactgtacttgttttcttcagctatgggtgtattcatgtggttaaggcattcattaccgttccaatctattggggtcgcagtttctctgaatttaggttacattttctttctattcggtggcatatttcaaaaacccgagttagtcgcggccagttccttcctcatcatctatggaaatttggggtttgttaagcaagtaaatggcgatacaggttattccttctcaaaagttgcctctcttttaatcatcattctttgccttataacgttttatctgctgaaaacaaacactttgtcgttccttatacccttggtgtcactaataataaatggagctttagtcagtataaaaacccacgatcagaattgatgagctctcttaagccgaacggtcaaaatgaaatggccggggctttttatttttttgatttagaaaaagggttcttttacacctgtttgaacataaaccgtttgcaagtgcggaactggtcaacgtcacgatcaggaacttttataccaaggattcactttaagcattgatacaaccaaaaaagagaccccctttgcgtgaaagagttgtcccttttgcgatatatcatgattattccgaagcttttggcagcgccgtcttcttgttagtaatatcgataaatttcgcttcgccgtcaactgaatcaaccgctttttgcaagcgtttcatggccgccgtggcgattggcaagtcgacaaattccttggtcgcgttgtctaattcgacttcatcagcaaccgagtctttgagtggccgcggattgctttcgtctagcgcccggagtacgactggcttaagtggtcccatctgtaacaattcgagcgtggtttcatagtcaatgccgtatgcatcagctaaatccaaggtttcgcgaataccggcttcggctgccataatcgcaacattggtgatcaactttagcttagcgccgttgccttggtcaccaacatacctgatcttgccaaaggtctccaaaaccggcgcaactgtctctaccacttgcttgtcaccagctgcaatcagcaccagactggcttcacgagcatatttcaccccgccgatcatcggcacatctagcaaagtcgcatgtgctggcatggcactttgaatcgcggtgatttttcgaggatccaatgttgaagtgacaatcagcgtgctgcccggctgtaaataattgacaattcccgggtcatctaccgtcccgatatgcaatgctggcacatcagctgacatgaccgacgtgataatgattttagaagcggtcaccgcatcttccagtgaggtcgccgcccgaacatggtccccagtcagtgccgtcattttagccggttctttgtcccaaatcacgacatcataaccagcctgggccaaatgcggcacgatctgactacccatatcgccaacaccgataaatgttattttcatggctgttttcctttcaatttaaggctaagctcccaacaaaattattaaagggttgtaataacttccagcaataaaaagataaaacatttgtgcataatcatcacgcaaccgggcgaatcattttccgctgtatcatcttcaaattagcatgattaaaagccgatttcaaaaacaaagctcacttgctggctttaattttgccaagacgcaaaaaacgctgcctcgcgccgattcgttatttttaaaatccacttatttggcgatccttattttttcgcaactaaagatcggcgtccgtatcagccagattactctggtgccttgcctgacacgcgcgtcagactcacggtcaaaacattgtccttggtcgtgttatagtcagccaaaattcctttcacaacaccttgcgaaggtccatgtgttcgggttgtttcttcataattttgaatccacgtactgaccgcattgaagccgaattcaaacccttcaaacacctgcatgtaaaccgatgagcgcggattggtcgcgatgatcgtaatcttcttgacgcggccattttcaatttgcatggtcaagttgatgagctcgtcagcaattaaagtcacggttccattttcagcagttcgcggtaatttataagccgccaagcgcatattagcgttatacacccgctgaacataagcataactccccaggtcttcgtgcatgattttcactgcccttcacttgtgtcagtcaacagctggcctacgcattctgatctgctgcgccccgttatttaatagtgtacaatttatctttaaaaaggagaagtaaacagctcggtagtcaatccttaaagaaaaagccgcctcttcactgagacgactctttcaagttctattttgttggcgtagttatgaaatccagcatacggaagatggctaagcggttagcctctggtggatcgacgcgcataatttctgcggccgtttgatgtaaagcgttatcgtctaaagcataagccgcatcgttaattgctatttcgcgaacatcatcagcttgcggttccagatgaaactgtaaaccaattacatgatcaccaagtaaatagccttggttttttaacaattcattactgaataacaacgtcgcttcatccggaacttgaaacatttcttcgtgccaatgcaaagccagcaacgaatctggtaaaccgggaatcatatgcgtttgtagatgtacaggcgcccaaccaacctctttagccggtgctttgctaacttgatagcccatcgtctttacgatttgttgcgcgccataacaagcaccaaagattggtttatgctggctcaacagtgtcttaataagacgacgctccgccttaatccaatcaatatcgtcatttgggctcatcggtcctcctaaaacaaccaacaaatctgtttcagaagcggttggtaatgtgccgtcaaattgataaggatggtaaacgtaaagctcatgtccgtaaaaatctgcccaagtcttaatagcccccggaccttcattgggagtgtgttgcaaaacgttaattcgcattttaaatcctttcacatctccggcaatgtttgatttgggtttcgcctgcaattacccaagatgctttatcttaacacttactcaggaaattttatatctcaaaaagcaagtgacgagttacgcttacatctttgcagccagtacggtaatcttttttccatcacacaagctactgtgattagcgattaatcgaccgcgccatccgctgaatcgtatgccgttccccacgaattgctttgctgacggcgtataaattattgaccggcgactcaaagccccaagcggaatcgccgacatgttgcatatcgacaccgcagattttgttgcgaattgccattgcctgcaacacccgactgccgctgccttcctgactagtaccgatcgcactcatgaccaagccgcctaactgatgaaccactttcacgacttcggttaaatcggcttcgtcaaatcccggcactgagccaactgctggcgccaaaatcacatcggctcctgcttcgataaagtctttggccgtttctgctgtcatgatccgttcatcaactccggaagcatgcattttacccgcaataatcaagccgctgaagtattgcttggccacggtaatgctatggataatcgcttcattagtgacccccgtgcccggattcccggttagaaccatgaactgaaaacccattgcttctgcttttttgatgacagcctcacttgcggtacagccgggtaaaatcgcaatctgttgttccatcatgttaggatgatcgccaatcggttcaagattaatccccactggccgcccaaccaatttcttcaatcggtcaatgctcgctttgccatcatgcttaggcgcagcagcaagatgccgttcacccggataaagaccgaaaattttcggatcattcacatccaaccggttacacaaaatcatatccgccccaaaagcagccgcaatttctgccgtcgtaatgctatccagattctcttgcgtcacgatattttcactcacaattattcggccttcgctggctttgatgctttcttttaactgctgcccattaaactgcatgacttcactggtactggcactcaacaatcgtttcaccatgactgtaaacctccaaatttattaaaaagttagttcaacctttgatatcatcattatacttccgccgctgcttcgatttcgtcttcgtcaaacattgactcatcgacactccagaagaaaaatccagtagtgtcaccgactaaatgcaaaaatgtttattcacttcagcaacaaaaaaaatcacgacccgcaagcatattttatacttacaaatcgtgatttttttatctattctgggtggtcaggggatcgaaccctggacccacggattaagagtccgttgctctgccagctgagctaaccacccatttatttatgtctgtcgcgcttcacgacttaaatataatatcatgtaccccttactggcgcaagtgttttgcgaacttttttgcgaaaaatcgttcaatttggtattttgacgccttcgacagacttttctatggcgtattgccgacttgctttgagccatgctgacatgcaaaaagacggccgcggccgccttttaaaagttgttagaataaaacgtgaatggactgattgctgttgatcaacttgatggccttgcctagcatcgggccaacagaaatttgatcgagtccttcgaattgatgcttgggatcgagttgaatcgtgtcagtgatgacaaccttcttcaatcctagatgtttgatccgatcaacggccccgcgtgaaaagacgccgtgagtagcagctgcataaacatctagtgcaccagctgcacttaaggctttgtaggagtcaacgattcgatcacctgtatcaatcaggtcatcaatcacaatggcgtgcatcccttcaacgttaccgatcacgccgatgtgttcctgatcacgtttgtcgacaatcgcaattggcgtatgtaattcttctgccaatgcccgcgcctgtttggttccgctatgatcaggggcgatgacgaccacattatcgccaagattcagctttctgaagtagtcgccgattaaccggtgggctttcagatggtcaactggaatgtcaaagaatccctgaatctggtcggcatgcagttcaaccgccacaatccgatcgactccatccatttccaacatattggcgaccagttttgcagtaatcggttcgcgtgatcgtgctttgcggtcagcacgcgcatagccatagtatgaaatgaccacgttaatatggtgtgcacttgcgcggcgcaatgcatccaccatgatcatgagctccatgaagttttcattcactggatcagagaccgattggatgacataaacatcagcaccacgaacactttccggcagctcgatttgaacttctccatcggcaaaatgattcactcgagcgggcgataacggtaaacccacttcggccgcaatcttttccgcgagtggtcgattgccattgagactgaataattttaattcgtgcatcgatttctccctttttcacatttaacggtttgcaatgttattatacgagataaatcgagaaattgcgactggttatgcaatgagttaaagtaataacagaatatttgcagattcataagcaaggcttcggcaatcgtccgctttagcatttgccatgctttgatccaactgcaagactaggaaatgggaggctctttatcatgaaacaaagccatttgatcggccttgcaaccccactgttgttgtcagcgggcactttagcaactgctgagcgtttttaccaatatgcatttcggcgaatcaattacattcctgatgcccgtagctccatgcaaaaatacgcctcatcatattaccgtcatgtccactgggttgaaagtcagcggcatattgaagcctggcatatgacagctccggataatcagcggcttgaagcactttggctgccgcatcccggtagtcaaaaagcggtgattatcggtcatggttataagggcaccgggattaccatgagtaactttgcccacatgttttacgacttgggcttcaatgtgttgttgcctgacgatcgtggccatggtgaatctgatggcgagtacatcagttttggctggttggatcggcttgattaccttggctggctgcaacgcattcttgaccggcttggcaacgatgcccagttattgctgtttggcacgagcatgggtggcgccacggtttcattggtcgcaggcgagccgagtttgccgaaacaggtcaaggccgtaattgaagattgcgggtacacggatgttgaaacggaactggcttatcttttaaagaagcaattccaccttccaccgttgccactggtaccattagccagcttcatcaattatcggcgcttaggttatcctctccgcgtggtcaacgtccgtcaggctttaacgcgaaaccgcctgccattactagtcatccacggcgctgaagatgtttatgtgccaaccaaaatgggccgcgaaaattacgctgcctccgctggtcccaaagcgctctggattgtcccgggtgcggcccacgccgaaagttactggattaaccccgcggcctatcaagcgcacgtgaagcgatttttggatattttcttttagcgctagcagtcccaataatagccatcatgtggtagctaagtttcgttgccgtttcctccgcgtagccttcaaactgcgcggtttttttaatctaaaaagactcagatcgcctctgagtctttttagatcgccggatgagtggctgctatgactgccacttccgcagactattcaaattcgttttcttcagcttgatcttgctgcttgcttaacgcatcaaacgtccgcagcatctccaagttcgtctcaatactttccggccattcccaatgttgaacattaaacacatgcttaaggtgcggccccgcacttgccggccatagcttcgttgtataggtgacgtgattagcatcgaacaccttcaacaaggcttggctttgcaagtaaaagctgtcattttgcccgccaatcagcataaacggcggcaggtccaagcctttgacaacctgcgagaaattcaggtgatcggccagtgcctgatcgccgccgcttaacttgtccagataaaacgcggccatatcgctcatgtcaccggctgcttcgggaagcttacttggttcggcgactggacaaaccagcgccaccagggtgaagttgaaattaacccgactcacaccaaagagttcctgtaactccgcactctgctggatgcaggcaaccaaggacgccaggtggccgccagctgaatccccggtcaaaagcacatggtcaaggtcaaatccgcgttgagggccaaaatgcgataaccagcgcagactagcaaagatgtcttgaatctggccgcgtaaatcaacatccggtaacaaccgatagcccatacccatcactgcgtatccttgactagccaaatagcggcaataattacgattcaaattacgatcaccataaaaccacccgccaccatgaatatcgatgacggtcggcatggttgcgttgcgtcttttggccggatagtacaggttcagggtttgctgcggatcagccgactgttcgtaccgatattccgtctcccaatgaacatcttccggtacccgttcatccgcgtaccgtgccttatcccgagcagccgtttgcgcccagctcgcttgaacttttgccaacattgcctcttcatctgccattaacgaatgcctccatttcctcgtgttaaaaggttattcctatattaacgcaaaaagactgccggtgcgtcacccgacagtctaatcgtttgattttaagcccgttttttaacgatccttggatttaacacttgcttcaacttcatcaatcaaagcagcatcttttaacccggttacttctttaatgacgtctaccaatggctgatccttgagcatcgcctgaagtttaacggcttcggcatcattaggttcaacataatggaacatcatgccaaccgtatccatcaagacgctgtaatccaaaccgcgttccttcagttcccgaatcggtcggatgaagcgttcgttgtagccaagcttacgaattggcgtccgggcaactcgcgaaatatcatcggaaatatacgggttctggaaccgttgcaagacccgattttgataagtctcaagttccttttcatcaaagttcttgaattcagctaaaagcagcgagcgggtttcggcaagtgcacccttggcctgattgaagactttaggatccttgatggcttcaccgatcgtgctgtagcccaagtacttgccggtgtaagccgtggttgcgtggccagtgttgactgagaagagcttgcgttcaatgtatggttcgagatcaggcacataatcgacggtcttaagcttcagatcatggttcttcatctggctttcgtcaacaacccattctttgaagtcttcaacactaaccgctaatggatcatcatgtttttgctgcgggacaatgcgatcaaccgctgcattagggaagccaacgtacgtatcagcaaaggtcttgccggcgtcatcaagatgttcataaacgctcttcttcagcgactgtgatccgccaatcatgttctcacacgcaatcacatctaatggttggtggttgttagcggccgcgcgtgcttgcaaaccttgagcaatcagcggcgcaatgatcgggagaatcttcgggccaatcgccgtcgtaaccaagtcggcttgggcaatagctttcacaactgcctcaggatccttggcgttattcaacccgtcaacattgtccacatgaattttcttttcacccggggcggccaaagtgatggtgtattccccgcgctgatttaacgcattgataatcgtctcgttaacatcgacaaaattgattttgaatccattagcggcaagcgtttcaccgataaagccgcgaccaatattacctgcaccaaaatgtactgcttccatcatgatttattcaacttccttcagtaaattgacgatttcttccggcgtttgtgcgtcggccagtttttgaacattttcaacatcgctacaataaagcgcaatttgtgagagtagtttgagatgctcgccgtttaatccggcaatgccgaacacaacggtgacgagattctcatcagccggatcatccgaccaatcaactccccacggatattgaacgaccgaaataccggtctttttaatatatttcatgccgtcttcagtgccatggggaatcgcaataaagttacccatatacactgaaacgtcacgattacgatcaatcattgaatcaatataacccggttcaacgttgccattgtcgaccaagagttggccggcctgacgaatggcttcttccctggtcttggcttcttgaccaagtttgatcgtctttacgtcaagtcctttcatcatgtcaccttcgatcaattttttgaatttcgtgcataaaaacttctgtcatcacttgatataactgactatagtggcctttttcaaaaagctgtatgtccgctggtgaggcaactagcttggcgctaactgcactcaggagggtcaatgtttcttgtggaacaggattcggcgtcagcaacaggagaatccgctgcagttggatcgtgcccatgtccattgccgctaaaggtatcgctgttttgagatcaaacgccccgatatatggggttgtgacaccgcgactactcgtgtgaatcattgctaaacctgtattcgggatgccaaccggcgctaactccaatctttttaacagtgcttctttgacaattggcggttcaacgacaacggtcggtaaccgagcaagcatcgcatcgatagcagcagcaatcgtggtgaccggctcattcaagtcgttgacggcaaagtgttgtagtaacccatctgctgccatcaccatggtttttaggctctcaaaggcggtaactgtttggtccagtgacggttgattcaacggccgcacttgtttaggtgtggcgcgctgaacaagccggcgcacttccgctatttcctcgcgtcccaatatcggagtaatcaccaagtactgatgcttaaaccccggcagcggcatggtagcaaggaccagatcgtaatgttcaagttgttgttccggtaaatcactcacctgaacaatcttaatcttacggatttccggtacctgcacacgcaactttccagcaatcaagctgccggttccgggtccatcactagtaaccaatagcaccgcaacgggcttttctgctggcgcgtgatccaaaaccgaagcgaagtataaaaccagataggcaagcgcgtcgccagtgaaggctccttggccgaaaacatggtcagccgccttttgaaccgcttggtaaagttcagaataatcatcttgcaaatgagcaagtacgggattggtcattgtgacaccagacagccaatcccctccagccgttcgttggacatgagccagtaatgaggaataaagctgtgggttcccggaaaatttcccgggaaatgatcgggctacttcccgaataagatcctgaacttcaaggttgatggttaaatcaaattgatcaaccggttcgcctgccaacccgccgcgaatattactcagttcgatggcaaggaattgataatcaccgacacgtactttttcgcggattgtcgaatccatctcggctaggaattgtagcgccagttgttgatcctgaaacagtcgttcctgatcaaaatgctgctgcggtttaacgtgatggtcctcacgcaatcttcgtgtattaattgcaaccgttagtagcactgctttacgttgattgtcatttagatccgctaaagctttaatctgagacagtgcggtgttagcagcaagtaattcttcttgcggtaaccgttcaatgaaatagttcgccaccggatcaaagtcttgctgcggatcgtttaggaagcgaaagaacacatacggattaatttcagcattcaagacgccgaccagaacccggcgaatatcaccttcttgtccttcgatccagataccagctgctttttgccgattcagcttaagatgatattcatttaacgccggttcgagaatatccagatcttgcttaatcgtcgtaatgctgacatctaccgcatcagctaaggctgtcatcgtcaaagtttcatccgttgtcagcaacatcagtgttagcgcactctgccgctgactgggatcaaaggtgagatcttgccgttgatgtgacaaggctgcagatagactggctaaatcagcagctgctcccacaatccggtacgagctgccattgcctttgtccaatttcaaattcaccgttgcgatatcatgttccagttgcgaaagctcacggtaaatggtccggcggctgacacccagctgtcgctccagctcgtcgcggcttatgccggcgggctggctcatcatcagtctgatcatttcctgttcacgattcgttagtaacatgtttttcgccccagacggccgcaactcgacctcgcttatttcaatttctcaataagtttatcatagttcgtcgcgttcaaaagaccatccacggtatagacttgaacattggcaaattgtaatttaacacgccgggcagtttctttcgatgcgatgattaagacatgatccttatcatcaatctcaccgatcgcaacattacgaaccttgacgtctttgttgagttttcgcaactcagagcggaatgtcgcttgtgccatagttgccgagccgatattttgatcgtgatgcaggaagtctacttctgtaatcttatcgaagtcgatatcgttaagctcgtcttctggcgtttcctgcttagcttttggcgtttctttagttgcggtttcatctgtcccgccaactgcttcagccttcaaactagcaatgatctcatcatacttaggactattcaagaagttctcaacagcgacgtgtgctgcatcaggcgtttgtttcttagcccgatcagccaattcttcttgcgtcacaactaagagtcccggcttatcctgcaagttgctaatggccgtgttggtaaccgacagatccaaaccagccttcttgactttatcacgaagaatcgaagcacccatggcactggagcccatgccggcatcgcaagcaaagataatttgcttaatgcctttagcctggctcatgacatctttagcagcagccacatcctgacctttagcttcagctttcatcgacttcatcttcgcttcactggctgccaactcatcgccagtacccttatcgcggcgcaagatgaatgccgaaatcaggaaggaaacggcagtggcaccagtaaccccaacgattaagccgatatagtttccgatattaaccggtgacatcgcgagcaacgataggatggagccgggagatggcgaactctttaagccaacattgaagattgagaacaaggtcgtcccagtcacaccaccagccataactgacaggaacaatgccggtttcattagaacatatgggaagtaaatttcgtgaatcccacctaagaaatgaatgatgatggctgaaggtgcagaacctttggccgcacccttaccgaataaggcaaatgcaagcaggacaccaagccccggacccggatcaggttcaagcaggaacaggatggacttaccatgttcagctgctgcctgaatcccaagcggtgttaagatcccttgattgatcgcattatttagaaacaggatcttagctggttcaatgaaaatatttgctaaccataacagaccatgattgataatccaatcaacgccggctgccattgcgttagtcaagccggaaatgatcggtcccattaagaagaagccaacaattgctaatagcatcccgataatgccggcactgaagttattgaccagcatttcaaaaccttggcgaatcttgtcttggacccgatcgtcccatttcttaatacaccagccgcctagtgggcccatcaccattgccccaatgaacattgggacattggttccgacaataacccccattgcagcaatggcgccaacaacgccgccacggtgacctgctaccattgaaccgccggaaaaagcgatgagcaatggtaataggtaagtgaccattggcgtgatcatttttgctagttgcgcatttggcagccagccacctttaaggaagatggcagtaatgaggccccaagcaataaaggcgccgatgttaggtaacaccatgccggaaagcttggtcccgaatgattgcataccggccttcagattgaatttcttcttctctgttgccggcgtgtttgctgatttagcttccaaagcaaacactctcctttcccttgtttacgaagattattgtaaccgctttatgtaatcgctgacaaaagctactttggcacagttagttgtgccaaatattcagcatcaatcgcgtcagcactatttgtgggtcaaaatcatacgtgtcagatagtaacagtgttcgttatctgtttcacaagttatctaaatctagacgctgttgctcgccttcaattaagccctgtggattgctttttgaaaaagaaaaatcagtttcttctatctaagtcaggaacatctcagtgctatttcaactgccagcgttaatcataaagccgcgctcattcgtgatctggtttacaatgcgatggcgatttagccacagcgccggatttttaaaagaatgcaaattaggtatagaccattgttgacagcggcattttatggtgttatattggactagaccagataagggggatatcaatcatggatgttaaagtttttgataatgatacagaagcaggaaaatacgcatttgaattgattaagcaaggcatggacaacggtgccaaggtgcttggcttggctactggcagcacaccggtcaccatgtatcaggcaatggtaaacagtgacgttgatttcagtaacatgacctcggttaacttggatgaatacgtgggtatgtcaccggacaatgatcaaagttaccattacttcatgaagagccatctttttgacaagaaaccgtttaaggaaaccttcgtgccaaacggtcttgccaaggatccagaagaagaaaccaagcgttataacaaagtgattgccgatcacccaattgacattcaagtcttgggtattggccgcaatggtcacattggcttcaacgaaccaggctcaccatttgatgccgaaacccggaaggtacctttaacccaaagcaccattgacgccaacgcccgcttctttgaaaacgaaaacgacgtaccacgctatgcttactccatgggcattggttccattatgaagagcaaaaagatcttgcttttggcatttggcgaaaataaggccgatgccgtgcaaaagatgatcgaaggccctgttaccaacgacgtgccagcatctattttgcaaaagcatccagatgttgtcgttatcttggacaaggctgccgcaagtaagttaagccacaaataatcagccattcagcaccatttaatggcgtgagcggccacattagtttgcgcaggtgaacattaaaaattcgaccctggagaattttatctggggtcgaattttgtttctgcttctttaataggaagttgctgattctcaacgtcctaaatcaccgcgctgaattgtctgtctgcgcggcttttgtgtaagcggtttgtttgtttacccgccacggctcacacctaggcagatccatggtagaatgaggccatcatcttaatttatatatggaggaaactatgtacaaagctgttgtcttttttgatttagacaaaaccctgctgaatgatgaaaaacaggtcccgccggaaaatgttgctgcactaaaagcgctcgaagccaaccatgtcttgcctgtcattgctactggccgcaactactacgaactcgatgacatcatggccgttaccggtgttcgaagcgccattgcagcaaatggtggtgatattttcctggaaggcgagcatattttccaaagcgtgatcggtgagccgcaactgacacggtttcttaatgctagtgctgcccgcaatattcaggtcgcgatgtatacaagtgaccaatcagccttaacgggacacaatgagttgaccactgataattacgctcaggtgcggcaaaccccgccgccgattaagcccgatttttacaaacatgaagccgtctgcatgctactaatgtttgtaccttggaccgatgccggcgatcaagtcggacaacaattcattaaggattttccggaaatgaccttctaccgtaactcacattacacctttgatgtcgttaatcgcggcatttctaaaggtactggcatgaacatcttgctgaatcaacccgcattgcgcgatattcctacctacgcattcggtgacgggtataacgacattccccttttgcaggcagccgataccgggatcgcgatgggtaatgcttatcctaaagttgctgccgttgctgactatcaaaccgatgactaccgtagtcatggcattcccaatgcactcgcgcatttcaacttgatttaattcggttttaacctcatcggccacatgcggtgaggttttttggttcttctcagccatcatttaaccaaatttcaggttgactattcgaacaaatgttcccataataaaaactggtattcagtcgtgaaaatatttttatttttgacggcagatcattgatatatcaacatttctgcaacttcctataacgtgttcacggggtaaagtcaagaccgcaactgcgcgatttttctgctatactcaaagcatgttgcacgttatttgggcgtggtcgtatcaccgatcagtaacgctgcaacatcgataaatctgctgatggaggggtctcgttatgttagaacaatcgacaatgcatcctgtggtttggatcaatcaacatacttatatcagtatcgttaagaatgcggactacaatttagaagtttgggagattaccgccgaaaatcggcagcatcggatggctcggatgaactacaaatatcatcgcgataatttcgccgggtttatctatcggctctttccgcagatcgatctcattcaaattcacaatattcaaaagaagcttaatccctattttgatttagaagtttagaggtgttcacatggatagtctggttttgcaactgttaatcatggtcgtagtcgccttggtcatgacgttaacgattattattgcggaatggcgcactaagacgttcaaaacatggcagattagcgttcaatccgtggttgcggtgttgttattagccatcggtatcagtttgctgacggttcgctgatttagaaaacctgattgcgatgctgccaagtatggcattacgatctgcttggtatctatcgaatgtcacaacgcccagtgatattttgacaacctagccaagctaccgactgccactgaaaagcacgctaagaaagaaaccagcattaataagctatgtacatcctgctaagctaatcggctttcgagaagacgtatcttgtcactcgaaggtcgattttcatattcatgccctatttaggtgcttactttaaaaaatagtcgttatttgcggtaacatttaaacttctatgataaaattaagcaaaaatcacagagggggcgtttgtatgcatcatttggaaatccctgcttcgatcgcacaacagttggttgatggtttaatgggcggctataaggattaccttgctgagcgtaagcagaaacagcagtctttgactattagcggtgcgtttgcctggacccggagcaatttcatcgactctaagattagcgaactagtcagtaaggaaccttcaattagtagtcaacccgataaggccggatacgcttgggaatacattcaatttatccacgaacaaagcaatcatcgctcattgatcattgttaaaaatgcgcggcagctaaagcgtcgattcaataatacgaatacgactgtagacaaaaataattatctttatcaattagccggcatcaataatgagttgagtgcagccggcttactaagcagtcggcaaactaatggcgtcattcagctggaactagctttgcctgataccaacaatgctgttgtaagtctcatgaatcaaacagctcaaaaatcatcaccgttctcaaaattctacattgtgacttacgcggtagataacgacagcaaaatgatcaagcatattgaactaacgatgccgaatcaaaccgaaatgactttgaaacccattcaagacttaacccctttaatcaaacacagtccattccagatcagccttgaggaagttgagccgattcagtctgatcaggtgcccgacgcagcatatgaacaaaacaccctgtttggctacgaaattaatgctgatccggaaacagaaatggaggcagacgctgaatagcggcaattaatatgtttattggttcaaaactccaggccctacgagaattaaacggctatacacgtaaagaattaagtgatgtcattggcgtcacccagcaggctgtctggcaatacgaaaacgacaatgtcatgccgaaaatagaaattctaaacacatttcaaaaaatttttaacgtcgaaatgctctttttaataagcggaagcgccccgaaacacgttgtccatgaagaaaaaatagccttcagaacatctgaccattcaagtcgcaaaaagactaaattagaagcacgctacttagactttgccgatgacctgacaagttattttgaacagttcgtccgcaccagccccaccggatttgatcagcttcaaaaactggtccatcagttggtactaaatcagcatgagccttcaccgattcgcaaagtggcaaaagtagcacgaaattttttaaaacttcaggataatcatgacttaatggccaagcttgaacaaataggcatttatattgttgaaaaagatctcggtagtgatattgatgcctattcaacgattgctgacagcggccgtgcctggattgtattgggttccatcaagaaatcagcagttcggcgtaattttgatcttgcccacgaattaggtcatttactgctccacaagacgcttgatttcgatgaattaaccccctccgaatataagcaaattgagcacgaagcccacacatttgctgctgaattacttctgccacttgaagactttacacatgatttcaaggcgctgtatcgccgttcaaatcctgattactaccttgacttaaaacgtaaatatcaggtttcaattgttgctatggcaatgcacgcctatgatcttgggctgatgagttatcaagaacagcgctatttctttgggcaacgcaataaaaaaggataccgattaatggaacctctagatgatcagttgatccccgtacgccccggcaaattgcgtgctttgatcacactgttgtttaatcagcacatactaacgctcaatgatctttatcaaagactacatgtccgacctacatttgttacccgcctttttgctctggatagtaacttttttgagaaatatcagccacagcatcagtatgtgaatcaccataatattattgcgttcccgcagtctttcaatagaaattcaagcatttaatctgctatgtttgggttattgtcatcatccctaaccaattaaaaacgagtgagtctctggagaataaaaaacggagattcactcgtttttggtttcacgtggaactttttcaaaaaatcttaacatccggtttttggtgaaatctgttatttcaaccatcaacttgacgccaagactcaattggcatagtcgaactggtgacagtgtttgcccctgtatattcttatgattttataaacgtttttatcatcacgagctagtttcttaatcaaccaaacatcatgaacttcacaaagtttatggttggacgttaaccaattcaatccgtatactgacaccaacagcacggtgacgaaatacgttttcacggaggcagcatgatgaaaaacagacagaacaagcataaaggcatctcacaacgactggtcattatcggaatcggcgttttggcagtcatcgttgttacgattatctttttcgtaactcagcagaagcaaacaaaaccgacaactgcgccggctaccctcacgacttatcaggtcaaacgccatgagttgcggttatccggccaggtacaagctgtccgttcgcaaaagatcgatattccagaaggcaccgtccaaaatctcaccgtcaaaaacggggacacggtcgcggaaggccaacagttattgacggtctatcatcccgatgtccagcaaaagattgccactgccacgcaatcactcgcaaaacagcaacgcagccaaaagcaattggatgaccaaattaaccaactgaaaacatcgctgaatcaactggctgcagacgatccacaaaaatccgagattcagtcacaacttacggaagcccaaaacaatcgccaggatgcagctgcaagtgttgaccaagccacacaggagctgaatcaattgcaacaggatctaaacaccgccgttaaagcgccttttgccggccgcttatatatcgactatcaatcaaatggcagtcaaagcatcacggaaacctcttcagacatggaggcagtcggcgaagtgtccgaatttgattacaatgatgtcaaagtgggacaaagcgcaaccgtccaggcactttcaacgaagacgaaacaaacaacggcgattgattttattagtagtgatcccgccaaatccagtaagccgaatctggctaaatatgaagtgacggccaaactggatcaaggcttcctcaatggtcagtctgtcagcatcatcttgccattaggcggcctcgagatccctaaaaccgctgtccgtcaaggtgctgtctataaagtcgtcaatggtcgtgctgtccggactaagatcacttataccaaaaaagacaacatgtatgaagttactgaaggtctcgacagcggcgatcgcatcctccaaagtccgaccaagtcaatcaaaaacggagcgaaggtgactgtcgatgattgaccttcaaaatgtcaataagagttacggccaaggtgataccgcttttcacgttctcaaggatattaatctgcacatcgaccaaggcgagtttgtcgcgatcatggggccttccggatccggaaagacaacgctgatcaacatcattggatttcttgatacggcatttgagggcaaatatctttttgaagacgaaaatgtcgccaacttcaatgccacaaccgcctcacatatgcgcaatcgtaatgtcggctttgtttttcaaaacttcagtctgatccataatctgaatatatttgaaaatgtcctcattcctctaagttatggtggtaagcgccgatcagaagttaaaggacgaatcgccgagctgctcgattcggttggccttccgggagtcgaagataagctgccgcgcaatttatccggtggccagcagcaacgtgtggccattgcccgcgcgctggcgaattcgccgcaatttctgattgccgatgaaccgaccggcgctttagacagccatacttcagaagatattatgcaacttttcaaaaaactgcaccgacaaggcggtacgatcattatggtcacccatgatgaacatgtggcgctggaaagtgaccgtatgatcaaggtcctggatggccagatcatcagtgacacggaggtggcccatgcgactaactgagctgattcgaatttcttttcgcgcattggcagctaacaagcggcgcagtttcctgaccatgctggggattatcatcggtattgcctcagtggtgaccatcctgtcgttaggtaacggcatcaaagccgcgaccgtcaaaaacctgcaagcagatacacagggacaacaaaccgccgaaatcacctttaatcccaacagcagcggtgacgccgatgcgggctttaaggaaagcgatgtcgcccttgccaagcaaaccgcaccggataaaatccaaaaagtcgtcatcaaacatgaaaaagaacgtctgcaagtcatggggcaattagcaaatgccgacaccaccatgtcagtgactttagtgaataaaaccaaacccaacgtttcgcttatcgccggatccggttttaatcaggattccttacaagcagacggtcaggacgccttgatttccaagaatctggccaagaagattttccatggtaattctgccgccttacactcttcactaatcctaggcactaaaagttacaatatcgctggggttttcagcccacccaagtctaattattcggcattagacgtcgaagttctggttccggaaaaagcctatcgcgccggtcagctttcacaagaaggacgcaaacttgccatcacctacaaacgcggcagtgatgtcggccaactgaccaaaaatgtcgtgaagcagttaaagaaatccggcagtgaacatcgcagtggcagctatgaatacttcgattacggcgaactgcttaagggaatcggtaacgtcatcagcggcttaaccttgtttgtcagcgccattgccggaatttcccttttgattgccggtgtcggcgtcatgaacatgatgtacatctcggcctcagaacgttcgcaggaaatcgggatcagaatggcagtcggtgccacaccggccgaaattatgaaacagtttctgctagagtccgtcatgttaacactaaccggtggcatcatcggtctacttgtcggggccatggatgcgtggctcatcgccatgttcctacccttcaaaccggttgtcacggttggctcgattgtcggaacctttgcaatttccagcatcgtcgggatcgtcttcggcttgctaccggcaaaaagtgcggctaacaagaatttgattgatattttgaaatcgtagtgtttagatggccgctagaaacttaccaatatccgtccttgcgaatgtgcgactttggattgccactgcgcttcccgaatcttttcaaatggataaaccgtttggatatgcgctgttaacgttccatcggctaacatcatgagtaattgtcggtagccattaatccctatcgtgccattggtaaatcgaaatgtttggccggctttacgtaactgaaagtcaggcactgacaaggacaataatgcaaactggtcaaacatttcagcaagtaagtgcaacaattgcggttgccctacagtgtcaataatcttatttggaggcgtcacccgatgcagttgcgctgccaagtcatgttcataattcacaacgatatctgcgccaagagaagcgacaaagtcatgattgatcgtactagcaagtgcgatcacccgggcttgtcgttttttcaataactgaatcagatatgttcctacccctcctgaagcgcctgttactaaaactgtatctcccgcttcaaccgctgccgtctggactgctaacatcgcagcatcggcaccgccaataagcgtggctgccgcttgcaaagttgttgctgctggcacaggaaaaagaaacggtggcaatcgtgaatcaagatacgtttgattggcgccgcttggttgcacgccgatcacattttgtcctaccaaatgtcggtcgcgtaacagacccactgcctgaaccacgcccgcaaacgcatagcctacagtcaatggtagtttgaccggacgcatttgttttagcttgccttcttctgtcatccaatcatatggcaaaacaggtgtatacttcacttgaaccaaagcactcaatggtgaaactgcaggtttaggcttgtcgacaattttcaagccatcaataccactgtaattcgtttgaataatctgtttcattttaaggactccctcgtatattgatacgccaagtctagcgagtccgtcaggcaagatataataagaatactaatatttccgattcgtctattagtaagcacagatggttcgttcgctgcttgcaatatgcggctgtttgccaacacgtcaaaggaggacaacttgtgacaaccactatcggtagcatcctgaaacaaacccgcaaagctcaaaaactaacgcagaagactgttgctactgggatctgttcacaagccatgctttccgcaatcgaacatgacaagtacatccctaacgtagcgctgacactagctttatgccggcgccttggtctgagtcttgaaaccttaagtttggcggaaaattacgcgattagtcagaccgctgatttgaatgctaagttggatcgcttatgtaatgctcatgaatatgaggcgttattagctttcttgcaatcacccactacttcagcagccattgcaactgccgcgcaaaccgaagcttactattactacttgagtatcgctgaatatcaaacccatcatcaatcagcactgatgcatattcaactggctttagcacagcacagtgccggtacaccattgacagtgctagatcgcttaagttttgcgacaaaggccgttatagaagcgactgccggtcagaaaaaagcagccgaccgcgatttttcaaccgcctttgaagaacttgaaacaaccgcttatgcaccaaatctaaatagtttattctaccttcatgcatacactgcatataaagcaggcgactatcttgcatgtgccaaccaactgcaggcagggatcgattttgcaactgcacacggctctcattatatgttggccaacgattactacctacttgcatctgctgcacaaaagctcaagaatgctgacacgcaacgtgaagcaagtcagcgagcggcgatttttaaagagctttttggggatacgattttccacgacttctaaaatatcagcattcttatttttataaagtcccttctctgcttattctcaaagtatcaaaagaagggagctccatgatgatgaaaaacttatttaccaatgttatcgccgttcacgcaaatgcaaccgaggtcaaggctatgcttgccgatccaacgcaaatgcttaagtggattccggaaatcgatacagtcactgaagaccaaaatcaatttcagattattcgtcaaacaaccgcacttaatcagtccgaaatgatcactgtcacaacagccgctgacagtatcacttaccatagtactgaaggccgtcttgcctatgacttgacgtttacattcaccaccgctgacgatcaaacggttgtgacggaaaccttggctgtacctgaatcaactgatacccatctgccactaaaattacttgctccgattgccaaacacgcattttacgaaaatctaaccaactttgctaccttggtcgaacgcctagcctacgaaacaaaatgaaaactgcataacgaaaccgtcgcgcaaaagtcgcgacggtttttgctatcatgaccaagatagctcatggcagataacgatgtgggttataatcagaacacgtccaacctaaaggagatatccatggcgctttatctttttctcagcttattaattatcgtgttactgatcctgacattgctacagtatctcaacaccaatcgcatcgttgatcaacagctcacacagcacaaaatgatgtttcccaatcaaattcgcagggctcgcagtgtttacatgcgcggtatttttcgcgctaaccatcgacagcgcaacttacgcactactgccattgtctcggatatcctcgctgccatctgcttagtcaacgccgtcgttgttcactttcaacctgattcaacggttagcttgggaaattcgttacttcgcggtcaagcgctccatgtttcttcacagctcaatacaaccattcaaaacacttctttgttgatcggcatgttgctggcactggtgagtcgagtcgtttggttgtacctgtcacggtggcgttaccagaaactagttaaagcagacagcgaacacgccagcggccccactgaccttttctggacgcccgctgtgttacttcaaaatcagtatcatttacagctcggtattcaagcagtgctcatcgtcggtatcatctttcttgccttaaccggtctattcgactggcttccaacgccaaacaacgcaacatcacaaccacagtctcaatcggttcctgcatcccccagctcaagtcgtacctcggctccatcagtaaacaccgagtcaaatacaagcaatgcaagctccggttcaacaccgcaaaccacgcagccaacctacccgattgatgacatgaaaaaggcaccacttgccccggctgtcgcattggcaaacctgaccgatgccgaccgagctgccctacttttcacgatgtactggaccatgaacgggttgcaaacttatcaagtggctgaatatgccaacagtaccgatgaaacatacagctatcatctagtatctggcgccagtggacaattaatcgtcttttccgagacgattccgtctgtgaatcaatccgattatatgttctacgcctttattcagggtgaaaccgttaaactctacaacatgtatcagtccaagcaagctatcaccagtctcgccagccagtacaatcttactgtgacaggcacaaccattacgccaaacatgccggagattcaggatagtaacatcaatatgcggcaactcatcagtgctttcctaacagacccggcttttgccaaaatcaaatcagggttaacccaaggcgtagcggtaccactgtaagcttttgcgcctagtttttgccataacaaaagatcccaccacatgagtagaactcatcgtgataggatctttttaatcactacatttttaacaaaacggttaacggtgcgctttccgtttccggccagctaatccgaataagccgctcatcgttgccagcaacaatcccatgaggcttagtgtttgtgactgagtatcgcctgtttgtggaagtcgatgtttcgttccattatgcgtggagatctcggactgttgggtgccagtgcctgtattcggcaagtgatgatcaggcgttcccggcgttgtcccagtatccgttccggtatccggcaagtgatgacccggcgtatccggcgttgttccggtcccaggatcaggacttggcaaggcaacaatctcaaaaatagcctgctgcgtgttaacatttttcaacagattatttggcaacaacgccttgattcgttgcaggccagatgtgctgagagctaccgcatagcttcccggattaacaggagcttgaccgtctacaaagatcagatcgccggcttgaagctgaatttcagttccgtcacccaaaactaaccgataatagtcgtcattcaaagcgcctggctggccatcgtaagttttcttttgacgaccactgagcgttgcagatataggcgctggtgtaatggtgatggttccgctgaacgtttgatcagtaacctgataattaggaccaatcgctacggccaatttagccagcccgcttgctgtcaaatgatacgtgtacgtcccgacattgacgctgtcgttttcaactgcaatatctgtgttcgtcaaggcgatcttttgagacttttctggcagttggacagttatcgctaatccgcctgcttgacttgcacgagtgacaccgttgtattggaactgaccatgattaactgtggcattcaccgttagcggcgtaatcgtaatggtgccggtcaatcccgccaattcatcttgatctaactcgtagttcttgccaacagccttctgtaacttggcgataccggtttggctcaaccgataacgatacgtacctgctgctgtgccgtcatttgtcacaaggatatcttcccgagtcagttgtatcgttgttttggcctcggcttgcggcaggtaaaggcttgcctgtaatcccgcggcggcacttgctttagtatgaccatcataaacaaaagacgtgtcattaaccgtcaccgcaccggtaaccggtttgattgtaatcgtaccagtcaatcccgccaagactttggcatcaaattggtaattatcacctgatgcctgacgtaatttagcgattccgttagcatccaatttgtattggtactgacctacgcccacaccatcatcggttacaagaatgtctgtggcgttcagatgtaccgaaacaaccttagtaccaagtttgatgttggcagttaagtcgtgtgcctgactcgccttagtttgtccatcataactaaatgaaacatcattcagatcagctaatgccgtagctggcgtgatcgtgaccgtgccgccaagtttgattaagtcctcctttttaaattgataattatttcctgttgcctggcgtagctttgtcataccagcagcacttaacttatagccgtactggccagcattgaccccgtcattgacgacaacaatgtcagccgcggttagcgcaacggtttttgcgttttcgcctagtttgactgtggcctgaatgccctgagcttcactggccttggttttgccatcatattcgaacgaaacatcattgctatcaactgaggtggtagctggcgtgatcgtgatggttcccgtgactttagccagatcgtctaccgttagctggtagttatttccggttgctgctatcagcttagctttaccagcatcgctcagctgatagctgtacttgccagcatctacatcatcattctcaacaacaatatcagctgacatcagctcaaccgtttttttagtttcgcctagtgttaccgtggcttgaatacctttggcttcactggccttggtcttaccgtcatattcgaatgaaacgtcattgctatctgctgtggtaacggctggcgtgatcgtgatggttcccgtgactttagccagatcgtctgcagttagctgatagttatttccggttgctgctatcagcttagctttgccgctgtcgctcagactgtaagtgtatttgccaacggttgctccgtcattggcaacgataatgtcggctgatgttaagtcaacggtcttttcgctttcgcctggcttgactacggcttggatacctttagcttcactggccttggtcttgccatcatattcgaatgatacgtcattgctgtttgctgtggcaatggctggtgtgatcgttacggttcccgtgactttagccagatcgtctgccgttagctggtagttatttccagttgcggtttgcaacttagctttgccgctgctactcagactgtaagtgtatttgccaacggttactccgtcattagcaacgataatgtcggctgatgttaagtcaacggtcttttcgctttcgcctagtttaactgtagcttggatacctttagcttcactggccttggtcttgccatcatattcgaatgatacgtcattgctatcaactgtggtgatagctggcgtaatcgtgatggtccccacgactttagccagatcgtctgcagttagctggtagttatttccggttgcggcccgcaatttagttttaccagcatcacttagctgatagctgtactgaccagcgtttacgtcatcgttggcaacaataatgtcagctgacgtcaggtcaaccgttttttcagtttcgtctagtgctatcgtggcttgaatatctttggcttcactggctttcgtcttgccgtcatattcgaacgaaacgtcattgctgtctgctgtgacagcggctggcgtgatcgtgatggttcccgtgactttagctaaatcgtctgccgtaagctggtagttatttccggttgcggcttgtagcttagctttaccagcatcactcagctgatagctgtacttgcctgcacctacaccatcattcacaacaacaacatcagccgatgttagagcaacaacttgtccagactcacccagcataaccgtggcttgaataccttcagcttcactggccttggtcttgccattatattcaaatgaaacgtcattactatctgctgtggcaatggctggcgtgatcgtgatagttcccgtgacttcagccaagtcgtctgcggttagctgatgatcgctccctgcttccctctgtaacttagctttaccagcatcgctcagtcgataactgtacttgcctgcatctacgccatcctccgcaacaacaatgtcccccgaggtcaggtcaatattcttttcagtcccgtcaatggtcaaaatcgcttgaatgcctttagcttcactggctttcgtttttccatcgtactcaaagtgagcgtccttgcctgttgctattgctccagcaggggtgattgtaatgcttcctgaaaccttatccaaagcctctgtcgttaactgataattacttcctgttgccgcctgtaatttagatttgccgctgtcgctcagactataagtgtatttgccaacgattactccgtcattggcaacgataatgtcagctgacgataggtcaaccgttttttcaatttcgcctaatttgattgtggcttgaatacccttggcttcactggccttggtcttaccatcgtattcaaatgaaacgtcattgctatccgctgtagtggtagctggcgtgattgtgattgttccagcaaccttagccaaatcgtctgcagtcaactgatagttatttccagttgcggcttgcagcttagccttaccagcatcacttagctgatagctgtactgaccggcgtttacgtcatcgttggcaacaacaatgtcagctgacgtcaggtcaaccgttttttcagtttcgcctagtgctatcgtggcttgaatatctttggcttcactggctttcgtcttgccgtcatattcgaacgaaacgtcattgctgtctgctgtgacagcggctggcgtgatcgtgatggttcccatgactttagctaaatcgtctgccgtgagctggtagttatttccggttgcggcctgtagcttggccttaccagcatcaatcaactgataactgtatttgcctgcatctacaccatcattctcaacaacaatgtcagctgacgtcaggtcaactgttttttcagtctcgcctagtgttactgtggcttgaatacctttggcttcactggctttcgtcttgccgtcatattcgaacgaaacgtcattgctatctgctgtggcaacggctggcgtgatcgtgatagctcccgcgactttagccagatcttctgtagttagctgatagttatttccgattgcggcctgcaatttagctttaccagcatcactcaactgataactgtatttgcctgcatctacaccatcattctcaacaacaatatcatctgacgtcaggtcaaccgttttttcagtttcgcctagtttgactgtagcttgaatactcttagcctcactggccttggttttgccgttatattcaaatgaaacgtcattgccgtttgccgtggcaacggctggcgtgatcgtaatggttcccgtgactttagccagatcatctgccgttagctggtagttatttccggttgctgcctgtagcttagccttaccagcatcactcagattatagctgtactgacctgcatttacaccatcattcacaacaataatatcagccgatgttagagcaacaacttgttcagactcacccagcttaaccatggcttgaatacctgcagcttcactggcctttgtcttgccgtcatactcaaatgaaacgtcattgctggccgctgtggcaacggctggcgtgatcgtaatgattcccgtgactttagccagatcgtctgcagttagctgatggtcgttccctgctaccgactgtaacttagccttgccagtgtcactcagtttgtacccgtactgacctgcatctacaccatcatccgcaacaacaatgtcccccgaggtcaggtcaacggtcttttcagtcccgtcaatagtcaaaatcgcttgaatgcccttagcttcactggctttcgtttttccatcgtactcaaagtgagcgtccttgcctgttgctattgctccagcaggggtgattgtgatgcttcctgaaaccttatccaaaacctctgtcgttaactgatagttccctcctgttgccgcttgtaacttagctttaccgctgtcgctcagactgtaagtgtatttaccaacggttactccgtcattggcaacaacaatatcagccgatgtcaggccaacctttttttcagtttcacctagcgttaccgtggcttgaatacctttggcttcactggctttcgtcttgccgtcatattcgaatgaaacgtcattgctggccactgtggcaacggccggcgttatcgtgatggttcccgtgaccttagctagatcgtctgccgttagctggtagttatttccggttgctgactgtaacttggctttgccagtatcactcagctgataattgtactgacctgcatctacaccatcattctcaacaacaatgtcagctgacgtcaggtaaacggtcttttcgccttcgcctagtttgattatggcttgaattcctttggcttcactggccttggtcttaccatcgtattcgaatgaaacgtcattgctatcaactgtggtggtagctggcgtgatcgtgatagttccagcaaccttggccaaatcgtctgcagtcaactgataattatttccagttactgcttgtaacttggctttaccagcgtcactcagctgataactgtacttgcctgcatctacaccatcattcacaacaacaatatcagccgatgttagagcaacaacttgtccaaactcacccagcttaaccgtggcttgaatacctttagcttcactggcttttgtcttaccatcgtactcaaacgaaacgtcattgctatctgctgtggcaacggctggcgtaatcgtaatgttacccgctaagtcagtcgtgcttaactgatagttagttcccgctgcttgttgcaacttagcgataccagtctcacttaacttgtagctatactgaccagcattgacaccgtcattattaacaacaatatctgctagagacagagctaccctttgctctgtgtctccaagtttcaatgcggcttgaatacctttagccccactcgctttggtttgtccatcataaacaaaggtgacatcgttgcccgtggctgtggccgctgctggtgtaatcgtaacagtgcctgacaaatcggttgtgtctaccagatagttagatcctgctgcttgttgtaacttagcaataccggcgtcacttagcttatagctatattgtccagcgtttaatccgtcattattgacaacaatatcgcttgaggctaatgccactgatcgactcgaatttccaagtttaagcgttgcctgaatccccttagcgtcactggccttagtttgaccgtcataaacaaaggagacattgcttcctgtggctgtagcttcggccggtgtaatcgtgatcgtaccagaaacttgattaatttcagtttggtcaattgtgacagtttctccgaggagatcttgcaaccgtgctaaaccgacactgttgagcaaatagtgatacgtaccggcatttgccgaatttttttcgaccagtgtaatatctgcagctgtcaagttcatcgtttgttgcgtaccatcactcaagaccaccgtgactgctaaatcattagcctgactggccagtgttgtcccatcatatacaaatccgccattaccaagcttgccggttgctgtcagaccaataatcaactgtgccgtacttgtacccgtaaagttaaaattagccgcagactgaccgtcgtcattagtcagtttagcaatgcgatcccaagcggcttgtgaaagctaaacggtgtaaacaccagttgccgtcagcgcatcagcggcaacttgattaccattggcgtcaaagaaattaagatcactcagctgaagtgtcccagcatcaaagccttcacccaaacttaatgaaaattgcttggtatcaactgtaattggctggcctgttgccgttgtggtttgagtcccgaccaacgcataagaagctgccagacgctgattgtaatagattttcgccgaaccgctttcagcgccgtaagtgtatgtcaccgtatacgttgtcggctgcgtattatccacgtcaccggtaacaataccgttcttatctttctccgaaacaatcttcccgttttcatccgtgaccgtccatgtcagttcgcttaaaggaacactggtgccatcttgtttgactgcatctataaaattcaattccggcttccaaacctggccggtgaaaagactgatatcatgggcacgaatcaccggatcatcaagatgaacattgtaatgacctgtatatgtgaccccatcgtttcctttcaaagaccagtcaaaactgaatccctgcgtttgcgctggcatcttaaatgacttgcttgccgtatcgaaggtcactttgaccccattcgaacctttgatgtttgaaacaacgatgtcttggtgagtaacaccagaaatggcgacatcaaagaagtcacttaggcttacgtgggctgagtctgtataagcatctgcactttgattgagcgcatctggtgtagctggctgcgcagtgcttgcttgtaaaaccgtgatccggttcgttgagaaagcttccttaccgatgaccggtgcgcctgcaatgatcactttaggcatcaaattaacgttgaaagcttttgccccaatggtcgtgacgctgctcggaattgtcagcgcatttaaaatgacattggcttcaaaggcttcttgaccaatcgtttttaacccgttacctaatgtcaggttgctgatagagttgtaaacaaacgcgtacttcccgatatcagtcacgctatctggtacaaccagctcattttgaatctgattgtatccaaaagccgtgtccccaattgtttgcaaaccgttatttaatttcaatgccggaattcgattgccaacaaacgctgcattgccaattgagaccagttttgccggaaatgcaattgcattattgatagtattgtatgcaaaggcactatctccaattgtctcaagtgccgttgctcggctaaagtcagcattccctagtgggccaaattcagcaaaggccagattaccaattgactgcaatttgggtccaaacgctactttcacaagcttcccgccataaaaagcctggtcaccaatctgctctaatgaatcaggcatatccattgaagttacagttgcaaaggcaaaggcttgatacccaagcgtcgttagctgactgtcaggtgccactgtaattaccgtaattttagcagcataaaaagctgcattcgtgattgtcttaatattagccgagagattaagtgagtcaatttgatttttcggattatcttttccgtcaatttgcggtaattccttagtattttcaataaactgaaacgccccatccgtgatcacgcgaacatcatcaccaaatgttaactgatcagtataaagatggaaaaacgcctgctgatcaatagttgctgcgttgatcgtcacctgaccaattctcgacatggcaaaggcttgattgccaaaagtcgttgccgcgccattcagtgatagtgatgccgcatacacttgataaaaagccttctcaccaagtgcaacgttatctggcacattgatagcgtctgttaccttagcaaactgaaaagcattatcaccaatcgtatttgcgcctgtaatattaacagaacctgtgatttgggcgtatataaacgctccctcaccaatatcggtttgtccatttatagtgagcgcttgcgccttgaggctagcaaatgcatttttatcaatcgtctgtgcattattaacggtaacatccccagcaatattggcagactcaaaagcagactcgctaatatcggcttgaccatcaatttttaaagatgaagctgtaagaccaaagaatgcctgtgtctcgatagtcttagcatcagcaatggttataccaccactcaagtttgcataagcgaaggtctttgttccaatattggcagtgccattaagagtgacagaaaccgcctttacactagcgaaagctgcactaccaacatcaatagcattttcaattgtaatattgcctgtgaattgactgtatgcaaaagcattttcgccaatggacgtgacggtatcagccacattaacattacccaaattattaagcgttgcaaaagcgccattgttaatcgccgtcactttaaaagtttggccattataggtaacagacgcgccaatgttaatatcggtgacgttggcgttggcgcggccggtaaccgttgctgtaccgtttgccgtatcaagactgtaggtatagtcgccaatggtctgcgtactttcagcagctgttgcattggccggagcttgcgtgttggcctgagttgttgttgccgattgtgctgctaaggatgcttgtgacgatgcagatgaagccgtcgatgatgctgcggccgaagttgtctgaacagctgcggatgcaagtgagcggtcttcttgggtcaccgtttgcggtttaactgctgccgaacctgtcgctagcgacttcgaatcggttgcatcactcgtgcttgctgctgaatcgccggttgacgctacagctgaactagcgatgcttgatgcagatgactgagttgcagaactagcagcgttgacagccgcactacttgaagcagccgctgtattttgcgttgttgtgccggctggctgtgtgttaccagtcgctgtttttgcagtcgtttctgctgtagcaccggactgactggtaacggctgtcgtttgtggggatttgctgtcagcgtgaacctcctgccccggctgaaaaagtgcaggcatcaataataatgccgtgcctgcaattagccagcgcttctttgccttgtacattcgaaagcgaacatgcactgtttgttttgttcgcaaagcagccaccgtccgtttagacccgaacttcacgatatgacccctcctagttatttaccacattaaaatacaaaaaaaggcataaatcctaatattgtagaatcatagtacttaccatttattttatatcattttcataacaaatgggtcacattttcaccgttcatcattttattaatagattgcattccccgataccgcctcggtttactggcagtatcgaaaataacattaacatttaaagcaaataaaaaagacacttgatcaactagttgaccaggcacctttccttaacgttttaaaataaccccaaccttccaatccgttccgccgcttcctgcaacctctgcggactcgtgagcaagccgatccggacataaccttctccatggcgaccgaatccgttaccagccgcaactgccacatccgcctgatcgagcaataactcggtgaacgtctgactggtgtatccagctggtaccggcatccatgcgtaaaaagtccccggtgaacttttaccgtgccaaccaatcgcggtggtggcagaaaaccaggcatcgcgccgttgctgatacaagtcgaccagtgccgggactgacgtttgatcaccgaggagtgcttcaatccctgcttcctgaatcgccggaaaaaccgagacgaacagatgatcctgaatcagattaatcgcttcaatcatgtcggcattgccagcagcaaaggccaaccgccatcccgccatattgtaggtcttggacagcgtgtatagctcaatgccgacatctttggcaccaggctgctgcagaaaactcaccggacgctggccatcaaatccaagcgcgccgtaagcaaaatcactgacaatcccaatctgctgggccttggcaaaggcgatcgtctcgtcataaaattccggggtagccaccgcggttgtcggattattaggataattcagatacagcagtttggcagccgcggccacttccggtttaattttcgtataatcaggcagccaattattttcggcggtcaacgtcattaagactaatttcacgcgcgctaacgtcacccccgatagataatccgggtagcccgggtccggcaaaagaatcgtttccccgggattcatgagtgcaagcggtaattcgaccaagccgattttggaaccgcccaaaaccgctatctccttctccggatccaacgtaacgccatattcccgcgcatagaactcggccgctgcttgcttaaatgtcggcagtccgcgaaaaagcgaatatttatggttcccgggccgcgctactgcttgctgcgtcgcgtgaacaatattttcgggtgtcggctgatccggattgccttgacccaaattaatcacgtcatgaccagccgcaatccgttcattgacatgcttgactaaactggcaaaaaattgcttcggcagtgcctgaagcacctctgattctgaaaatgtcactggataagcccctttttaataaattagcattaacgattgcccaacgatgcgacctttactgacggcttaataaagttccggccggcgatctgtgaaaaccgggatctgctggcgcgcggctgcaatgcgatcaaggtcaattgtcacaatccttacctgtggctgatcgtctaacttcaacagccgttcaccaaaaggatcaaccacctggctttgtccgccaaatgcattgttcggatcgttaccgacacgattcaccgcgaccacatatgcctgattctcaatggcgcgtgcggctagcaaggcattaaattgcggcaatcttggtgttggccattctgccgggagaaagaacagctgggtgccatcgctggccatgcgccggaaccactcgggaaagcgcaagtcataacaaattgccacactggccggaacaccgagggtaaaatgatctgccgttgctccggctgtgataaacttttcttcattcattaagcgaaaccgatgcaccttatcgtacttggcaagttgccgaccacgctgatcaaccgtcaaactccggttataaaagtgcccattttcggctgctgcaactgacccgccaacaattgccagatgatactgctgggcgagcgcactcaagaacgccttcgtccgcaacccatccggattcgcggtggtggtcagatgttcgagatcatagccggtattccacatttccggcaatacaacgacctctgcgccttgttgtgccgcttcagccacggcattggcaaccgtctgaaaattcttctccggttgaccaaatgcaatgtctatttgggctaatgcgattgttaattgcgccatttcaatccctcttttggttgattgcttcactaaaatgccgggacaatggaacccttaaatttcttagcgatgtaatctttaatcgtttgactttgataatattttttgatttgcttaatcactttatcgttacggtgtttggtctggacaacaaaataatttggatacgggttgttcgtcgtcttttcatggtaaattgcatcttgattgattgtgaggccggcatcaaatgcaaaattcgtattgattgcagcggcggtcacatcctgtaagtgggtcggtaactgtgatgcttccagttcttcaattttcagccccaacggattggagacgacatcggccttagttgccttctgactgataccagccttgagcttaataacgcccgcagcctcaaaaagttgcagcgctcgtaactcgttagacgggtcgtttggtaccgcaatcgaatcgccttttttgagcgccttcaaatccttaatcttcttggaataaacgcccatcggaaacgcaacggtcttgaaaacctgcgtaatcttaaagttcttggacttaatctgttcctttaaaaaaggtagggtctgatagctgtttgcgcctaaatcgccatcgtttaacgccacattcggactgttatagtcggtaaactgcttcaatttgatcgtcaaaccgtctttttgagccaattttgcgacctgtttcataatcagttcgtgcgggccggctgtgacacccaccgtaattgttttgtccgacaattgatcagtggcagacttgctactggcttgacttgtgccacatgccgttagaatcaccacaagactgagcgcaacgaccgctgaaaaccctaacttcacccatttcttcattaaaaatgcctccttgttgtcatgcgttttatgtgcgcatgggtgtgtttgcgttactgataagagtgatggacgggatgagcggattaagaaaacgaaaaagataacatggtcactagggtcggctggtgctcaagccataacgcgttcgccagcccagaaacctgcacataaggaccttggtcgcaatggccaaagcccggccatcacgaccaaggccacttatgctccggtttctaagcgggctggctcacgcttaacaaaaaaaggccctgctgaatcaaaaaattgattcagcagggccgacaatgtcggggtaccaccctggttcgttaccgtgtaacctctacgatgcctgttgacaccgagaccgtttaacgcaggcctaatgcgtacccgactcatcgccgaatccattccgcggtcattttcatcagacgcctgcatcgatttccacctgccatcgactctctaaagctgcgttgctgattactctccacttcatgatgtttcatcattttatcagttatttttaaagttgaaagcagtttatctgcgtcgctgggaaatgtcaagcattttgttttttctgttcctacagcaactgtgacacttgctttaagaaactttccaagtaaaacattttctggaaatattgtttaggcaggtcaagattttgagctcgctggttgattttatcgagtatctgattagccgtcattgggcaataacctccaaaacttctgaaagcgtcgattttggatacagttctctctccagagtcagcagctcttgataatttctgtcttttcgttgcatataacgctttgccgcatcatttttaacataaagctgagtattcggagaattccaggcatccagcagtgctcgttcaacagagtagatcgaaattttattcttatcagctgttaactttgtcgtgatgcctgctgaatagtaacgaccagttcggtattgtgcgtgaatatgattgtctttcaaagcattaggggctgcgtgatagcctcttgggaacgtcatcgtatatcgccaaggcatttcgtcacttaaatcataaaaagcaagtgctgtttcttgtgaaaatacccctcgtgaaaaacgctgagatataatactcatctcgtcttctagatatcctgagaccacatacgttcctatactcagttttgttaaaacaccttgggaaatactcttctctagttgatacgcactgacgttgtatcttctggcagttccaaacgtgaatgaagtgtaatcattcattaatttagctaagttggcactaattcgactcatatactaacctccaccacattagttagtatatcactttaaaaacaattcgataagcgaaaatgtctacacccctttctccctcaatactgagaaactttcaacttttaaaaattaaggttgacttcattgataacatcgcgtatgttaacaattatcacattaaatgagatttacatgagaggggttttgtcgatgaagctggatttagaattgcgtcccggcgctaatcggtttgtcagtgaagcgggggcacttgcatacttggatacgatcttaaaggattttaccaacccagtcgtcattactggcgagaaaagtttcgcagccttcaccaaggcttatcctggcaagttgaacttaccgatttatcattatgatggctctgccagtgacgagaacggtcatgccttggctgacgaaatcggtcaagccgatgccgtggtgggtattggtgccggccgcttgatcgacaccgcgaaagtcgcggccgaaactttgggcgctgaactcgtcagtatccctaccctcgcctctaactgtgcacccttcacgcccttggccgccatttatcatgcgcagggccacaccttcagttacgtagaatattttaaaaaatcagcctacatcaccttggtcgattacaacctgctgcttagcacaccgcacgactttttcgttgccgggattggcgacacgcttgccaagtggtacgaaatggacggcatcacccgccacaaagtcgatcaactgaatgcttacggtcaattgagtcgcgcctccgccaagaccattcaggcaattctgtttaaaaacgccgagcaagccttagctgatcttgacgccggtcgtgatacgccagcgtttgaagcagttgctgacaccatcatcggccttgctggtgaagtcggtggttttggcggtattgacggtcgtgctgcaggtgcccacgcgacgcataacggactttcatatttgccggaaacccacgctgttttacatggctccaaagtcgcctatggtatcttagttcagctggccgaaaccggtgacgatgacgagatccgatcattattgcctttctatgaaaagattggcctgccgacaaaccttgaagatttacacgttaccgaaaatgttgctgaaaaaatccttcaagtagccgaatttgcagccaagccagaagaaaccttcatcttagtcgacaagtcattgacgccgcaaaaagttgcggcgtcaatggaaaaagtcgaagcagttacgagtgaagcggctgcataatcaaccgatatgttcagcgggttagtgatgttgaaaagccttagtggggaaatgctcactaaggcttttttaatcctccgtataacatctgcggctagatttgatttgttcgtttcattactgagagtctggctcacctttttgaaactagtaaagatctgggagtacatcatcacatgcttgaatttttccttaaattaacgtagagaaaactcgatttaacgtttatttgttccaaaaaatgacggttattccggaaaacccaacgttaaaatatttttgccccgttaccgatctgttgttctatattatgcgtaaggaaaccgatgctttaatgacaggaacgcaacgtcatgaattgatcgatgggggaaatgtacatgaagaacgctactattgtgaaggcagccaaacgacaaaccattaaccacgttggtgcgcgaaagtacctcaccagtgccactgtcgcaggatcaggtgcaaaatccaaaaatccggaagttattgagagattggatcatttggatggtgtcggaggcgcagcttttgatgtttagcaaacctgtttttgagcttgtcttttgggtgattctcgccttggccaatattggtctcggaatgctgcttggtgcgacattgatgcaatctcttttaaatatattaacaataatcccaataatttggatagttgttacaataatagaaatattgaccaagcgattcgcagacgaagaccagaaatcatgaataggataagcgaagggaacaaaaagaacttgaattgcagtatttggcaaagaattccaaacaattccaacttaaaaagaatcgcagcaaagtgcttcgattcttttttctaatccaaattaatctccttagcagctcgtcacataactttgtcccgtagcatctcgtaatgtcaaagggatcagccgcttacaactaattttttgccactactgtacggttttattttgatccaaataccccaatgtcgccgcagccacagccttagccgcgattagaatggcatcttcgtccagcataaagtcaggactgtggtggggatggtttgagccatcaggcagctggcagccgatgtagaagaagctgctgggaaccttctgcgcaaaataagcaaaatcttcagacggatcctgaacaccggtatccttgatcgccgtgatttggggaattttggctgctttgatcgctgtcatggcttgattcgtcaacgttgcgtcattgattaaaaccggataattatcgtcataatccagcttggtttgtaccccaaacatggcttccaacccgtgattcatcgtcacaatctgctggtgaattgtctgccgggtactttccttcatcacgcgcacgtcgccttttaacaccaccgcctgtttgatggcgttaaatgagccaactccgtcaaacgaaccgatcgtgacgctggccgtatcaaaaggatcgattcgccgcgatacgatcgtttggagcgccgtgaccaaataactgccagccacaatcgcatcgttgctcaaatgcggcatggaagcgtggccgcctttgccgataatcgtatcggtaaaattggcccggccagtttgggttgcgccagtatgatagccgatgagtcccgttggcattgacgacatcacatgaactccgatgacatttgtaaccccagctaagaccccagctgcaatcatgccttttgccccaccaggcgatacttcttctgcaggttgatgaatgatccgaatcgaacctgacaattgggttttaattttgttcaattccttggccaataccaataagtaagccgtgtgcgcatcatggccgcaagcgtgcatgaccccgggattttgcgatttaaacgggagctcattatcttcctgaatcgccaaggcatcaaagtccgcccgtaacgccaatttcggccccggctgcccgccttcaatatcgacgtacatgccataaccgtcaccacatggcacgactgacatatccaacgcagtgtaataggctttgatataagcagccgtttgtttctcgtgaaacgatacttccggatgtgcatgcagatgccggcgaatcgcaatcatttcctgttcatcgtcttccagcgcctgtaacaaggttgccaataaactcatgctgattttcccctccgtgattttgtctgaactttaggtaacttagcaatgaaacgaatcaaaaatgggcgcatggctttgaaaataacctccgccacgacaaacccgactgccaaggccatggcaatcaagatgacattataaatctgctgggctgcactcgcggcttttcccatggtaaaactacgcgcgcctagatacgcaatgccgcctgggacaagtgagactaagcttggtatgtaaatggtattgaccggcacccgatgacggatggcaaaataattacctaacaagccaatcaccaccgttgcggtaaagttaggcaacactaggctatgatcctgaagactaatcagccaatacgcacaccacgacacgccacccgtaatgcctgccggtagcaatgcccgtttaggaatattggtgatcacgccaaaaccaatgcttgataaaacactcacgataaactcaaccaataatcgcacgttaccgtccccctacgacttgggtcaacacaatggcaatgacaacgccagaaccaatcgccccggcaacaaaaaccgcatcaactgttcggacaatgccgctaataatctgacgcgacaagatttcccgaatcgcattggtaatcgccacccccggcaccaacggcatcaaggcactgataataatgttccccgaactggcaccccagccaatattagccagcaactccgctaaaatggccaccacaaacgcacctgttgcttctttaaaataaggcgtcgtcgttttccgggcaaccaactcagccgcaagataaccaaagatcccgacaaaaaaagcccaagccaagtcgccattggtcgctttaaaaagcagcatcggcgccaccgacacccagccagcgccaagtatccgcgcccaccaaggaaaattgatcacttgccgctcaatccgggccacttcttgtttcagggcatcaaacgtaatctgatgcgccacaaactcacgggaaagctgattcaattcatcgactttctgtaaattaaacccacccaaagaggatttgatcaatcgcgtgcggctttcattctccaaactgacaaaaacagctgtaatagttgcataacaagccaccttggcaccggcagcatggccaatatattcaaccgtcgtctcaatgcgggacgtttccgcgcccgcattgagcatgatctccccgaccttgccgcatacctctaagatttcctctgtatcaggctggctcatgatcccttgctccttaccgcgttatcgcatggcgttttactaattgtcggcttttttcgcgtcagtggcaagcaacctgccacgttttttattgaaacgtactaacgaagtcgaaaattagtttcattggtttctagtgttaaccaatgaaaaagtgcctgcctaagcaaacactttttctcagcatacgttatgttcatccaactaaggcgtattaaccgcaaacaataagatgcctaaaatgacataaagtgttgccagcatcagcacgacgatcaacagcgtcagcgcgcatttcaacaggagcgaaaactggcttttcttccaaatagcaaacagccagagtaccaacatcacaaccatcagtagcatgagcccagacaacaagatccggggtaaaaaagcgatcataccggtatacctcacaaatttgtgcctgcgattggtcgccattcatcgcgaatatcgctgaccgctctcaggataccaaggttctgcctccagcacaaaaatcctgcctcagcggctatcggcggcacacaaatgaagattaccgcgggacgaagaagaccgcaattaaaagcagtgcgaccacgtaacatccttgagtaacaagcgcccctctgatccatcccttcatcggctgcaagttaactgcatgttgactggttactaacagataaacaccgggtaaaatgccgaaaataggcacaaaagctaggatcaacaggaaaacaaaccacacagactggactagactttgcttcatcaaactggacaactccttttaaacgcgggcacgaacgacacttgaaaattgactaggtggtatagctaatacagctaccagcataatataaatttatttgttttcatagggcaacttctgctcgtttaatccctagttcagcaatttgttcgcggtttatcttgacaatctcaaaaaaaggggttgactggtaactaatatctttaggagtcgttttcgtccatatactgatacacttccttcaattttgcgactccgctttagcaacgggttttgatagcgtgcaaggagtgattaaaatgaatacatacagaaaaatcaatttgcgttgggtgtcgcatcaattacccgccttattaaaagtcaaacttgtttgctttgcgcttgctagtgccttccagcaactcttgtcaggcttggttttgggccagcttgttgaacttgacttttcggataacctgaagctagctgaattcattttctttgctgttggttcctttgcgatcactgccgttgccgaatattactttgtcaaagccggacaacgagccattaggttacttaaccaagcactaaagaaggactattttgatgatgccctctcgaagtcactttccgagtcatctgaagtatccgacgtcattaaccgtgttgacggtgtagccaaacaagttgaacaaagctactttgagtcgttgctaacagtccttcaaagcagtattactttaattggatcggtgattgtcctactcaaacttaatttcgttttaagtttaatttatctactgttttcattaatatcgctattgccaagcgcttttggcagaaataaactgacgcgccaaaccgagaaatggacacatgccaatgctgatttgatgctcatcattaaggatttatttcgcggcagatttgacatcattaattttggggccggacccgccttttatgctcgctttaacaacaagcttaaccttgaagaagctgagtatgaacgaatgaacacgtaccagtattggattcagtttgtgtcatggtcgtttgccatttttgcttatttatcccctatctttattggcattatctttttaagaaatgggtggtttggggtcactaaaggcattattgtgacgttaactttaaccgcagactccgtaatcagtggtattcgccaactcacgcagattcaaaccaagattgtcagcactgaaaagttacgacgcgtgcctattgtcaaaaatgtctttcttacgcctaacgccaaggaatctcagcccgccgccaaagatccgaaaacattagcaattaataacttatcggttcagcgtgaccagcacgttatattcaaccatctaaacctaactctggctccaggtgaaaaaatcattgtaaccggtccctctggtattggtaaatcgacactgttaaagaccattaccggaagaataaaaccgacaaacggctcgattcgcttccaggggcgcccgattactacaggtgattttgttctggtttcccaagatgtatggttgtttaatgcaactttgcgtgaaaatattacgttgtatcaaaattactcggatgaaacgcttcatcatattttgaatttagtcggcttagatcgcgaactaggtagcaatgcgttggaaacacacatccgcgacaatggctccaatttgtcaggcgggcaggcgcaaagaatcgcgattgctcgaggattattaagacaaagccccatcttcttattcgatgaaatttctgcaaacctagatgatgcgaatgcttataagatcagaaaattaatgtactcactcccttcaattgtcatcgaagtcgctcaccattacgatagcgcgttagccaaagaaaacgggattcacgtaaagaagaacttactgggtgcatcgcttactagctaatcgccatggtgttctgcataggtgtaaagaatctaccgggagcagttttgtattaaaaaaaccgcgatcacactgaccgcggtttttttaatacaaatattcttagtaccttctccagcaacccgttactgtgccaccttactaattcgtccctgttcaatatacacggacaaaatagcgacatcagccggattgacaccactgattcggcttgcttgggcaatggtttccggttgaatcttaaccagcttttgccgtgcctcggttgctaagccattgatcgcttcgtagtcgatgcgcgccggaatctttttgccttcaagccgtttcaacttggccacactagcttcttctttggcgatgtagccggcgtatttgatctggatctcaacctgttcaatcacccgatgatccaaggttggggtttccggtaagaactgcgctagcgtctgataattgatttccggacgcttcaagaagtcactggctaagaccccatctttaagtggggcaaaatgatgagcctcaagccacgggttgacatccttgggcttcaggcgggtgtgctcaaggcgtgctaattcatcggtaatggcttgacgcttagccaaaaagtctgcatagcgttgatcactaatcaggccaagttcatgtcccattggcgttaagcgcagatccgcattgtcatgacgcagtaacaaccgatactcggcgcgactggttaacaaacgataaggttcattcgttccttttgtcacgagatcatctatcatcacgccaatataagcatctgaacgcttcaacgtgaagggtcctttgccttgagcgcggcgggcagcattaatcccggccacaattccctgcccggcagcttcttcataaccactggtaccgttcatttgtccggcggtatacaaattccgcacaaccttagtttccaacgttgccttcaactgccatggctcgataacatcatactcgatggcataaccagcgcgcatgagttcggcatgttccaatcccgccacactgtgcagcattttcaactggatttcctcaggcatggacgttgaaaagtcccccacataatattccgaggtgtcgcggccttcaggttccaagaataattgatgccgcggcttatcagcaaagcgaacaattttatcttcaatggatggacagtaacgcggcccgactcccttaatcacgccggaaaacatcggcgcgcgatccagattctcccgaataatctgatgagtcgtcgcgttggtgtacgtcatccaacaactcaactgatctttgagataaaccgaatccggcgttgtaaaactaaaatgattcggtgttttatcgcctggttgttcttcggttttggaaaagtcaatcgtattgccattaacacgcggcggagttccggttttgaagcggcgcagcttaaagcccagctgctccagattttcagagagcttaatgcttggcagactattgttagggccggaactatacatgagttcgccgataataattttaccgcgggaactggtgccagctgttagcacaatactcttggcgcgataaatggccccggtagcagccacgatgccgactgccttaccatcttcgaccagcacttcggtagcgagtccctgccgtaagtccaaatgcggcgtatcttcaatgacgtgtttcatactgcggtgataggccgctttatctgcttgggcacgtaatgcgcgcactgccggacctttacccgtgttgagcatgcgcatctggatgtaggtccgatcaatattcttccccatttcaccgccgagggcatcaatttcacggaccacaattcctttggccggaccgcctaagctgggattacatggcataaatgccaacatttccaggctgatcgtcagtaataatgtcttttcgcccatgcgtgctgcagccaaggccgcttcacaaccagcgtgaccagcaccgacaacgatgacatcataagtgccggcttcaaatttctttacttcaggcatctgttttcctccaagcatctgtttttcacacgctcatgcgctacttacccagacagaactgactgaatagttgggtaattaattcatctggggcactttcgccggtaatttcgccaagcttgtcccatgccgcggtcatatcaatttgcaccaaatcaattggcatcccggcatgaatcccggccatgaccgcatccaggcttttgctagcttgccgcaataagccgatttggcgcgcgttggagaccatgactgttccctgactattttcaatgccgccaaagaagagtttggcaattcgctcatccagtgcatccatgccatcactagttggaatggcggttttgatgatttcatcggcatcaaccaattgcagcaacgccgccgtgtctaaacgcgcaggcaaatcctgtttgttcaacacgatgatccgtttcttatcagccgttgccgcaagcagctgcttgtcttccgttgtcagcggctcgctttgatccaaaaccagtaaaatcagatctgcctgcgtaatggcctgccgagaacgttccacgccgattttttcgactttatcggtggtgtcgtgaatcccagctgtgtcaacgagcttcaacgggaccccgcgaacattgacgtattcttcaaggacatcgcgcgtcgttccggcaacatcggtcacaatcgctttttcctcgtgcaacatgtgattcagtaacgagcttttcccaacatttggccggccgacaatggcagtggccaagccttcacgcaacacttttccttggctggcagtggttaggagctgctcgatcgcctttttgacggtttgagccttttccaaaagcattttagttgtcatttcgtccgtatcgtactccggatagtcgatattaacttcgacttgagccaacacttcaagaatttcctgccgcagctgtttgattaaatggtgcaggttcccatcaagctgattgacagccacctgcatagcgcgatccgtttttgcccggatcagatccatcaccgattccgcttcagtcaaatcaatgcggccatttaaaaaggcgcgcttggtgaattcccccggctcagccatacgcgccccttcgccaagcaacaactgcaaaatccgattggtcgccacgatcccgccatgacagttaatttccacaacatcttcacgcgtgaacgtctttggtgccagcataacgctgaccatgacttcatcaatcaaatcaccggtttcgggatcgacaatatgaccgtaatgaatggtatgacttttaacttgggtgagatctttgcctttaaaaaccttattggcagtggcaacagccgtttcgccacttaaacgaacaatactaatcgccccttcgccaggtggtgtcgagatggctgcaattgtgtcataagccgtaatagatgtcgccatatgcaaaaactccttttgatgatgtgagaatcgctgtgttggttggaaaatgggtggatgccgcggtgtgagacgtttgaatcctacgctgggtcgcgctcgatcataacgcgctccccggcgcagaagtctgcgtgtaaggacctcagtcgcaatggccaaagaccggccatcacgtctgaggccgcttacactccaacttctaaccgctccggctcgcgctcgatcataacgcgctccccggcgcagaagtctgcgtgtaaggacctcagtcgcaatggccaaagaccggccatcacgtctgaggccgcttacactccaacttctaaccgctccggctcgcgctcgatcataacgcgctccccggcgcagggacctgcatgtaaggaccttggtcgcaatggccaaagaccggccatcacgaccaaggccgcttacactccggtccctaaccgctccggctcgcgctcacaaaaaaagcgcagaacccagcctttccctatcgttagaaaaggctggataaagcactttgactacttcatcgtgattaaactgtgatcatcatactgaaatgttgcttacttgtcaaaagttagttatgggcgtttgggggtgacgacgacatagcgccggggatcgacgccttcggaatgggtgtcgacgtattgattgtccgccagtgttgtatggatcgccttgcgttcaaacgatggcattgggtctaagtaaatggctttgccggttgccagaacttcgcgcgcggttcgttcagctaagcgggtcacggttgcttggcggcgttcgcgatagtcgccgacgtccagcatgatggtccacttgcttttaccataatggttaaactcggtttgcgctaagtattgaatcgcattgataatcttgccatgtttgccgattagcaagccttcctcatcggttttgagttggaaggtaacggtattaccttggcgctcgctgctgacttgggttttgatgcccatgccgctagtaatatcttccaaataactttgtaccatcgccagcgccgtttgattatcgcgctttttagtggtgatgtcgttaaatgcgctggcaatctttttaccggcgctatcagttaacgctaccgccagtttgccggcgcttgatttcccggtggcaggttcttttgctttaggatcaggcgcgggatctgccggtggttcgagtggtttcaagttaacaatcgctggcttgcgcatgaatccaaggaagccattcttattttcctgaaccacttggacgctcacggcatcacgcggtaagcccagttgcttgagtccggcctcaatggctctttgaatcgtactgccttgaaaggttggcatcttgcttcctcccgttgttatttacgccgtttggtcgcttttttatacgcttttctaagtgcgcgttctttttccttctcggcccgtgctttttcttcacgttcgcgccgaatcttaaatggattttgaatcaacaattgctgaaccattgaaaaggcgttggtaacaacccaataaatggccagcgcacttggtaaggtaacggagaatacaaaaatcatagccggtgaaatgatcatcatcacccagctgcttgaattgcgggtcggttgggccatcatcgataaaatactggttcccaacgtaaataaggttgccagaatctgcataatccacaatgggtcaggttgtgacaggttcatccatagaaaagtcccggattgcaatgaagaagttcgtaaaatcgcttgatatagtgcgatcaggaacggcatctggatcacaatcggcaaacagcccatcaccgggttaacgccagctgatgcataaagcttttgcgtctcgtcgcggagtttggtttgggtttcggtgtcttttgaactgtattttttctgtagttcttttaactgcggggcgatttcctgctgcttggccatgctcttgatggacagatagctcaacgggaaaatcaaaatccggataattaaggtaaaggcgatgatcccgacaccaggatttccgccaaacaaattggccagccagataacaaattgaccggcagtataaaccacatagcgatcccagaatccggtactgttttctgacaccggcgccgttccacaggcagtcagaagaaagactagactcagcatgctcacaatgacgagcaggcgtttgaattgacgatttttcacaaataatccctctcttaatctcaacatggtcaaatgacctcgatatcttcgttcaggatgcccgccaaccgcatgacatgaatcaggttcttctttgtctcagccatatcaagctgattagcggacttacgcgcgataaccaaaaaatcagtctggggatcaatctcaggctttagctccaacagactctggcgaatatagcgttttatctgattacgcatgacggcagtgtggccgacttttttgcctacagagatgcccacccgaaaatgcggttgatcgcgtttcatgtgatagatcacaaaattacgattggcaaccgaatcaccatggtcaaacacattttgaaattcaacttcttttttgatccgatatgacttgcgcaatgatgctccctcacaatctggttctaagtatacaagatgacaagatgttttcctatatgtatcagcggctaacgacaggtttcttttcagcccgctaaacagcctcataaacgcaaatgaacgacaacgaccaacaatcgggtcattgccgttcattggttgtgacgtgtcagcgcatgggttaaacgcggtgccgggtcattcatggaaaaatgcgggtaagcgtttttgggtgactgcctttgctgtgctaattagtcgcttggtgatgttgcgagtggttcaagaacgtaccgattgattgcagacaacgcgctctctgtaacagagctgcctatcgcaactgttgacggctccgaaacgcgctcaccagcgcagaagtctacgtgtaaggacctgagccgcaatggccaaaacccggccgaccttatcacggctccgaaacgcgctcaccagcgcagaaacctgcgtataaggacctctggacccaatggccaaagcccagccgaccaattacggctctgaaacgcgttcgccggcgcagaagtctacgtataaggacctgagccgcaatggccaaagcccggccgaccaattacggctccgaaacgcgctctccagcgcagaaacctgcgtataaggacctcagaccccaatggccaaaacccggccattggggtctgaagccacttatactccggtttctaaccgcgctggttcgcgctctgctctaaaaaaaaccactgacgcggtcagtggcttaggcagataatactttacgtcctttagcgcgacggcgtgctaaaactttgcggccgttctttgtgctcatccgcttcatgaaaccatgaacacgttcgcggtgacgtttctttggttggaaagtccgcttggttgtcattgacgacacctcctagttaaaaccgatttatcttattaagatgacttgcattatcagacatcatccgagtttacacgaggaagcaagccgcgtcaaggctttttcactgacatcgtacatctttttaggatttgaactgggtcagttgcagcaatcgggtttgtggataacttgtgtgttgttaaaatacaaagcttatttcatgcacaggctgcgcacaagtaatttgcaagttcacatccatgtttacatagttatccacaggctgtaaatcgcctgttcatatcttgtgaaacacttacggctacaaggttttggttccacagacaaattgtgcataacttgcaatttggggattttggctgcaatcatcctcagccttggggataatttgttcgcaccctgtttctttttcgattttttgtttgtggaaaactgtgatttctgtggaaaactcctttctgcaatgctaaacttatttttgcagaacatttttggcactaaccgaaaatccatgatctaactaagctgattcgcctaaataatgccgttatctcgcttgttgcggcgtttgggtaactgattggctttacctaaatcgaaactagtgtacacttatccacctgtcgacaacttttgcggttgccttggctttttgtgcgctaatcattatgtttgactaccatcaatgttggctatcggttttgggacgccgatgccaaccgttattagaggaggggcgttt
